(19) United States
(12) Patent Application Publication
(10) Pub. No.: US 2007/0099251 A1
(43) Pub. Date: May 3, 2007

(54) Tissue-and serum-derived glycoproteins and methods of their use

(75) Inventors: Hui Zhang, Seattle, WA (US); Rudolf H. Aebersold, Zurich (CH)

Correspondence Address: SEED INTELLECTUAL PROPERTY LAW GROUP PLLC, 701 FIFTH AVE, SUITE 5400, SEATTLE, WA, 98104, US

(73) Assignee: Institute for Systems Biology, Seattle, WA (US)

(21) Appl. No.: 11/582,861

(22) Filed: Oct. 17, 2006

Related U.S. Application Data
(60) Provisional application No. 60/728,044, filed on Oct. 17, 2005.

(51) Int. Cl. G01N 33/574; C12M 3/00

(52) U.S. Cl. 435/7.23; 435/7.92; 435/287.2; 977/902

(57) ABSTRACT

The present invention is directed generally to tissue-derived glycoproteins and glycosites detectable in plasma via mass spectrometric analysis of glycoproteins from both tissues and blood. The invention also provides methods for identifying tissue-derived glycoproteins and glycosites in plasma, panels of detection reagents for detecting same, as well methods for detecting disease using such panels. The invention further provides a database of tissue-derived glycoproteins and glycosites detectable in plasma.

### STATEMENT OF GOVERNMENT INTEREST

[0001] This invention was made with government support in part with federal funds from the National Heart, Lung, and Blood Institute, National Institutes of Health, under contract No. N01-HV-28179, with federal funds from the National Cancer Institute, National Institutes of Health, by grant R21-CA-114852 and U01-CA-111244, and under contract No. N01-CO-12400, and by NIH grant R01-AI-41109-01. The government may have certain rights in this invention.

### STATEMENT REGARDING TABLES SUBMITTED ON CD-ROM

[0002] Tables 1A and 1B associated with this application are provided on CD-ROM in lieu of a paper copy, and are hereby incorporated by reference into the specification. Two CD-ROMs are provided, containing identical copies of the tables, which are designed to be viewed in landscape presentation: CD-ROM No. 1 is labeled Copy 1, contains the 2 table files which are 2.06 MB combined and created on Oct. 17, 2006; CD-ROM No. 2 is labeled Copy 2, contains the 2 table files which are 2.06 MB combined and created on Oct. 17, 2006.

LENGTHY TABLES FILED ON CD
The patent application contains a lengthy table section. A copy of the table is available in electronic form from the USPTO web site (http://seqdata.uspto.gov/?pageRequest=docDetail&DocID=US20070099251A1). An electronic copy of the table will also be available from the USPTO upon request and payment of the fee set forth in 37 CFR 1.19(b)(3).

### STATEMENT REGARDING SEQUENCE LISTING SUBMITTED ON CD-ROM

[0003] The Sequence Listing associated with this application is provided on CD-ROM in lieu of a paper copy, and is hereby incorporated by reference into the specification. Three CD-ROMs are provided, containing identical copies of the sequence listing: CD-ROM No. 1 is labeled COPY 1, contains the file 404.app.txt which is 57.9 MB and created on Oct. 17, 2006; CD-ROM No. 2 is labeled COPY 2, contains the file 404.app.txt which is 57.9 MB and created on Oct. 17, 2006; CD-ROM No. 3 is labeled CRF (Computer Readable Form), contains the file 404.app.txt which is 57.9 MB and created on Oct. 17, 2006.

### BACKGROUND OF THE INVENTION

[0004] 1. Field of the Invention

[0005] The present invention is directed generally to tissue- and serum-derived glycoproteins and glycosites identified via mass spectrometric analysis of glycoproteins from both tissues and blood. The invention also provides methods for identifying tissue- and serum-derived glycoproteins and glycosites, panels of detection reagents for detecting same, as well methods for detecting disease using such panels. The invention further provides a database of tissue-, plasma- and serum-derived glycoproteins and glycosites.

[0006] 2. Description of the Related Art

[0007] Biomarker detection can have a tremendous impact on the clinical outcomes of patients. A particular challenge in the diagnosis and treatment of human disease is the identification of molecular markers for detection of disease at an early and treatable stage, and the molecular definition of disease progression to allow for implementation of the most effective treatment (1). Expression array studies have shown that such markers, or marker panels, exist in cells from disease tissues and can be associated with pathological changes in the disease and its various prognoses (2, 3). Unfortunately, most tissues are not readily accessible for routine screening. Thus expression array studies are limited to general screening for diagnosis of disease.

[0008] On the other hand, blood has long been thought as a window to a person's health. The basis behind this idea is that blood picks up molecular cues as it circulates throughout the body and that these cues, or biomarkers, can collectively inform about the various organs, tissues or cell type from which they originated. It thus follows that if tissue-specific changes or patterns can be detected in blood, then the development of simple blood-tests could allow for routine diagnostic screening. However, the discovery of tissue-specific changes in blood is hampered by the fact that human blood is extremely complex, consisting of minimally tens of thousands of different molecular species that span a concentration range of at least 10 orders of magnitude (4). Indeed, the plasma proteome is dominated by 22 abundant proteins that constitute 99% of the total protein mass (5). Many of these abundant plasma proteins are altered by mutations, alternative splicing, post-translational modifications such as phosphorylation, glycosylation, acetylation, methionine oxidation, protease processing, and other mechanisms, resulting in multiple forms for each protein. It has been estimated that one protein may generate on the order of 100 species (4, 6). Immunoglobulin alone contains thousands of, if not millions of, different molecular species. As a result, it is difficult to penetrate these high abundance plasma proteins to detect low abundance proteins using current high-throughput proteomic approaches, such as two dimensional electrophoresis (2DE) or mass spectrometry-based methods. While many of these abundant plasma proteins are indicators of interesting biology, and have been reported to change in abundance in response to certain types of diseases (7), they are unlikely to be useful as markers for specific disease states. Further, the ability to extend these techniques to easy, consistent, and high throughput diagnostic assays has been extremely limited. Thus, there is a need in the art to provide such diagnostic assays. The present invention provides for methods and assays that fulfill these and other needs.

### BRIEF SUMMARY OF THE INVENTION

[0009] One aspect of the present invention provides a diagnostic panel comprising a plurality of detection reagents wherein each detection reagent is specific for one tissue-derived serum glycoprotein; wherein the tissue-derived serum glycoproteins detected by the plurality of detection reagents are derived from the same tissue and selected from the tissue-derived serum glycoprotein sets provided in Table 1. In further embodiments, the plurality of detection reagents is selected such that the level of at least two, three, four, five, six, seven, or more of the tissue-derived serum glycoproteins detected by the plurality of detection reagents in a blood sample from a subject afflicted with a disease affecting a tissue from which the tissue-derived serum glycoproteins are derived is above or below a predetermined normal range. In certain embodiments, the disease affects the prostate and the tissue-derived serum glycoproteins detected by the plurality of detection reagents are selected from the prostate-derived serum glycoproteins listed in Table 1. In yet another embodiment, the plurality of detection reagents detect two, three, four, five, six, seven, eight, nine, ten, or more of the prostate-derived serum glycoproteins listed in Table 1. In certain embodiments, the plurality of detection reagents detect two or more prostate-derived serum glycoproteins selected from the group consisting of PSA, CD13, CD14, CD26, CD44, CD45, CD56, CD90, CD91, CD107a, CD107b, CD109, CD166, CD143, CD224, PSMA-1, Glutamate carboxypeptidase II, MAC-2 binding protein, metalloproteinase inhibitor 1, and tumor endothelial marker 7-related precursor.

[0010] In another embodiment, the plurality of detection reagents is between two and 100 detection reagents. Thus, the panels of the present invention can have 3, 4, 5, 6, 7, 8, 9, 10, 11, 12, 13, 14, 15, 16, 17, 18, 19, 20, 25, 30, 35, 40, 45, 50, 55, 60, 65, 70, 75, 80, 85, 90, 95, or more detection reagents thereon. In certain embodiments the panels of the present invention may have 100, 110, 120, 130, 140, 150, 160, 170, 180, 190, 200, or more detection reagents thereon.

[0011] In a further embodiment, the panels of the invention further comprise one or more detection reagents that are each specific for a prostate-derived glycoprotein listed in Table 1 that does not overlap with the plasma-derived glycoproteins listed in Table 1.

[0012] In another embodiment, the disease affects the bladder and the tissue-derived serum glycoproteins detected by the plurality of detection reagents are selected from the bladder-derived serum glycoproteins listed in Table 1. In a related embodiment, the plurality of detection reagents detect two, three, four, five, six, seven, eight, nine, ten, or more of the bladder-derived serum glycoproteins listed in Table 1. Further, the diagnostic panel may comprise one or more detection reagents that are each specific for a bladder-derived glycoprotein listed in Table 1 that does not overlap with the plasma-derived glycoproteins listed in Table 1.

[0013] In another embodiment, the diagnostic panel comprises detection reagents for the detection of a disease that affects the liver and the tissue-derived serum glycoproteins detected by the plurality of detection reagents are selected from the liver-derived serum glycoproteins listed in Table 1. In this regard, in certain embodiments, the plurality of detection reagents detect two, three, four, five, six, seven, eight, nine, ten, or more of the liver-derived serum glycoproteins listed in Table 1. In another embodiment, the d further comprising one or more detection reagents that are each specific for a liver-derived glycoprotein listed in Table 1 that does not overlap with the plasma-derived glycoproteins listed in Table 1.

[0014] In another embodiment, the diagnostic panel comprises detection reagents for the detection of a disease that affects the breast and the tissue-derived serum glycoproteins detected by the plurality of detection reagents are selected from the breast-derived serum glycoproteins listed in Table 1. In a related embodiment, the plurality of detection reagents detect two, three, four, five, six, seven, eight, nine, ten, or more of the breast-derived serum glycoproteins listed in Table 1. In certain embodiments, the plurality of detection reagents detect two or more breast-derived serum glycoproteins selected from the group consisting of CD71, CD98, CD107b, CD155, CD224, MAC-2 binding protein, receptor protein-tyrosine kinase erbB-2, and tumor-associated calcium signal transducer 2. In one embodiment, the panels of the present invention further comprise one or more detection reagents that are each specific for a breast-derived glycoprotein listed in Table 1 that does not overlap with the plasma-derived glycoproteins listed in Table 1.

[0015] In another embodiment, the diagnostic panel comprises detection reagents for the detection of a disease that affects lymphocytes and the tissue-derived serum glycoproteins detected by the plurality of detection reagents are selected from the lymphocyte-derived serum glycoproteins listed in Table 1. In a further embodiment, the plurality of detection reagents detect two, three, four, five, six, seven, eight, nine, ten, or more of the lymphocyte-derived serum glycoproteins listed in Table 1. In certain embodiments, the panel further comprises one or more detection reagents that are each specific for a lymphocyte-derived glycoprotein listed in Table 1 that does not overlap with the plasma-derived glycoproteins listed in Table 1.

[0016] In another embodiment, the diagnostic panel comprises detection reagents for the detection of a disease that affects the ovary and the tissue-derived serum glycoproteins detected by the plurality of detection reagents are selected from the ovary-derived serum glycoproteins listed in Table 1. In yet a further embodiment, the plurality of detection reagents detect two, three, four, five, six, seven, eight, nine, ten, or more of the ovary-derived serum glycoproteins listed in Table 1. In a related embodiment, the panel may further comprise one or more detection reagents that are each specific for a ovary-derived glycoprotein listed in Table 1 that does not overlap with the plasma-derived glycoproteins listed in Table 1.

[0017] Another aspect of the invention provides a diagnostic panel comprising a plurality of detection reagents wherein each detection reagent is specific for one tissue-derived serum glycoprotein; wherein the tissue-derived serum glycoproteins detected by the plurality of detection reagents are selected from two or more of the tissue-derived serum glycoprotein sets provided in Table 1. In one embodiment, the plurality of detection reagents is selected such that the level of at least two, three, four, five, six, seven, eight, nine, ten, or more of the tissue-derived serum glycoproteins detected by the plurality of detection reagents in a blood sample from a subject afflicted with a disease affecting the organs from which the tissue-derived serum glycoproteins are derived is above or below a predetermined normal range. In one embodiment, the plurality of detection reagents is between two and 100 detection reagents. Thus, the panels of the present invention can have 3, 4, 5, 6, 7, 8, 9, 10, 11, 12, 13, 14, 15, 16, 17, 18, 19, 20, 25, 30, 35, 40, 45, 50, 55, 60, 65, 70, 75, 80, 85, 90, 95, or more detection reagents thereon. In certain embodiments the panels of the present invention may have 100, 110, 120, 130, 140, 150, 160, 170, 180, 190, 200, or more detection reagents thereon.

[0018] In certain embodiments, the detection reagent comprises an antibody or an antigen-binding fragment thereof, a DNA or RNA aptamer, or an isotope labeled peptide, or a combination of any of these detection reagents.

[0019] A further aspect of the invention provides a method for defining a biological state of a subject comprising a) measuring the level of at least two tissue-derived serum glycoproteins selected from any one of the tissue-derived serum glycoprotein sets provided in Table 1 in a blood sample from the subject; b) comparing the level determined in (a) to a predetermined normal level of the at least two tissue-derived serum glycoproteins; wherein the measured level of at least one of the two tissue-derived serum glycoproteins is above or below the predetermined normal level and wherein said measured level defines the biological state of the subject. In certain embodiments, the level of the at least two tissue-derived serum glycoproteins is measured using an immunoassay. In this regard, the immunoassay may be an ELISA or other immunoassay known in the art. In another embodiment, the at least two tissue-derived serum glycoproteins is measured using mass spectrometry or an aptamer capture assay.

[0020] A further aspect of the invention provides a method for defining a biological state of a subject comprising; a) measuring the level of at least two tissue-derived serum glycoproteins selected from any two or more of the tissue-derived serum glycoprotein sets provided in Table 1; b) comparing the level determined in (a) to a predetermined normal level of the at least two tissue-derived serum glycoproteins; wherein the measured level of at least one of the two tissue-derived serum glycoproteins is above or below the predetermined normal level and wherein said measured level defines the biological state of the subject. In some embodiments, the at least two tissue-derived serum glycoproteins is measured using an immunoassay such as an ELISA, or they can be measured using any of a variety of methods known in the art, such as mass spectrometry or an aptamer capture assay.

[0021] Another aspect of the invention provides a method for defining a disease-associated tissue-derived blood fingerprint comprising; a) measuring the level of at least two tissue-derived serum glycoproteins selected from any one of the tissue-derived serum glycoprotein sets provided in Table 1 in a blood sample from a subject determined to have a disease affecting the tissue from which the at least two tissue-derived serum glycoproteins are selected; b) comparing the level of the at least two tissue-derived serum glycoproteins determined in (a) to a predetermined normal level of the at least two tissue-derived serum glycoproteins; wherein the measured level of at least one of the at least two tissue-derived serum glycoproteins in the blood sample from the subject determined to have the disease is below or above the corresponding predetermined normal level and wherein said measured level defines the disease-associated tissue-derived blood fingerprint. In certain embodiments, step (a) comprises measuring the level of at least three, four, five, six, seven, eight, nine, ten, or more tissue-derived serum glycoproteins selected from any one of the tissue-derived serum glycoprotein sets provided in Table 1 and wherein the measured level of at least two, three, four, five, six, seven, eight, nine, ten, or more of the at least three tissue-derived serum glycoproteins in the blood sample from the subject determined to have the disease is below or above the corresponding predetermined normal level and wherein said measured level defines the disease-associated tissue-derived blood fingerprint. In certain embodiments, the level of the at least two tissue-derived serum glycoproteins is measured using antibodies or antigen-binding fragments thereof specific for each protein. The antibodies may be monoclonal antibodies. In other embodiments, the level of the at least two tissue-derived serum glycoproteins is measured using mass spectrometry, an aptamer capture assay, or other assays known in the art. In certain embodiments, the disease is prostate cancer and the at least two tissue-derived serum glycoproteins are selected from the prostate-derived serum glycoproteins listed in Table 1. In a further embodiment, the disease is breast cancer and the at least two tissue-derived serum glycoproteins are selected from the breast-derived serum glycoproteins listed in Table 1. In yet another embodiment, the disease is bladder cancer and the at least two tissue-derived serum glycoproteins are selected from the bladder-derived serum glycoproteins listed in Table 1. In a further embodiment, the disease is liver cancer and the at least two tissue-derived serum glycoproteins are selected from the liver-derived serum glycoproteins listed in Table 1.

[0022] Another aspect of the invention provides a method for defining a disease-associated tissue-derived blood fingerprint comprising; a) measuring the level of at least two tissue-derived serum glycoproteins selected from two or more of the tissue-derived serum glycoprotein sets provided in Table 1 in a blood sample from a subject determined to have a disease of interest; b) comparing the level of the at least two tissue-derived serum glycoproteins determined in (a) to a predetermined normal level of the at least two tissue-derived serum glycoproteins; wherein a level of at least one of the at least two tissue-derived serum glycoproteins in the blood sample from the subject determined to have the disease that is below or above the corresponding predetermined normal level defines the disease-associated tissue-derived blood fingerprint. In one embodiment, step (a) comprises measuring the level of at least three tissue-derived serum glycoproteins selected from two or more of the tissue-derived serum glycoprotein sets provided in Table 1 and wherein a level of at least two of the at least three tissue-derived serum glycoproteins in the blood sample from the subject determined to have the disease that is below or above the corresponding predetermined normal level defining the disease-associated tissue-derived blood fingerprint. In a further embodiment, step (a) comprises measuring the level of four or more tissue-derived serum glycoproteins selected from two or more of the tissue-derived serum glycoprotein sets provided in Table 1 and wherein a level of at least three of the four or more tissue-derived serum glycoproteins in the blood sample from the subject determined to have the disease that is below or above the corresponding predetermined normal level defining the disease-associated tissue-derived blood fingerprint. In yet a further embodiment, step (a) comprises measuring the level of four or more tissue-derived serum glycoproteins selected from two or more of the tissue-derived serum glycoprotein sets provided in Table 1 and wherein a level of at least four of the four or more tissue-derived serum glycoproteins in the blood sample from the subject determined to have the disease that is below or above the corresponding predetermined normal level defining the disease-associated tissue-derived blood fingerprint. In certain embodiments, step (a) comprises measuring the level of five or more tissue-derived serum glycoproteins selected from two or more of the tissue-derived serum glycoprotein sets provided in Table 1 and wherein a level of at least five of the five or more tissue-derived serum glycoproteins in the blood sample from the subject determined to have the disease that is below or above the corresponding predetermined normal level defining the disease-associated tissue-derived blood fingerprint.

[0023] Another aspect of the present invention provides a method for detecting perturbation of a normal biological state in a subject comprising, a) contacting a blood sample from the subject with a plurality of detection reagents wherein each detection reagent is specific for one tissue-derived serum glycoprotein; wherein the tissue-derived serum glycoproteins detected by the plurality of detection reagents are selected from any one of the tissue-derived serum glycoprotein sets provided in Table 1; b) measuring the amount of the tissue-derived serum glycoprotein detected in the blood sample by each detection reagent; and c) comparing the amount of the tissue-derived serum glycoprotein detected in the blood sample by each detection reagent to a predetermined normal amount for each respective tissue-derived serum glycoprotein; wherein a statistically significant altered level in one or more of the tissue-derived serum glycoproteins indicates a perturbation in the normal biological state.

[0024] A further aspect of the invention provides a method for detecting perturbation of a normal biological state in a subject comprising, a) contacting a blood sample from the subject with a plurality of detection reagents wherein each detection reagent is specific for one tissue-derived serum glycoprotein; wherein the tissue-derived serum glycoproteins detected by the plurality of detection reagents are selected from two or more of the tissue-derived serum glycoprotein sets provided in Table 1; b) measuring the amount of the tissue-derived serum glycoprotein detected in the blood sample by each detection reagent; and c) comparing the amount of the tissue-derived serum glycoprotein detected in the blood sample by each detection reagent to a predetermined normal amount for each respective tissue-derived serum glycoprotein; wherein a statistically significant altered level in one or more of the tissue-derived serum glycoproteins indicates a perturbation in the normal biological state.

[0025] Another aspect of the invention provides a method for detecting prostate disease in a subject comprising, a) contacting a blood sample from the subject with a plurality of detection reagents wherein each detection reagent is specific for one prostate-derived protein; wherein the prostate-derived proteins are selected from the prostate-derived serum glycoprotein set provided in Table 1; b) measuring the amount of the tissue-derived serum glycoprotein detected in the blood sample by each detection reagent; and c) comparing the amount of the tissue-derived serum glycoprotein detected in the blood sample by each detection reagent to a predetermined normal control amount for each respective tissue-derived serum glycoprotein; wherein a statistically significant altered level in one or more of the tissue-derived serum glycoproteins indicates the presence of prostate disease in the subject. In this regard, the prostate disease may be prostate cancer, prostatitis, or benign prostatic hyperplasia. In one embodiment, the plurality of detection reagents comprises at least 2, 3, 4, 5, 6, 7, 8, 9, 10, or more detection reagents.

[0026] A further aspect of the invention provides a method for monitoring a response to a therapy in a subject, comprising the steps of (a) measuring in a blood sample obtained from the subject the level of a plurality of tissue-derived serum glycoproteins, wherein the plurality of tissue-derived serum glycoproteins are selected from any one of the tissue-derived serum glycoprotein sets provided in Table 1; (b) repeating step (a) using a blood sample obtained from the subject after undergoing therapy; and (c) comparing the level of the plurality of tissue-derived serum glycoproteins detected in step (b) to the amount detected in step (a) and therefrom monitoring the response to the therapy in the patient.

[0027] Yet a further aspect of the invention provides a method for monitoring a response to a therapy in a subject, comprising the steps of (a) measuring in a blood sample obtained from the subject the level of a plurality of tissue-derived serum glycoproteins, wherein the plurality of tissue-derived serum glycoproteins are selected from two or more of the tissue-derived serum glycoprotein sets provided in Table 1; (b) repeating step (a) using a blood sample obtained from the subject after undergoing therapy; and (c)comparing the level of the plurality of tissue-derived serum glycoproteins detected in step (b) to the amount detected in step (a) and therefrom monitoring the response to the therapy in the patient.

[0028] Another aspect of the invention provides a targeting agent comprising an tissue-derived probe that specifically recognizes a sequence of any one or more of the sequences set forth in Table 1, wherein said probe has attached thereto a therapeutic agent, said therapeutic agent comprising a radioisotope or cytotoxic agent.

[0029] Another aspect of the invention provides an assay device comprising a panel of detection reagents wherein each detection reagent in the panel, with the exception of a negative and positive control, is capable of specific interaction with one of a plurality of tissue-derived serum glycoproteins present in blood, wherein the plurality of tissue-derived serum glycoproteins are derived from the same tissue and wherein the pattern of interaction between the detection reagents and the tissue-derived serum glycoproteins present in a blood sample is indicative of a biological condition.

[0030] One aspect of the present invention provides a method for diagnosing a biological condition in a subject comprising measuring the level of a plurality of tissue-derived glycoproteins in the blood of the subject, wherein the plurality of tissue-derived glycoproteins are derived from the same tissue and wherein the levels of the plurality of tissue-derived glycoproteins together provide a fingerprint for the biological condition in the subject. In certain embodiments of this method the level of the plurality of tissue-derived proteins is quantified using a method selected from the group consisting of tandem mass spectrometry, ELISA, Western blot, microfluidics/nanotechnology sensors, and capture assays mediated by aptamers or other types of capture agents. In another embodiment of the method, the plurality of tissue-derived glycoproteins comprises from at least 2 tissue-derived glycoproteins to 100 or more tissue-derived glycoproteins. In this regard, the plurality of tissue-derived glycoproteins may comprise about 10 or about 20 tissue-derived glycoproteins. In certain embodiments, the tissue-derived glycoproteins comprise prostate-derived proteins. In this regard, the prostate-derived proteins are selected from the group consisting of CD13, CD14, CD26, CD44, CD45, CD56, CD90, CD91, CD107a, CD107b, CD109, CD166, CD143, CD224, PSMA-1, Glutamate carboxypeptidase II, MAC-2 binding protein, metalloproteinase inhibitor 1, and tumor endothelial marker 7-related precursor. In a further embodiment, the tissue-derived glycoproteins comprise breast-derived proteins. In this regard the breast-derived proteins are selected from the group consisting of CD71, CD98, CD107b, CD155, CD224, MAC-2 binding protein, receptor protein-tyrosine kinase erbB-2, and tumor-associated calcium signal transducer 2. In certain embodiments, the biological condition comprises a cancer. The cancer may be any one or more of prostate cancer, ovarian cancer, breast cancer, liver cancer, lung cancer, pancreatic cancer, kidney cancer, or colon cancer. Other cancers known in the art are also contemplated herein. In another embodiment, the biological condition is selected from the group consisting of cardiovascular disease, metabolic disease, infectious disease, genetic disease, autoimmune disease, immune-related disease, and cancer.

[0031] Another aspect of the invention provides a method for determining the presence or absence of disease in a subject comprising, detecting a level of each of a plurality of tissue-derived glycoproteins in a blood sample from the subject, wherein the plurality of tissue-derived glycoproteins are derived from the same tissue; comparing said level of each of the plurality of tissue-derived glycoproteins in the blood sample from the subject to a level of the plurality of tissue-derived glycoproteins in a normal control sample of blood; wherein a statistically significant altered level of one or more of the plurality of tissue-derived glycoproteins in the blood is indicative of the presence or absence of disease. In one embodiment, the level of each of the plurality of tissue-derived glycoproteins is detected using a method selected from the group consisting of mass spectrometry, and an immunoassay. In a further embodiment, the level of each of the plurality of tissue-derived glycoproteins is measured (quantified) using tandem mass spectrometry. In yet another embodiment, the level of each of the plurality of tissue-derived glycoproteins is measured using ELISA. In an additional embodiment, the level of each of the plurality of tissue-derived glycoproteins is measured using an antibody array.

[0032] Another aspect of the present invention provides a method for detecting perturbation of a normal biological state comprising, contacting a blood sample with a plurality of detection reagents each specific for a tissue-derived glycoprotein in blood, wherein each tissue-derived glycoprotein is derived from the same tissue; measuring the amount of the tissue-derived glycoprotein detected in the blood sample by each detection reagent, comparing the amount of the tissue-derived glycoprotein detected in the blood sample by each detection reagent to a predetermined control amount for each tissue-derived glycoprotein; wherein a statistically significant altered level in one or more of the tissue-derived glycoproteins indicates a perturbation in the normal biological state. In one embodiment, the plurality of detection reagents comprises from at least 2 detection reagents to about 100 detection reagents. Thus, the plurality of detection reagents may be about 10, about 20, or about 30 detection reagents. In another embodiment, the tissue-derived glycoproteins comprise prostate-derived proteins or liver-derived proteins or breast-derived proteins.

[0033] A further aspect of the present invention provides a diagnostic panel for determining the presence or absence of disease in a subject comprising, a plurality of detection reagents each specific for detecting one of a plurality of tissue-derived proteins present in a blood sample; wherein the tissue-derived proteins are derived from the same tissue and wherein detection of the plurality of tissue-derived proteins with the plurality of detection reagents results in a fingerprint indicative of the presence or absence of disease in the animal. In one embodiment, the detection reagents comprise antibodies or antigen-binding fragments thereof. In a further embodiment, the antibodies are monoclonal antibodies, or antigen-binding fragments thereof. In another embodiment, the plurality of detection reagents comprises from at least 2 detection reagents to about 100 detection reagents. In certain embodiments, the plurality of detection reagents comprises about 5 detection reagents, about 10 detection reagents, or about 20 detection reagents. In another embodiment, the tissue-derived proteins comprise prostate-derived proteins. In another embodiment, the tissue-derived proteins comprise liver-derived proteins, or breast-derived proteins. In a further embodiment, the disease comprises a cancer. In this regard, the cancer may be any one or more of prostate cancer, hematological cancer, breast cancer, liver cancer, and bladder cancer. In another embodiment, the disease is selected from the group consisting of cardiovascular disease, metabolic disease, infectious disease, genetic disease, autoimmune disease, immune-related disease, and cancer.

[0034] Another aspect of the present invention provides an assay device comprising a panel of detection reagents wherein each detection reagent in the panel, with the exception of a negative and positive control, is capable of specific interaction with one of a plurality of tissue-derived glycoproteins present in blood, wherein the plurality of tissue-derived glycoproteins are derived from the same tissue and wherein the pattern of interaction between the detection reagents and the tissue-derived glycoproteins present in a blood sample is indicative of a biological condition.

### BRIEF DESCRIPTION OF THE DRAWING(S)

[0035] FIG. 1. Schematic diagram of detection of N-linked glycopeptides from tissues/cells in plasma. 1. Protein extraction. Proteins were extracted from cells using homogenization and differential centrifugation (Han D K, Eng J, Zhou H, Aebersold R. (2001) Quantitative profiling of differentiation-induced microsomal proteins using isotope-coded affinity tags and mass spectrometry. Nat Biotechnol 19: 946-951) or from solid tissues using collagenase digestion of tissues (Liu A Y, Zhang H, Sorensen C M, Diamond D L. (2005) Analysis of prostate cancer by proteomics using tissue specimens. J Urol 173: 73-78). 2) Glycopeptide capture. Proteins from tissues/cells and plasma were processed by recently described solid-phase extraction of glycopeptides (SPEG) (Zhang H, Li X J, Martin D B, Aebersold R. (2003) Identification and quantification of N-linked glycoproteins using hydrazide chemistry, stable isotope labeling and mass spectrometry. Nat Biotechnol 21: 660-666). Peptides that contained N-linked carbohydrates in the native protein are isolated in their de-glycosylated form. 3) Peptide identification. Isolated peptides were analyzed to generate an identified peptide patterns from LC-MS/MS analysis and SEQUEST search (Eng J, McCormack A L, Yates J R, 3rd. (1994) An approach to correlate tandem mass spectral data of peptides with amino acid sequences in a protein database. J. Am. Soc. Mass Spectrom. 5: 976-989). 4) Peptide comparison. Peptides obtained from different samples were compared and peptides identified from both tissues/cells and plasma were determined.

[0036] FIG. 2. Comparison of N-linked glycosites identified from cell/tissue and plasma. The total number of N-linked glycosites and tissue-specific N-linked glycosites are compared with the N-linked glycosites identified from plasma. Peptide identification was defined as scoring ≧0.9 with PeptideProphet (Keller A, Nesvizhskii A I, Kolker E, Aebersold R. (2002) Empirical statistical model to estimate the accuracy of peptide identifications made by MS/MS and database search. Anal Chem 74: 5383-5392). An identified N-linked glycosite was defined as cell/tissue specific if it was only detected in one cell/tissue type in this study. The number of N-linked glycosites identified from the specific cell/tissue type that are common to a given cell/tissue and plasma are listed in small circles representing the cell/tissue (275, 64, 116, 307, 200, 329, 123, and 309).

[0037] FIG. 3. Tissue-derived N-linked glycosite identifications are also common to multiple tissue-types. Shown in this overlap are only the N-linked glycosites identified in prostate, bladder, or liver metastasis of prostate cancer that were also identified in plasma.

[0038] FIG. 4. Tissue/cell-derived proteins in blood. Selected proteins were identified in both tissue/cell and plasma using glycopeptide capture and MS/MS for lymphocyte cells (lym), prostate tissue (prst), bladder (blad), breast cancer cells (brst), liver metastasis (liv). Protein expression patterns as determined by immunohistochemistry (IHC) are also shown (proteins whose expression patterns not tested by IHC are marked with brick-like hatching). A full list of identified proteins is shown in Table 1.

[0039] FIG. 5: A schematic flow chart of a test for peptide antigen using quantitative immobilization of antibody.

[0040] FIG. 6: The known normal plasma concentration distribution for cell/tissue and plasma-derived N-linked glycoproteins. The histograms for those proteins identified from both cell/tissue and plasma or from cell/tissue only and that had also recently been shown to be candidate disease markers with known concentrations in normal plasma (Anderson L. (2005) Candidate-based proteomics in the search for biomarkers of cardiovascular disease. J Physiol 563: 23-60; Anderson L, Polanski M. (2006) A list of candidate cancer biomarkers for targeted proteomics. Biomarker Insights In press) (also see Table 1) are displayed. For convenience, published protein concentrations were binned across sequential plasma concentration ranges each spanning one order of magnitude and were plotted on a log scale.

[0041] Table 1: See Example 1. Identified peptide sequences were first assigned to proteins in the IPI database (version 2.28). Assigned proteins were then mapped to RNA sequences in the RefSeq database (NCBI build number 36) using connections stored in the IPI database and in the EntrezGene database (modified on Sep. 18, 2006).

### DETAILED DESCRIPTION OF THE INVENTION

[0042] Biomarker discovery is the detection and identification of proteins in plasma that individually, or in combination, represent the health status of a specific tissue or cell-type. Such proteins released from diseased tissues or cells in relatively small amounts will be diluted significantly upon entering the blood stream relative to their levels if analyzing the tissue or cells from which they originated. Therefore, many disease-specific biomarkers are most likely to be present in plasma at a lower abundance compared with constitutive plasma proteins.

[0043] In the search for a method that has the potential to detect such tissue-derived proteins in plasma, we developed a method for high throughput analyses of glycoproteins (8). This approach is based on the idea that most cell surface and secreted proteins from tissues are glycosylated, and that disease-associated glycoproteins, either secreted by cells or shed from their surfaces, are more likely to enter into the blood stream. This explains why most currently known clinical biomarkers for blood test are also known to be glycosylated (7). To discover additional biomarkers and develop blood tests for diseases, it is critical to detect those proteins in blood that have been shown to express in disease tissues or to change their abundance in disease tissues compared to normal tissues using either genomic or proteomic approaches. Differential expression analyses have shown that many of the genes up-regulated in disease tissues represent surface or secreted proteins, and these extracellular proteins are either known to be glycosylated or likely to be glycosylated (9, 10). Thus the profiling of glycoproteins from specific tissues or cells, and comparing them to glycoproteins identified from plasma is likely to allow for the identification of tissue- and disease-specific proteins in blood.

[0044] Thus, the present invention pre-defines tissue-derived serum glycoprotein sets specifically identified and quantified for each of multiple human tissue types. These tissue-derived proteins identified from human tissues may, in whole or in part, be used as markers or identifiers for health and disease. The levels of these tissue-derived serum glycoproteins in blood from diseased individuals may be distinguished from the levels of these tissue-derived serum glycoproteins in the blood of healthy individuals. By identifying tissue-derived serum glycoprotein markers and measuring the level of these glycoproteins in normal blood, the status of health or disease may be monitored through the correlation of the levels of glycoproteins in the tissue-derived serum glycoprotein fingerprint at the earliest stages of disease and lead to early diagnosis and treatment.

[0045] Thus, the present invention provides tissue-derived serum glycoproteins that serve as markers to measure changes in the status of a tissue or tissues to measure health and diagnose disease.

[0046] The inventive markers are used as a library of biological indicators to identify tissue-derived glycoproteins that are secreted, leaked, excreted or shed into blood in a human or mammal. Such markers can be used individually or collectively. For example a single marker for an organ or tissue could be used to monitor that organ or tissue. However, adding additional markers detected in that tissue and also detected in plasma to the assay will improve the diagnostic power as well as the sensitivity of the assay. Further, one of skill in the art can readily appreciate that probes to such markers, be they nucleic acid probes, nanoparticles, or polypeptides (e.g., antibodies) can comprise a kit, lateral flow test kit or an array and can include a few probes to several tissues or several to one tissue. For example, in one kit or assay device a whole body health assay may be used wherein several markers are tracked for every tissue and when one or more tissues demonstrates a deviation from normal a more rigorous test is performed with many more markers for that tissue. Likewise, entire tissue set assays may be devised. In such an example a cardiovascular assay may be employed wherein tissue-specific markers from heart and lung are the basis of the assay kit.

[0047] One of skill in the art can readily appreciate that the application of these tissue-derived serum marker sets are virtually limitless. From using as diagositic and prognostic indicators, to use in following drug treatment or in drug discovery to determine what proteins and genes are affected. Further, such markers can easily be used in combination with antibodies for other ligands for drug targeting or imaging via MRI or PET or by other means. In such examples, a prostate-derived serum glycoprotein marker could form the basis for targeted cancer therapy or possible imaging/therapy of metastatic cancer derived from prostate. The comparison of the normal levels of tissue-derived serum glycoproteins to the levels of these glycoproteins found in a sample of patient blood or bodily fluid or other biological sample, such as a biopsy can be used to define normal health, detect the early stages of disease, monitor treatment, prognosticate disease, measure drug responses, titrate administered drug doses, evaluate efficacy, stratify patients according to disease type (e.g., prostate cancer may well have four or more major types) and define therapeutic targets when therapeutic intervention is most effective.

[0048] The present invention provides for the identification of N-linked glycopeptides and glycoproteins from tissues and cells, as well as the detection of many of these proteins in plasma via glycopeptide capture and liquid chromatography tandem mass spectrometry (LC-MS/MS) (8). Thus, the methods, compositions, and panels of the present invention can be used to detect tissue-derived and perturbed glycoproteins and/or glycosites in plasma and perturbations in the expression of these glycoproteins/glycosites in plasma. As discussed further herein, in certain embodiments of the invention, it may be desirable to detect one or more glycosites as opposed to the glycoproteins that contain them. In this way, the concentration limit of detection can be significantly improved due to the reduction in sample complexity. Thus, anywhere that detection or quantitation of a glycoprotein is described herein, detection or quantitation of a glycosite may be substituted therefor and may be more desirable in certain embodiments. Accordingly, the present invention is useful for the diagnosis and monitoring of diseases and treatments.

[0049] It should be noted that the number of N-glycosites in the human proteome is finite and quite well known to the skilled artisan. This means that all the glycosites can be identified and, therefore, the comparison between the patterns of expression of glycosites in various tissues becomes more meaningful. This is because in all other proteomic methods, the proteome is under-sampled and it is impossible to know whether a protein is not present in a given sample or is simply not being detected. However, if all the glycosites are known, then it is possible to distinguish between a peptide not being present and a protein not being detected.

[0050] The term “blood” refers to whole blood, plasma or serum obtained from a mammal.

[0051] In the practice of the invention, an “individual” or “subject” refers to vertebrates, particularly members of a mammalian species, and includes, but is not limited to, primates, including human and non-human primates, domestic animals, and sports animals.

[0052] “Component” or “member” of a set refers to an individual constituent protein, peptide, nucleotide or polynucleotide of a tissue-specific set.

[0053] As used herein, the term “plasma” refers to plasma or serum.

[0054] As used herein, the term “serum” refers to serum or plasma.

[0055] As used herein, the term “polypeptide”” is used in its conventional meaning, i.e., as a sequence of amino acids. The polypeptides are not limited to a specific length of the product; thus, peptides, oligopeptides, and proteins are included within the definition of polypeptide, and such terms may be used interchangeably herein unless specifically indicated otherwise. A polypeptide can also be modified by naturally occurring modifications such as post-translational modifications, including phosphorylation, fatty acylation, prenylation, sulfation, hydroxylation, acetylation, addition of carbohydrate, addition of prosthetic groups or cofactors, formation of disulfide bonds, proteolysis, assembly into macromolecular complexes, and the like. A “peptide fragment” is a peptide of two or more amino acids, generally derived from a larger polypeptide.

[0056] As used herein, a “glycopolypeptide”, “glycoprotein”, or “glycopeptide” refers to a polypeptide that contains a covalently bound carbohydrate group. The carbohydrate can be a monosaccharide, oligosaccharide or polysaccharide. Proteoglycans are included within the meaning of “glycopolypeptide.” A glycopolypeptide can additionally contain other post-translational modifications. A “glycopeptide” refers to a peptide that contains covalently bound carbohydrate. A “glycopeptide fragment” refers to a peptide fragment resulting from enzymatic or chemical cleavage of a larger polypeptide in which the peptide fragment retains covalently bound carbohydrate. It is understood that a glycopeptide fragment or peptide fragment refers to the peptides that result from a particular cleavage reaction, regardless of whether the resulting peptide was present before or after the cleavage reaction. Thus, a peptide that does not contain a cleavage site will be present after the cleavage reaction and is considered to be a peptide fragment resulting from that particular cleavage reaction. For example, if bound glycopeptides are cleaved, the resulting cleavage products retaining bound carbohydrate are considered to be glycopeptide fragments. The glycosylated fragments can remain bound to the solid support, and such bound glycopeptide fragments are considered to include those fragments that were not cleaved due to the absence of a cleavage site.

[0057] As disclosed herein, a glycopolypeptide, glycopeptide, or glycoprotein can be processed such that the carbohydrate is removed from the parent glycopolypeptide. It is understood that such an originally glycosylated polypeptide is still referred to herein as a glycopolypeptide, glycopeptide, or glycoprotein even if the carbohydrate is removed enzymatically and/or chemically. Thus, a glycopolypeptide or glycopeptide can refer to a glycosylated or de-glycosylated form of a polypeptide. A glycopolypeptide, glycopeptide, or glycoprotein from which the carbohydrate is removed is referred to as the de-glycosylated form of a polypeptide whereas a glycopolypeptide or glycopeptide which retains its carbohydrate is referred to as the glycosylated form of a polypeptide

[0058] As used herein, “tissue-derived serum glycoprotein set” refers to a set of glycoproteins detected in serum that are also detected in one or more tissues. A tissue-derived serum glycoprotein set may include glycoproteins detected in serum that are expressed (and detected) only in a single tissue (e.g., a prostate-specific glycoprotein) and may also include glycoproteins that are expressed in multiple tissues (see Table 1). Illustrative tissue-derived serum glycoprotein sets are set forth in Table 1. For example, the prostate-derived serum glycoprotein set is comprised of the glycoproteins listed in Table 1 that are detected in prostate (as indicated by the table entries that contain the number 1) and also detected in plasma. Similarly, the bladder tissue-derived serum glycoprotein set is comprised of the glycoproteins detected in bladder and also detected in plasma. Note that some glycoproteins may be present in more than one tissue-derived serum glycoprotein set (e.g., Swiss Prot No. P07711 Cathepsin L precursor is in the prostate, bladder, liver and breast tissue-derived serum glycoprotein sets).

[0059] As used herein, “N-glycosite” or “glycosite” is defined as a peptide that is N-glycosylated in the intact protein.

[0060] As used herein, “tissue-derived serum glycosite set” refers to a set of glycosites (e.g. glycopeptides) identified from serum that are also identified in one or more tissues. A tissue-derived serum glycosite set may include glycosites identified in serum that are detected only in a single tissue (e.g., a prostate-specific glycosite) and may also include glycosites that are identified in multiple tissues (see Table 1). Illustrative tissue-derived serum glycosite sets are set forth in Table 1. For example, the prostate-derived serum glycosite set is comprised of the glycosites listed in Table 1 that are identified in prostate (as indicated by those cells that contain the number 1) and also detected in plasma. Similarly, the bladder tissue-derived serum glycosite set is comprised of the glycosites identified from bladder and also from plasma. Note that some glycosites may be present in more than one tissue-derived serum glycosite set (e.g., Swiss Prot No. P07711 Cathepsin L precursor was identified in prostate, bladder, liver and breast tissues as well as in serum). It should also be noted that a given glycosite may map to multiple glycoproteins. In other words, multiple glycoproteins contain the same glycosite. In certain embodiments of the invention, it may be desirable to detect one or more glycosites as opposed to the glycoproteins that contain them. In this way, the concentration limit of detection is significantly improved due to the reduction in sample complexity. Thus, anywhere that detection or quantitation of a glycoprotein is described herein, detection or quantitation of a glycosite may be substituted therefor and may be more desirable in certain embodiments.

[0061] The methods described herein such as those disclosed in Example 1, describe the detection of glycoproteins. It should be noted that these methods in fact, detect the N-glycosite, defined as a peptide that is N-glycosylated in the intact protein. (These methods can be extended to detect O-linked proteins). From the identified N-glycosites the presence of a glycoprotein is inferred.

[0062] As used herein, a “normal tissue-derived serum glycoprotein fingerprint” is a data set comprising the determined levels in blood from normal, healthy individuals of one, two, three, four, five, six, seven, eight, nine, ten, eleven, twelve, thirteen, fourteen, fifteen, sixteen, seventeen, eighteen, nineteen, twenty, twenty-one, twenty-two, twenty-three, twenty-four, twenty-five, twenty-six, twenty-seven, twenty-eight, twenty-nine, thirty, thirty-one, thirty-two, thirty-three, thirty-four, thirty-five, thirty-six, thirty-seven, thirty-eight, thirty-nine, forty, forty-one, forty-two, forty-three, forty-four, forty-five, forty-six, forty-seven, forty-eight, forty-nine, fifty, sixty, seventy, eighty, ninety, one-hundred or more components of a tissue-derived serum glycoprotein set of one tissue, but could comprise multiples thereof if more than one tissue is analyzed. The normal levels in the blood for each component included in a fingerprint are determined by measuring the level of protein in the blood using any of a variety of techniques known in the art and described herein, in a sufficient number of blood samples from normal, healthy individuals to determine the standard deviation (SD) with statistically meaningful accuracy. Thus, as would be recognized by one of skill in the art, a determined normal level is defined by averaging the level of protein measured in a statistically large number of blood samples from normal, healthy individuals and thereby defining a statistical range of normal. A normal tissue-derived serum glycoprotein fingerprint comprises the determined levels in normal, healthy blood of N members of a tissue-derived serum glycoprotein set wherein N is 1, 2, 3, 4, 5, 6, 7, 8, 9, 10, 11, 12, 13, 14, 15, or more members up to the total number of members in a given tissue-derived serum glycoprotein set per tissue being profiled. In certain embodiments, a normal tissue-derived serum glycoprotein fingerprint comprises the determined levels in normal, healthy blood of at least two components of a tissue-derived serum glycoprotein set. In other embodiments, a normal tissue-derived serum glycoprotein fingerprint comprises the determined levels in normal, healthy blood of at least 3, 4, 5, 6, 7, 8, 9, 10, 11, 12, 13, 14, 15, 16, 17, 18, 19, or 20 components of a tissue-derived serum glycoprotein set. In yet further embodiments, a normal tissue-derived serum glycoprotein fingerprint comprises the presence or absence of cell or tissue-derived proteins or transcripts and may or may not rely on absolute levels of said components per se. In specific embodiments, merely a change over a baseline measurement for a particular individual glycoprotein may be used. In such an embodiment, levels or mere presence or absence of proteins or transcripts from blood, body fluid or tissue may be measured at one time point and then compared to a subsequent measurement, hours, days, months or years later. Accordingly, normal changes per individual can be zeroed out and only those proteins or transcripts that change over time are focused on.

[0063] As used herein, a “predetermined normal level” is an average of the levels of a given component measured in a statistically large number of blood samples from normal, healthy individuals. Thus, a predetermined normal level is a statistical range of normal and is also referred to herein as “predetermined normal range”. The normal levels or range of levels in the blood for each component are determined by measuring the level of protein in the blood using any of a variety of techniques known in the art and described herein in a sufficient number of blood samples from normal, healthy individuals to determine the standard deviation (SD) with statistically meaningful accuracy. In one embodiment it may be useful to determine average levels for individuals falling into different age groups (e.g. 1-2, 3-5, 6-8, 9-12 and so forth if, indeed, these levels change with age). In another embodiment, one may also want to determine the levels at certain times of the day, at certain times from having eaten a meal, etc. One may also determine how common physiological stimuli affect the tissue-derived serum glycoprotein fingerprints.

[0064] As used herein a “disease-associated tissue-derived serum glycoprotein fingerprint” is a data set comprising the determined level in a blood sample from an individual afflicted with a disease of one or more components of a normal tissue-derived serum glycoprotein set that demonstrates a statistically significant change as compared to the determined normal level (e.g., wherein the level in the disease sample is above or below a predetermined normal range). The data set is compiled from samples from individuals who are determined to have a particular disease using established medical diagnostics for the particular disease. The blood (serum) level of each protein member of a normal tissue-derived serum glycoprotein set as measured in the blood of the diseased sample is compared to the corresponding determined normal level. A statistically significant variation from the determined normal level for one or more members of the normal serum tissue-derived protein set provides diagnostically useful information (disease-associated fingerprint) for that disease. Thus, note that it may be determined for a particular disease or disease state that the level of only a few members of the normal tissue-derived serum protein set change relative to the normal levels. Thus, a disease-associated tissue-derived serum glycoprotein fingerprint may comprise the determined levels in the blood of only a subset of the components of a normal tissue-derived serum glycoprotein set for a given tissue and a particular disease. Thus, a disease-associated tissue-derived blood fingerprint comprises the determined levels in blood (or as noted herein any bodily fluid or tissue sample, however in most embodiments samples from blood are compared with a normal from blood and so on) of N members of a tissue-derived serum glycoprotein set wherein N is 1, 2, 3, 4, 5, 6, 7, 8, 9, 10, 11, 12, 13, 14, 15, 16, 17, 18, 19, 20, 21, 22, 23, 24, 25, 26, 27, 28, 29, 30, 31, 32, 33, 34, 35, 36, 37, 38, 39, 40, 41, 42, 43, 44, 45, 46, 47, 48, 49, 50, 60, 70, 80, 90, 100, 110 or more or any integer value therebetween, or more members up to the total number of members in a given tissue-derived serum glycoprotein set tissue-derived serum glycoprotein set. In this regard, in certain embodiments, a disease-associated tissue-derived blood fingerprint comprises the determined levels of one or more components of a normal tissue-derived serum glycoprotein set. In one embodiment, a disease-associated tissue-derived blood fingerprint comprises the determined levels of at least two components of a normal tissue-derived serum glycoprotein set. In other embodiments, a disease-associated tissue-derived blood fingerprint comprises the determined levels of at least 1, 2, 3, 4, 5, 6, 7, 8, 9, 10, 11, 12, 13, 14, 15, 16, 17, 18, 19, 20, 21, 22, 23, 24, 25, 26, 27, 28, 29, 30, 31, 32, 33, 34, 35, 36, 37, 38, 39, 40, 41, 42, 43, 44, 45, 46, 47, 48, 49, 50, 60, 70, 80, 90, 100, 110 or more or any integer value therebetween components of a normal tissue-derived serum glycoprotein set.

[0065] Because the disease-perturbed networks in a tissue may initiate the expression of one or more proteins whose synthesis it does not ordinarily control, it should be noted that, in certain embodiments, a disease-associated tissue-derived blood fingerprint will comprise the determined level of one or more components that are detected in tissue but that are not normally detected in serum (see Table 1). As discussed further herein (see Example 1), Prostate Specific Antigen (PSA) is detected in prostate tissue using the methods described herein, but is not normally detected in serum. However, as would be appreciated by the skilled artisan, this protein is detectable in serum in individuals with prostate cancer. Thus, in certain embodiments, the disease-associated tissue-derived blood fingerprint will include the measured levels of one or more glycoproteins detected in tissue that may not have been detected in normal serum. Illustrative glycoproteins include those tissue-derived glycoproteins described in Table 1. Thus, in this regard, a disease-associated tissue-derived blood fingerprint may comprise the determined level of one or more components of a normal tissue-derived serum glycoprotein set or may comprise a glycoprotein or set of glycoproteins not detected in a normal tissue-derived serum glycoprotein set. Further, in certain embodiments, a disease-associated “tissue-derived” blood fingerprint comprises the determined levels of one or more components of one, two, three, four, five, six, seven, eight, nine, ten, 11, 12, 13, 14, 15, 16, 17, 18, 19, 20, 21, 22, 23, 24, 25, 26, 27, 28, 29, 30, 31, 32, 33, 34, 35, 36, 37, 38, 39, 40, 41, 42, 43, 44, 45, 46, 47, 48, 49, 50, 60, 70, 80, 90, 100, 110 or any integer value therebetween or more normal tissue-derived serum glycoprotein sets. Further, in additional embodiments, the at least 1, 2, 3, 4, 5, 6, 7, 8, 9, 10, 11, 12, 13, 14, 15, 16, 17, 18, 19, 20, 21, 22, 23, 24, 25, 26, 27, 28, 29, 30, 31, 32, 33, 34, 35, 36, 37, 38, 39, 40, 41, 42, 43, 44, 45, 46, 47, 48, 49, 50, 60, 70, 80, 90, 100, 110 or more or any integer value therebetween components of multiple sets could be combined for analysis of multiple organs, tissues, systems, or cells. Thus, in this regard, a disease-associated tissue-derived blood fingerprint may comprise the determined levels of one or more components from 1, 2, 3, 4, 5, 6, 7, 8, 9, 10, 11, 12, 13, 14, 15, 16, 17, 18, 19, 20, 21, 22, 23, 24, 25, 26, 27, 28, 29, 30, 31, 32, 33, 34, 35, 36, 37, 38, 39, 40, 41, 42, 43, 44, 45, 46, 47, 48, 49, 50, 60, 70, 80, 90, 100, 110 or any integer value therebetween or more normal tissue-derived serum glycoprotein sets.

[0066] Note that, since multiple glycoproteins may contain the same glycosite, the level of multiple proteins containing a given glycosite can be quantified using a single detection reagent that binds to the given glycosite. Thus, as would be understood by the skilled artisan, the present invention also contemplates measuring the level of one or more glycoproteins by direct detection of a glycosite. As would be appreciated by the skilled artisan, detection reagents that bind to glycosites can be generated using any of a variety of methods known in the art and described herein. For example, glycosites can be detected and quantified as described in Example 1 or using antibodies as would be understood by the skilled artisan using methods known in the art and described herein.

[0067] The term “test compound” refers in general to a compound to which a test cell is exposed, about which one desires to collect data. Typical test compounds will be small organic molecules, typically prospective pharmaceutical lead compounds, but can include proteins (e.g., antibodies), peptides, polynucleotides, heterologous genes (in expression systems), plasmids, polynucleotide analogs, peptide analogs, lipids, carbohydrates, viruses, phage, parasites, and the like.

[0068] The term “biological activity” as used herein refers to the ability of a test compound to alter the expression of one or more genes or proteins.

[0069] The term “test cell” refers to a biological system or a model of a biological system capable of reacting to the presence of a test compound, typically a eukaryotic cell or tissue sample, or a prokaryotic organism.

[0070] The term “gene expression profile” refers to a representation of the expression level of a plurality of genes in response to a selected expression condition (for example, incubation in the presence of a standard compound or test compound). Gene expression profiles can be expressed in terms of an absolute quantity of mRNA transcribed for each gene, as a ratio of mRNA transcribed in a test cell as compared with a control cell, and the like or the mere presence or absence of a protein an RNA transcript or more generally gene expression. As used herein, a “standard” gene expression profile refers to a profile already present in the primary database (for example, a profile obtained by incubation of a test cell with a standard compound, such as a drug of known activity), while a “test” gene expression profile refers to a profile generated under the conditions being investigated. The term “modulated” refers to an alteration in the expression level (induction or repression) to a measurable or detectable degree, as compared to a pre-established standard (for example, the expression level of a selected tissue or cell type at a selected phase under selected conditions).

[0071] “Similar”, as used herein, refers to a degree of difference between two quantities that is within a preselected threshold. The similarity of two profiles can be defined in a number of different ways, for example in terms of the number of identical genes affected, the degree to which each gene is affected, and the like. Several different measures of similarity, or methods of scoring similarity, can be made available to the user: for example, one measure of similarity considers each gene that is induced (or repressed) past a threshold level, and increases the score for each gene in which both profiles indicate induction (or repression) of that gene.

[0072] As used herein, the term “target specific” is intended to mean an agent that binds to a target analyte selectively. This agent will bind with preferential affinity toward the target while showing little to no detectable cross-reactivity toward other molecules. For example, when the target is a nucleic acid, a target specific sequence is one that is complementary to the sequence of the target and able to hybridize to the target sequence with little to no detectable cross-reactivity with other nucleic acid molecules. A nucleic acid target could also be bound in a target specific manner by a protein, for example by the DNA binding domain of a transcription factor. If the target is a protein or peptide it can be bound specifically by a nucleic acid aptamer, or another protein or peptide, or by an antibody or antibody fragment which are sub-classes of proteins.

[0073] As used herein, the term “genedigit” is intended to mean a region of pre-determined nucleotide or amino acid sequence that serves as an attachment point for a label. The genedigit can have any structure including, for example, a single unique sequence or a sequence containing repeated core elements. Each genedigit has a unique sequence which differentiates it from other genedigits. An “anti-genedigit” is a nucleotide or amino acid sequence or structure that binds specifically to the gene digit. For example, if the genedigit is a nucleic acid, the anti-genedigit can be a nucleic acid sequence that is complementary to the genedigit sequence. If the genedigit is a nucleic acid that contains repeated core elements then the anti-genedigit can be a series of repeat sequences that are complementary to the repeat sequences in the genedigit. An anti-genedigit can contain the same number, or a lesser number, of repeat sequences compared to the genedigit as long as the anti-genedigit is able to specifically bind to the genedigit.

[0074] As used herein, the term “specifier” is intended to mean the linkage of one or more genedigits to a target specific sequence. The genedigits can be directly linked or can be attached using an intervening or adapting sequence. A specifier can contain a target specific sequence which will allow it to bind to a target analyate. An “anti-specifier” has a complementary sequence to all or part of the specifier such that it specifically binds to the specifier.

[0075] As used herein, the term “label” is intended to mean a molecule or molecules that render an analyte detectable by an analytical method. Appropriate labels depends on the particular assay format and are well known by those skilled in the art. For example, a label specific for a nucleic acid molecule can be a complementary nucleic acid molecule attached to a label monomer or measurable moiety, such as a radioisotope, fluorochrome, dye, enzyme, nanoparticle, chemiluminescent marker, biotin, or other moiety known in the art that is measurable by analytical methods. In addition, a label can include any combination of label monomers.

[0076] As used herein, “unique” when used in reference to a label is intended to mean a label that has a detectable signal that distinguishes it from other labels in the same mixture. Therefore, a unique label is a relative term since it is dependent upon the other labels that are present in the mixture and the sensitivity of the detection equipment that is used. In the case of a fluorescent label, a unique label is a label that has spectral properties that significantly differentiate it from other fluorescent labels in the same mixture. For example, a fluorescein label can be a unique label if it is included in a mixture that contains a rhodamine label since these fluorescent labels emit light at distinct, essentially non-overlapping wavelengths. However, if another fluorescent label was added to the mixture that emitted light at the same or very similar wavelength to fluorescein, for example the Oregon Green fluorophore, then the fluorescein would no longer be a unique label since Oregon Green and fluorescein could not be distinguished from each other. A unique label is also relative to the sensitivity of the detection equipment used. For example, a FACS machine can be used to detect the emission peaks from different fluorophore-containing labels. If a particular set of labels have emission peaks that are separated by, for example, 2 nm these labels would not be unique if detected on a FACS machine that can distinguish peaks that are separated by 10 nm or greater, but these labels would be unique if detected on a FACS machine that can distinguish peaks separated by 1 nm or greater.

[0077] As used herein, the term “signal” is intended to mean a detectable, physical quantity or impulse by which information on the presence of an analyte can be determined. Therefore, a signal is the read-out or measurable component of detection. A signal includes, for example, fluorescence, luminescence, calorimetric, density, image, sound, voltage, current, magnetic field and mass. Therefore, the term “unit signal” as used herein is intended to mean a specified quantity of a signal in terms of which the magnitudes of other quantities of signals of the same kind can be stated. Detection equipment can count signals of the same type and display the amount of signal in terms of a common unit. For example, a nucleic acid can be radioactively labeled at one nucleotide position and another nucleic acid can be radioactively labeled at three nucleotide positions. The radioactive particles emitted by each nucleic acid can be detected and quantified, for example in a scintillation counter, and displayed as the number of counts per minute (cpm). The nucleic acid labeled at three positions will emit about three times the number of radioactive particles as the nucleic acid labeled at one position and hence about three times the number of cpms will be recorded.

[0078] The term “polynucleotide” refers to a polymeric form of nucleotides of any length, including deoxyribonucleotides or ribonucleotides, which can comprise analogs thereof.

[0079] As used herein, “purified” refers to a specific protein, polypeptide, or peptide composition that has been subjected to fractionation to remove various other proteins, polypeptides, or peptides, and which composition substantially retains its activity, as may be assessed, for example, by any of a variety of protein assays known to the skilled artisan for the specific or desired protein, polypeptide or peptide.

[0080] The terms “polypeptide”, “peptide” and “protein” are used interchangeably herein to refer to polymers of amino acids of any length. The terms also encompass an amino acid polymer that has been modified; for example, by disulfide bond formation, glycosylation, lipidation, or conjugation with a labeling component.

Methods for Identifying Tissue- and Plasma-Derived Proteins

[0081] The present invention provides methods for identifying tissue-derived proteins in blood. Any tissue of a mammalian body is contemplated herein. Illustrative tissues include, but are not limited to tissues from heart, kidney, ureter, bladder, urethra, liver, prostate, heart, blood vessels, bone marrow, skeletal muscle, smooth muscle, brain (amygdala, caudatenucleus, cerebellum, corpus callosum, fetal, hypothalamus, thalamus), spinal cord, peripheral nerves, retina, nose, trachea, lungs, mouth, salivary gland, esophagus, stomach, small intestines, large intestines, hypothalamus, pituitary, thyroid, pancreas, adrenal glands, ovaries, oviducts, uterus, placenta, vagina, mammary glands, testes, seminal vesicles, penis, lymph nodes, PBMC, thymus, and spleen, and any cells that make up such tissues. In certain embodiments, in each of these tissues, glycoproteins are obtained for the cell types in which a disease of interest arises. For example, in the prostate there are two dominant types of cells—epithelial cells and stromal cells. About 98% of prostate cancers arise in epithelial cells. As such, in certain embodiments, tissue-derived means the glycoproteins derived from in particular cell types of the tissue of interest (e.g., prostate epithelial cells). In this regard, any cell type that makes up any of the tissues described herein is contemplated herein. Illustrative cell types include, but are not limited to, epithelial cells, stromal cells, endothelial cells, endodermal cells, ectodermal cells, mesodermal cells, lymphocytes (e.g., B cells and T cells including CD4+ T helper 1 or T helper 2 type cells, CD8+ cytotoxic T cells), erythrocytes, keratinocytes, and fibroblasts. Particular cell types within tissues may be obtained by histological dissection, by the use of specific cell lines (e.g., prostate epithelial cell lines), by cell sorting or by a variety of other techniques known in the art.

[0082] In one embodiment, glycoproteins are isolated from any of a variety of tissue samples or plasma using methods as described in US Patent Application No. 20040023306. In particular, the methods of the invention can be used to purify glycosylated proteins or peptides and identify and quantify the glycosylation sites (“glycosites”). Because the methods of the invention are directed to isolating glycopolypeptides, the methods also reduce the complexity of analysis since many proteins and fragments of glycoproteins do not contain carbohydrate. This can simplify the analysis of complex biological samples such as serum. The methods of the invention are advantageous for the determination of protein glycosylation in glycome studies and can be used to isolate and identify glycoproteins from cell membrane or body fluids to determine specific glycoprotein changes related to certain disease states or cancer. The methods of the invention can be used for detecting quantitative changes in protein samples containing glycoproteins and to detect their extent of glycosylation. The methods of the invention are applicable for the identification and/or characterization of diagnostic biomarkers, immunotherapy, or other diagnositic or therapeutic applications. The methods of the invention can also be used to evaluate the effectiveness of drugs during drug development, optimal dosing, toxicology, drug targeting, and related therapeutic applications.

[0083] In one embodiment, the cis-diol groups of carbohydrates in glycoproteins can be oxidized by periodate oxidation to give a di-aldehyde, which is reactive to a hydrazide gel with an agarose (or other suitable solid matrix) support to form covalent hydrazone bonds. The immobilized glycoproteins are subjected to protease digestion followed by extensive washing to remove the non-glycosylated peptides. The immobilized glycopeptides are released from beads by chemicals or glycosidases. The isolated peptides are analyzed by mass spectrometry (MS), and the glycopeptide sequence and corresponding proteins are identified by MS/MS combined with a database search. The glycopeptides can also be isotopically labeled, for example, at the amino or carboxyl termini to allow the quantities of glycopeptides from different biological samples to be compared.

[0084] The methods of the invention are based on selectively isolating glycosylated peptides, or peptides that were glycosylated in the original protein sample, from a complex sample. The sample consists of peptide fragments of proteins generated, for example, by enzymatic digestion or chemical cleavage. A stable isotope tag is introduced into the isolated peptide fragments to facilitate mass spectrometric analysis and accurate quantification of the peptide fragments.

[0085] The invention provides a method for identifying and quantifying glycopolypeptides in a sample. The method can include the steps of derivatizing glycopolypeptides in a polypeptide sample, for example, by oxidation; immobilizing the derivatized glycopolypeptides to a solid support; cleaving the immobilized glycopolypeptides, thereby releasing non-glycosylated peptide fragments and retaining immobilized glycopeptide fragments; optionally labeling the immobilized glycopeptide fragments with an isotope tag; releasing the glycopeptide fragments from the solid support, thereby generating released glycopeptide fragments; analyzing the released glycopeptide fragments or their de-glycosylated counterparts using mass spectrometry; and quantifying the amount of the identified glycopeptide fragment. The released glycopolypeptides can be released with the carbohydrate still attached (the glycosylated form) or with the carbohydrate removed (the de-glycosylated form).

[0086] A sample containing glycopolypeptides is chemically modified so that carbohydrates of the glycopolypeptides in the sample can be selectively bound to a solid support. For example, the glycopolypeptides can be bound covalently to a solid support by chemically modifying the carbohydrate so that the carbohydrate can covalently bind to a reactive group on a solid support. In certain embodiments, the carbohydrates of the sample glycopolypeptides are oxidized. The carbohydrate can be oxidized, for example, to aldehydes. The oxidized moiety, such as an aldehyde moiety, of the glycopolypeptides can react with a solid support containing hydrazide or amine moieties, allowing covalent attachment of glycosylated polypeptides to a solid support via hydrazine chemistry. The sample glycopolypeptides are immobilized through the chemically modified carbohydrate, for example, the aldehyde, allowing the removal of non-glycosylated sample proteins by washing of the solid support. If desired, the immobilized glycopolypeptides can be denatured and/or reduced. The immobilized glycopolypeptides are cleaved into fragments using either protease or chemical cleavage. Cleavage results in the release of peptide fragments that do not contain carbohydrate and are therefore not immobilized. These released non-glycosylated peptide fragments optionally can be further characterized, if desired.

[0087] Glycopeptides can be glycosylated peptides of any length. In this regard, the glycopeptides can be anywhere from 1-100, 200, 300, 400, 500, 1000 amino acids in length or longer. In certain embodiments, the glycopeptides are 5, 6, 7, 8, 9, 10, 11, 12, 13, 14, 15, 16, 17, 18, 19, 20, 21, 22, 23, 24, 25, 26, 27, 28, 29, 30, 31, 32, 33, 34, 35, 36, 37, 38, 39, 40, 41, 42, 43, 44, 45, 46, 47, 48, 49, 50, 55, 60, 65, 70, 75, 80, or more amino acids long. They can be the molecules isolated from the natural source or generated by processing, e.g protoeolysis of such polypeptides. Thus, glycocapture can be on intact proteins or on peptides.

[0088] Following cleavage, glycosylated peptide fragments (glycopeptide fragments) remain bound to the solid support. To facilitate quantitative mass spectrometry (MS) analysis, immobilized glycopeptide fragments can be isotopically labeled. If it is desired to characterize most or all of the immobilized glycopeptide fragments, the isotope tagging reagent contains an amino or carboxyl reactive group so that the N-terminus or C-terminus of the glycopeptide fragments can be labeled. The immobilized glycopeptide fragments can be cleaved from the solid support chemically or enzymatically, for example, using glycosidases such as N-glycanase (N-glycosidase). There is no O-glycanase that is equivalent to N-glycanase. As would be understood by the skilled artisan, any of a variety of chemical reaction can be used to cleave O-linked peptides e.g beta elimination or a series of enzyme reactions.

[0089] The released glycopeptide fragments or their deglycosylated forms can be analyzed, for example, using MS.

[0090] As disclosed herein, a glycopolypeptide or glycopeptide can be processed such that the carbohydrate is removed from the parent glycopolypeptide. It is understood that such an originally glycosylated polypeptide is still referred to herein as a glycopolypeptide or glycopeptide even if the carbohydrate is removed enzymatically and/or chemically. Thus, a glycopolypeptide or glycopeptide can refer to a glycosylated or de-glycosylated form of a polypeptide. A glycopolypeptide or glycopeptide from which the carbohydrate is removed is referred to as the de-glycosylated form of a polypeptide whereas a glycopolypeptide or glycopeptide which retains its carbohydrate is referred to as the glycosylated form of a polypeptide.

[0091] As used herein, the term “sample” is intended to mean any biological fluid, cell, tissue, organ or portion thereof, that includes one or more different molecules such as nucleic acids, polypeptides, or small molecules. A sample can be a tissue section obtained by biopsy, or cells that are placed in or adapted to tissue culture. A sample can also be a biological fluid specimen such as blood, serum or plasma, cerebrospinal fluid, urine, saliva, seminal plasma, pancreatic fluid, breast milk, lung lavage, and the like. A sample can additionally be a cell extract from any species, including prokaryotic and eukaryotic cells as well as viruses. A tissue or biological fluid specimen can be further fractionated, if desired, to a fraction containing particular cell types.

[0092] As used herein, a “polypeptide sample” refers to a sample containing two or more different polypeptides. A polypeptide sample can include tens, hundreds, or even thousands or more different polypeptides. A polypeptide sample can also include non-protein molecules so long as the sample contains polypeptides. A polypeptide sample can be a whole cell or tissue extract or can be a biological fluid. Furthermore, a polypeptide sample can be fractionated using well known methods, as disclosed herein, into partially or substantially purified protein fractions.

[0093] The use of biological fluids such as a body fluid as a sample source is particularly useful in methods of the invention. Biological fluid specimens are generally readily accessible and available in relatively large quantities for clinical analysis. Biological fluids can be used to analyze diagnostic and prognostic markers for various diseases. In addition to ready accessibility, body fluid specimens do not require any prior knowledge of the specific organ or the specific site in an organ that might be affected by disease. Because body fluids, in particular blood, are in contact with numerous body organs, body fluids “pick up” molecular signatures indicating pathology due to secretion or cell lysis associated with a pathological condition. Body fluids also pick up molecular signatures that are suitable for evaluating drug dosage, drug targets and/or toxic effects, as disclosed herein.

[0094] The methods of the invention utilize the selective isolation of glycopolypeptides coupled with chemical modification to facilitate MS analysis. Proteins are glycosylated by complex enzymatic mechanisms, typically at the side chains of serine or threonine residues (O-linked) or the side chains of asparagine residues (N-linked). N-linked glycosylation sites generally fall into a sequence motif that can be described as N—X—S/T, where X can be any amino acid except proline. Glycosylation plays an important function in many biological processes (reviewed in Helenius and Aebi, Science 291:2364-2369 (2001); Rudd et al., Science 291:2370-2375 (2001)).

[0095] Protein glycosylation has long been recognized as a very common post-translational modification. As discussed above, carbohydrates are linked to serine or threonine residues (O-linked glycosylation) or to asparagine residues (N-linked glycosylation) (Varki et al. Essentials of Glycobiology Cold Spring Harbor Laboratory (1999)). Protein glycosylation, and in particular N-linked glycosylation, is prevalent in proteins destined for extracellular environments (Roth, Chem. Rev. 102:285-303 (2002)). These include proteins on the extracellular side of the plasma membrane, secreted proteins, and proteins contained in body fluids, for example, blood serum, cerebrospinal fluid, urine, breast milk, saliva, lung lavage fluid, pancreatic fluid, and the like. These also happen to be the proteins in the human body that are most easily accessible for diagnostic and therapeutic purposes.

[0096] Disclosed herein is a method for quantitative glycoprotein profiling. In one embodiment, the method is based on the conjugation of glycoproteins to a solid support using hydrazide chemistry, stable isotope labeling of glycopeptides, and the specific release of formerly N-linked glycosylated peptides via Peptide-N-Glycosidase F (PNGase F). The recovered peptides are then identified and quantified by tandem mass spectrometry (MS/MS). The method was applied to the analysis of cell surface and serum proteins, as disclosed herein.

[0097] To selectively isolate glycopolypeptides, the methods utilize chemistry and/or binding interactions that are specific for carbohydrate moieties. Selective binding of glycopolypeptides refers to the preferential binding of glycopolypeptides over non-glycosylated peptides. The methods of the invention can utilize covalent coupling of glycopolypeptides, which is particularly useful for increasing the selective isolation of glycopolypeptides by allowing stringent washing to remove non-specifically bound, non-glycosylated polypeptides.

[0098] The carbohydrate moieties of a glycopolypeptide are chemically or enzymatically modified to generate a reactive group that can be selectively bound to a solid support having a corresponding reactive group. In the embodiment, the carbohydrates of glycopolypeptides are oxidized to aldehydes. The oxidation can be performed, for example, with sodium periodate. The hydroxyl groups of a carbohydrate can also be derivatized by epoxides or oxiranes, alkyl halogen, carbonyldiimidazoles, N,N′-disuccinimidyl carbonates, N-hydroxycuccinimidyl chloroformates, and the like. The hydroxyl groups of a carbohydrate can also be oxidized by enzymes to create reactive groups such as aldehyde groups. For example, galactose oxidase oxidizes terminal galactose or N-acetyl-D-galactose residues to form C-6 aldehyde groups. These derivatized groups can be conjugated to amine- or hydrazide-containing moieties.

[0099] The oxidation of hydroxyl groups to aldehyde using sodium periodate is specific for the carbohydrate of a glycopeptide. Sodium periodate can oxidize hydroxyl groups on adjacent carbon atoms, forming an aldehyde for coupling with amine- or hydrazide-containing molecules. Sodium periodate also reacts with hydroxylamine derivatives, compounds containing a primary amine and a secondary hydroxyl group on adjacent carbon atoms. This reaction is used to create reactive aldehydes on N-terminal serine residues of peptides. A serine residue is rare at the N-terminus of a protein. The oxidation to an aldehyde using sodium periodate is therefore specific for the carbohydrate groups of a glycopolypeptide.

[0100] Once the carbohydrate of a glycopolypeptide is modified, for example, by oxidition to aldehydes, the modified carbohydrates can bind to a solid support containing hydrazide or amine moieties, such as a hydrazide resin. Oxidation chemistry and coupling to hydrazide can be used, however, it is understood that any suitable chemical modifications and/or binding interactions that allows specific binding of the carbohydrate moieties of a glycopolypeptide can be used in methods of the invention. The binding interactions of the glycopolypeptides with the solid support are generally covalent, although non-covalent interactions can also be used so long as the glycopolypeptides or glycopeptide fragments remain bound during the digestion, washing and other steps of the methods.

[0101] The methods of the invention can also be used to select and characterize subgroups of carbohydrates. Chemical modifications or enzymatic modifications using, for example, glycosidases can be used to isolate subgroups of carbohydrates. For example, the concentration of sodium periodate can be modulated so that oxidation occurs on sialic acid groups of glycoproteins. In particular, a concentration of about 1 mM of sodium periodate at 0.degree. C. can be used to essentially exclusively modify sialic acid groups.

[0102] Glycopolypeptides containing specific monosaccharides can be targeted using a selective sugar oxidase to generate aldehyde functions, such as the galactose oxidase described above or other sugar oxidases. Furthermore, glycopolypeptides containing a subgroup of carbohydrates can be selected after the glycopolypeptides are bound to a solid support. For example, glycopeptides bound to a solid support can be selectively released using different glycosidases having specificity for particular monosaccharide structures.

[0103] The glycopolypeptides are isolated by binding to a solid support. The solid support can be, for example, a bead, resin, membrane or disk, or any solid support material suitable for methods of the invention. An advantage of using a solid support to bind the glycopolypeptides is that it allows extensive washing to remove non-glycosylated polypeptides. Thus, in the case of complex samples containing a multitude of polypeptides, the analysis can be simplified by isolating glycopolypeptides and removing the non-glycosylated polypeptides, thus reducing the number of polypeptides to be analyzed.

[0104] The glycopolypeptides can also be conjugated to an affinity tag through an amine group, such as biotin hydrazide. The affinity tagged glycopeptides can then be immobilized to the solid support, for example, an avidin or streptavidin solid support, and the non-glycosylated peptides are removed. The glycopeptides immobilized on the solid support can be cleaved by a protease, and the non-glycosylated peptide fragments can be removed by washing. The tagged glycopeptides can be released from the solid support by enzymatic or chemical cleavage. Alternatively, the tagged glycopeptides can be released from the solid support with the oligosaccharide and affinity tag attached.

[0105] Another advantage of binding the glycopolypeptides to the solid support is that it allows further manipulation of the sample molecules without the need for additional purification steps that can result in loss of sample molecules. For example, the methods of the invention can involve the steps of cleaving the bound glycopolypeptides as well as adding an isotope tag, or other desired modifications of the bound glycopolypeptides. Because the glycopolypeptides are bound, these steps can be carried out on solid phase while allowing excess reagents to be removed as well as extensive washing prior to subsequent manipulations.

[0106] The bound glycopolypeptides can be cleaved into peptide fragments to facilitate MS analysis. Thus, a polypeptide molecule can be enzymatically cleaved with one or more proteases into peptide fragments. Exemplary proteases useful for cleaving polypeptides include trypsin, chymotrypsin, pepsin, papain, Staphylococcus aureus (V8) protease, Submaxillaris protease, bromelain, thermolysin, and the like. In certain applications, proteases having cleavage specificities that cleave at fewer sites, such as sequence-specific proteases having specificity for a sequence rather than a single amino acid, can also be used, if desired. Polypeptides can also be cleaved chemically, for example, using CNBr, acid or other chemical reagents. A particularly useful cleavage reagent is the protease trypsin. One skilled in the art can readily determine appropriate conditions for cleavage to achieve a desired efficiency of peptide cleavage.

[0107] Cleavage of the bound glycopolypeptides is particularly useful for MS analysis in that one or a few peptides are generally sufficient to identify a parent polypeptide. However, it is understood that cleavage of the bound glycopolypeptides is not required, in particular where the bound glycopolypeptide is relatively small and contains a single glycosylation site. Furthermore, the cleavage reaction can be carried out after binding of glycopolypeptides to the solid support, allowing characterization of non-glycosylated peptide fragments derived from the bound glycopolypeptide. Alternatively, the cleavage reaction can be carried out prior to addition of the glycopeptides to the solid support. One skilled in the art can readily determine the desirability of cleaving the sample polypeptides and an appropriate point to perform the cleavage reaction, as needed for a particular application of the methods of the invention.

[0108] Thus, in certain embodiments, glycopeptides are identified as described in Example 14. In this regard, solid phase capture of glycosylated peptides can be achieved either from intact glycoproteins or glycopeptides. In certain embodiments, glycopeptide capture may be preferred since there is no steric hinderance preventing binding of multiple glycosylation sites as can be observed with intact glycoproteins. Another advantage to glycopeptide capture is that hydrophobic membrane proteins generally are not very soluble during glycoprotein capture. However, glycopeptides derived from the same membrane proteins will more likely exhibit favorable solubility thereby enabling enhanced capture.

[0109] If desired, the bound glycopolypeptides can be denatured and optionally reduced. Denaturing and/or reducing the bound glycopolypeptides can be useful prior to cleavage of the glycopolypeptides, in particular protease cleavage, because this allows access to protease cleavage sites that can be masked in the native form of the glycopolypeptides. The bound glycopeptides can be denatured with detergents and/or chaotropic agents. Reducing agents such as .beta.-mercaptoethanol, dithiothreitol, tris-carboxyethylphosphine (TCEP), and the like, can also be used, if desired. As discussed above, the binding of the glycopolypeptides to a solid support allows the denaturation step to be carried out followed by extensive washing to remove denaturants that could inhibit the enzymatic or chemical cleavage reactions. The use of denaturants and/or reducing agents can also be used to dissociate protein complexes in which non-glycosylated proteins form complexes with bound glycopolypeptides. Thus, the use of these agents can be used to increase the specificity for glycopolypeptides by washing away non-glycosylated polypeptides from the solid support.

[0110] Treatment of the bound glycopolypeptides with a cleavage reagent results in the generation of peptide fragments. Because the carbohydrate moiety is bound to the solid support, those peptide fragments that contain the glycosylated residue remain bound to the solid support. Following cleavage of the bound glycopolypeptides, glycopeptide fragments remain bound to the solid support via binding of the carbohydrate moiety. Peptide fragments that are not glycosylated are released from the solid support. If desired, the released non-glycosylated peptides can be analyzed, as described in more detail below.

[0111] The methods of the invention can be used to identify and/or quantify the amount of a glycopolypeptide present in a sample. A particularly useful method for identifying and quantifying a glycopolypeptide is mass spectrometry (MS). The methods of the invention can be used to identify a glycopolypeptide qualitatively, for example, using MS analysis. If desired, an isotope tag can be added to the bound glycopeptide fragments, in particular to facilitate quantitative analysis by MS.

[0112] As used herein an “isotope tag” refers to a chemical moiety having suitable chemical properties for incorporation of an isotope, allowing the generation of chemically identical reagents of different mass which can be used to differentially tag a polypeptide in two samples. The isotope tag also has an appropriate composition to allow incorporation of a stable isotope at one or more atoms. A particularly useful stable isotope pair is hydrogen and deuterium, which can be readily distinguished using mass spectrometry as light and heavy forms, respectively. Any of a number of isotopic atoms can be incorporated into the isotope tag so long as the heavy and light forms can be distinguished using mass spectrometry, for example, .sup.13C, .sup.15N, .sup.17O, .sup.18O or .sup.34S. Exemplary isotope tags include the 4,7,10-trioxa-1,13-tridecanediamine based linker and its related deuterated form, 2,2′,3,3′,11,11′,12,12′-octadeutero-4,7,10-trioxa-1,13-t-ridecanediamine, described by Gygi et al. (Nature Biotechnol. 17:994-999 (1999). Other exemplary isotope tags have also been described previously (see WO 00/11208).

[0113] In contrast to these previously described isotope tags related to an ICAT-type reagent, it is not required that an affinity tag be included in the reagent since the glycopolypeptides are already isolated. One skilled in the art can readily determine any of a number of appropriate isotope tags useful in methods of the invention. An isotope tag can be an alkyl, akenyl, alkynyl, alkoxy, aryl, and the like, and can be optionally substituted, for example, with O, S, N, and the like, and can contain an amine, carboxyl, sulfhydryl, and the like (see WO 00/11208). Exemplary isotope tags include succinic anhydride, isatoic-anhydride, N-methyl-isatoic-anhydride, glyceraldehyde, Boc-Phe-OH, benzaldehyde, salicylaldehyde, and the like. In addition to Phe and other amino acids similarly can be used as isotope tags. Furthermore, small organic aldehydes can be used as isotope tags. These and other derivatives can be made in the same manner as that disclosed herein using methods well known to those skilled in the art. One skilled in the art will readily recognize that a number of suitable chemical groups can be used as an isotope tag so long as the isotope tag can be differentially isotopically labeled.

[0114] The bound glycopeptide fragments are tagged with an isotope tag to facilitate MS analysis. In order to tag the glycopeptide fragments, the isotope tag contains a reactive group that can react with a chemical group on the peptide portion of the glycopeptide fragments. A reactive group is reactive with and therefore can be covalently coupled to a molecule in a sample such as a polypeptide. Reactive groups are well known to those skilled in the art (see, for example, Hermanson, Bioconjugate Techniques, pp. 3-166, Academic Press, San Diego (1996); Glazer et al., Laboratory Techniques in Biochemistry and Molecular Biology: Chemical Modification of Proteins, Chapter 3, pp. 68-120, Elsevier Biomedical Press, New York (1975); Pierce Catalog (1994), Pierce, Rockford Ill.). Any of a variety of reactive groups can be incorporated into an isotope tag for use in methods of the invention so long as the reactive group can be covalently coupled to the immobilized polypeptide.

[0115] To analyze a large number or essentially all of the bound glycopolypeptides, it is desirable to use an isotope tag having a reactive group that will react with the majority of the glycopeptide fragments. For example, a reactive group that reacts with an amino group can react with the free amino group at the N-terminus of the bound glycopeptide fragments. If a cleavage reagent is chosen that leaves a free amino group of the cleaved peptides, such an amino group reactive agent can label a large fraction of the peptide fragments. Only those with a blocked N-terminus would not be labeled. Similarly, a cleavage reagent that leaves a free carboxyl group on the cleaved peptides can be modified with a carboxyl reactive group, resulting in the labeling of many if not all of the peptides. Thus, the inclusion of amino or carboxyl reactive groups in an isotope tag is particularly useful for methods of the invention in which most if not all of the bound glycopeptide fragments are desired to be analyzed.

[0116] In addition, a polypeptide can be tagged with an isotope tag via a sulfhydryl reactive group, which can react with free sulfhydryls of cysteine or reduced cystines in a polypeptide. An exemplary sulfhydryl reactive group includes an iodoacetamido group (see Gygi et al., supra, 1999). Other examplary sulfhydryl reactive groups include maleimides, alkyl and aryl halides, haloacetyls, .alpha.-haloacyls, pyridyl disulfides, aziridines, acrylolyls, arylating agents and thiomethylsulfones.

[0117] A reactive group can also react with amines such as the .alpha.-amino group of a peptide or the .epsilon.-amino group of the side chain of Lys, for example, imidoesters, N-hydroxysuccinimidyl esters (NHS), isothiocyanates, isocyanates, acyl azides, sulfonyl chlorides, aldehydes, ketones, glyoxals, epoxides (oxiranes), carbonates, arylating agents, carbodiimides, anhydrides, and the like. A reactive group can also react with carboxyl groups found in Asp or Glu or the C-terminus of a peptide, for example, diazoalkanes, diazoacetyls, carbonyldiimidazole, carbodiimides, and the like. A reactive group that reacts with a hydroxyl group includes, for example, epoxides, oxiranes, carbonyldiimidazoles, N,N′-disuccinimidyl carbonates, N-hydroxycuccinimidyl chloroformates, and the like. A reactive group can also react with amino acids such as histidine, for example, .alpha.-haloacids and amides; tyrosine, for example, nitration and iodination; arginine, for example, butanedione, phenylglyoxal, and nitromalondialdehyde; methionine, for example, iodoacetic acid and iodoacetamide; and tryptophan, for example, 2-(2-nitrophenylsulfenyl)-3-methyl-3-bromoindolenine (BNPS-skatole), N-bromosuccinimide, formylation, and sulfenylation (Glazer et al., supra, 1975). In addition, a reactive group can also react with a phosphate group for selective labeling of phosphopeptides (Zhou et al., Nat. Biotechnol., 19:375-378 (2001)) or with other covalently modified peptides, including lipopeptides, or any of the known covalent polypeptide modifications. One skilled in the art can readily determine conditions for modifying sample molecules by using various reagents, incubation conditions and time of incubation to obtain conditions suitable for modification of a molecule with an isotope tag. The use of covalent-chemistry based isolation methods is particularly useful due to the highly specific nature of the binding of the glycopolypeptides.

[0118] The reactive groups described above can form a covalent bond with the target sample molecule. However, it is understood that an isotope tag can contain a reactive group that can non-covalently interact with a sample molecule so long as the interaction has high specificity and affinity.

[0119] Prior to further analysis, it is generally desirable to release the bound glycopeptide fragments. The glycopeptide fragments can be released by cleaving the fragments from the solid support, either enzymatically or chemically. For example, glycosidases such as N-glycosidases can be used to cleave an N-linked carbohydrate moiety and a variety of chemical or other enzymatic reactions can be used to cleave O-linked carbohydrate moieties, and release the corresponding de-glycosylated peptide(s). If desired, N-glycosidases and enzymes or chemicals appropriate for cleavage of O-linked carbohydrate moieties can be added together or sequentially, in either order. The sequential addition of an N-glycosidase and other enzymes for O-linked carbohydrate cleavage allows differential characterization of those released peptides that were N-linked versus those that were O-linked, providing additional information on the nature of the carbohydrate moiety and the modified amino acid residue. Thus, N-linked and O-linked glycosylation sites can be analyzed sequentially and separately on the same sample, increasing the information content of the experiment and simplifying the complexity of the samples being analyzed.

[0120] In addition to N-glycosidases, other glycosidases can be used to release a bound glycopolypeptide. For example, exoglycosidases can be used. Exoglycosidases are anomeric, residue and linkage specific for terminal monnosaccharides and can be used to release peptides having the corresponding carbohydrate.

[0121] In addition to enzymatic cleavage, chemical cleavage can also be used to cleave a carbohydrate moiety to release a bound peptide. For example, O-linked oligosaccharides can be released specifically from a polypeptide via a .beta.-elimination reaction catalyzed by alkali. The reaction can be carried out in about 50 mM NaOH containing about 1 M NaBH.sub.4 at about 55.degree. C. for about 12 hours. The time, temperature and concentration of the reagents can be varied so long as a sufficient .beta.-elimination reaction is carried out for the needs of the experiment.

[0122] In one embodiment, N-linked oligosaccharides can be released from glycopolypeptides, for example, by hydrazinolysis. Glycopolypeptides can be dried in a desiccator over P.sub.2O.sub.5 and NaOH. Anhydrous hydrazine is added and heated at about 100.degree. C. for 10 hours, for example, using a dry heat block.

[0123] In addition to using enzymatic or chemical cleavage to release a bound glycopeptide, the solid support can be designed so that bound molecules can be released, regardless of the nature of the bound carbohydrate. The reactive group on the solid support, to which the glycopolypeptide binds, can be linked to the solid support with a cleavable linker. For example, the solid support reactive group can be covalently bound to the solid support via a cleavable linker such as a photocleavable linker. Exemplary photocleavable linkers include, for example, linkers containing o-nitrobenzyl, desyl, trans-o-cinnamoyl, m-nitrophenyl, benzylsulfonyl groups (see, for example, Dorman and Prestwich, Trends Biotech. 18:64-77 (2000); Greene and Wuts, Protective Groups in Organic Synthesis, 2nd ed., John Wiley & Sons, New York (1991); U.S. Pat. Nos. 5,143,854; 5,986,076; 5,917,016; 5,489,678; 5,405,783). Similarly, the reactive group can be linked to the solid support via a chemically cleavable linker. Release of glycopeptide fragments with the intact carbohydrate is particularly useful if the carbohydrate moiety is to be characterized using well known methods, including mass spectrometry. The use of glycosidases to release de-glycosylated peptide fragments also provides information on the nature of the carbohydrate moiety.

[0124] Thus, the invention provides methods for identifying a glycopolypeptide and, furthermore, identifying its glycosylation site (“glycosite”). The methods of the invention are applied, as disclosed herein, and the parent glycopolypeptide is identified. The glycosylation site itself can also be identified and consensus motifs determined, as well as the carbohydrate moiety, as disclosed herein. The invention further provides glycopolypeptides, glycopeptides and glycosylation sites identified by the methods of the invention.

[0125] Glycopolypeptides from a sample are bound to a solid support via the carbohydrate moiety. The bound glycopolypeptides are generally cleaved, for example, using a,protease, to generate glycopeptide fragments. As discussed above, a variety of methods can be used to release the bound glycopeptide fragments, thereby generating released glycopeptide fragments. As used herein, a “released glycopeptide fragment” refers to a peptide which was bound to a solid support via a covalently bound carbohydrate moiety and subsequently released from the solid support, regardless of whether the released peptide retains the carbohydrate. In some cases, the method by which the bound glycopeptide fragments are released results in cleavage and removal of the carbohydrate moiety, for example, using glycosidases or chemical cleavage of the carbohydrate moiety. If the solid support is designed so that the reactive group, for example, hydrazide, is attached to the solid support via a cleavable linker, the released glycopeptide fragment retains the carbohydrate moiety. It is understood that, regardless whether a carbohydrate moiety is retained or removed from the released peptide, such peptides are referred to as released glycopeptide fragments.

[0126] After isolating glycopolypeptides from a sample and cleaving the glycopolypeptide into fragments, the glycopeptide fragments released from the solid support and the released glycopeptide fragments are identified and/or quantified. A particularly useful method for analysis of the released glycopeptide fragments is mass spectrometry. A variety of mass spectrometry systems can be employed in the methods of the invention for identifying and/or quantifying a sample molecule such as a released glycopolypeptide fragment. Mass analyzers with high mass accuracy, high sensitivity and high resolution include, but are not limited to, ion trap, triple quadrupole, and time-of-flight, quadrupole time-of-flight mass spectrometers and Fourier transform ion cyclotron mass analyzers (FT-ICR-MS). Mass spectrometers are typically equipped with matrix-assisted laser desorption (MALDI) and electrospray ionization (ESI) ion sources, although other methods of peptide ionization can also be used. In ion trap MS, analytes are ionized by ESI or MALDI and then put into an ion trap. Trapped ions can then be separately analyzed by MS upon selective release from the ion trap. Fragments can also be generated in the ion trap and analyzed. Sample molecules such as released glycopeptide fragments can be analyzed, for example, by single stage mass spectrometry with a MALDI-TOF or ESI-TOF system. Methods of mass spectrometry analysis are well known to those skilled in the art (see, for example, Yates, J. Mass Spect. 33:1-19 (1998); Kinter and Sherman, Protein Sequencing and Identification Using Tandem Mass Spectrometry, John Wiley & Sons, New York (2000); Aebersold and Goodlett, Chem. Rev. 101:269-295 (2001)).

[0127] For high resolution polypeptide fragment separation, liquid chromatography ESI-MS/MS or automated LC-MS/MS, which utilizes capillary reverse phase chromatography as the separation method, can be used (Yates et al., Methods Mol. Biol. 112:553-569 (1999)). Data dependent collision-induced dissociation (CID) with dynamic exclusion can also be used as the mass spectrometric method (Goodlett, et al., Anal. Chem. 72:1112-1118 (2000)).

[0128] Once a peptide is analyzed by MS/MS, the resulting CID spectrum can be compared to databases for the determination of the identity of the isolated glycopeptide. Methods for protein identification using single peptides have been described previously (Aebersold and Goodlett, Chem. Rev. 101:269-295 (2001); Yates, J. Mass Spec. 33:1-19 (1998)). In particular, it is possible that one or a few peptide fragments can be used to identify a parent polypeptide from which the fragments were derived if the peptides provide a unique signature for the parent polypeptide. Thus, identification of a single glycopeptide, alone or in combination with knowledge of the site of glycosylation, can be used to identify a parent glycopolypeptide from which the glycopeptide fragments were derived. Further information can be obtained by analyzing the nature of the attached tag and the presence of the consensus sequence motif for carbohydrate attachment. For example, if peptides are modified with an N-terminal tag, each released glycopeptide has the specific N-terminal tag, which can be recognized in the fragment ion series of the CID spectra. Furthermore, the presence of a known sequence motif that is found, for example, in N-linked carbohydrate-containing peptides, that is, the consensus sequence NXS/T, can be used as a constraint in database searching of N-glycosylated peptides.

[0129] In addition, the identity of the parent glycopolypeptide can be determined by analysis of various characteristics associated with the peptide, for example, its resolution on various chromatographic media or using various fractionation methods. These empirically determined characteristics can be compared to a database of characteristics that uniquely identify a parent polypeptide, which defines a peptide tag.

[0130] The use of a peptide tag and related database is used for identifying a polypeptide from a population of polypeptides by determining characteristics associated with a polypeptide, or a peptide fragment thereof, comparing the determined characteristics to a polypeptide identification index, and identifying one or more polypeptides in the polypeptide identification index having the same characteristics (see WO 02/052259). The methods are based on generating a polypeptide identification index, which is a database of characteristics associated with a polypeptide. The polypeptide identification index can be used for comparison of characteristics determined to be associated with a polypeptide from a sample for identification of the polypeptide. Furthermore, the methods can be applied not only to identify a polypeptide but also to quantify the amount of specific proteins in the sample.

[0131] The methods for identifying a polypeptide are applicable to performing quantitative proteome analysis, or comparisons between polypeptide populations that involve both the identification and quantification of sample polypeptides. Such a quantitative analysis can be conveniently performed in two separate stages, if desired. As a first step, a reference polypeptide index is generated representative of the samples to be tested, for example, from a species, cell type or tissue type under investigation, such as a glycopolypeptide sample, as disclosed herein. The second step is the comparison of characteristics associated with an unknown polypeptide with the reference polypeptide index or indices previously generated.

[0132] A reference polypeptide index is a database of polypeptide identification codes representing the polypeptides of a particular sample, such as a cell, subcellular fraction, tissue, organ or organism. A polypeptide identification index can be generated that is representative of any number of polypeptides in a sample, including essentially all of the polypeptides potentially expressed in a sample. In methods of the invention directed to identifying glycopolypeptides, the polypeptide identification index is determined for a desired sample such as a serum sample. Once a polypeptide identification index has been generated, the index can be used repeatedly to identify one or more polypeptides in a sample, for example, a sample from an individual potentially having a disease. Thus, a set of characteristics can be determined for glycopeptides that can be correlated with a parent glycopolypeptide, including the amino acid sequence of the glycopeptide, and stored as an index, which can be referenced in a subsequent experiment on a sample treated in substantially the same manner as when the index was generated.

[0133] The incorporation of an isotope tag can be used to facilitate quantification of the sample glycopolypeptides. As disclosed previously, the incorporation of an isotope tag provides a method for quantifying the amount of a particular molecule in a sample (Gygi et al., supra, 1999; WO 00/11208). In using an isotope tag, differential isotopes can be incorporated, which can be used to compare a known amount of a standard labeled molecule having a differentially labeled isotope tag from that of a sample molecule. Thus, a standard peptide having a differential isotope can be added at a known concentration and analyzed in the same MS analysis or similar conditions in a parallel MS analysis. A specific, calibrated standard can be added with known absolute amounts to determine an absolute quantity of the glycopolypeptide in the sample. In addition, the standards can be added so that relative quantitation is performed.

[0134] Alternatively, parallel glycosylated sample molecules can be labeled with a different isotopic label and compared side-by-side (see Gygi et al., supra, 1999). This is particularly useful for qualitative analysis or quantitative analysis relative to a control sample. For example, a glycosylated sample derived from a disease state can be compared to a glycosylated sample from a non-disease state by differentially labeling the two samples, as described previously (Gygi et al., supra, 1999). Such an approach allows detection of differential states of glycosylation, which is facilitated by the use of differential isotope tags for the two samples, and can thus be used to correlate differences in glycosylation as a diagnostic marker for a disease

[0135] As described above, non-glycosylated peptide fragments are released from the solid support after proteolytic or chemical cleavage. The released peptide fragments are then characterized to provide further information on the nature of the glycopolypeptides isolated from the sample. An illustrative method is the use of the isotope-coded affinity tag (ICAT.™.) method (Gygi et al., Nature Biotechnol. 17:994-999 (1999). The ICAT.™. type reagent method uses an affinity tag that can be differentially labeled with an isotope that is readily distinguished using mass spectrometry. The ICAT.™. type affinity reagent consists of three elements, an affinity tag, a linker and a reactive group.

[0136] As would be recognized by the skilled artisan, the ICAT.™ reagent is specific for cystine residues. Accordingly, amino-specific reagents are also contemplated for use in the present invention where appropriate. A wide range of reaction principles is available for the derivatization of amino groups. An illustrative method used in proteomics is the acetylation by d0- or d3-acetic acid, thus leading to a light (hydrogenated) or a heavy (deuterated) derivative. The activation of the acetyl group can be achieved, for example, by standard N-hydroxysuccinimide (NHS) chemistry, which leads to high yields of derivatization under smooth conditions. In dependence of the number n of amino groups present in the peptides, mass differences of Δm=3n are introduced by this method. A special case of quantification is realized in the so called iTRAQ- (isobaric tag for relative and absolute quantification) method (Ross, P. L., et al. Mol Cell Proteomics 3 (2004) 1154-69).

[0137] In another embodiment, isolated peptides are analyzed to generate three-dimensional (retention time, m/z, and intensity) patterns from LC-MS analysis or an identified peptide patterns from LC-MS/MS analysis and SEQUEST search (11).

[0138] The ICAT.™. method or other similar methods can be applied to the analysis of the non-glycosylated peptide fragments released from the solid support. Alternatively, the ICAT.™. method or other similar methods can be applied prior to cleavage of the bound glycopolypeptides, that is, while the intact glycopolypeptide is still bound to the solid support.

[0139] In certain embodiments, the method involves the steps of automated tandem mass spectrometry and sequence database searching for peptide/protein identification; stable isotope tagging for quantification by mass spectrometry based on stable isotope dilution theory; and the use of specific chemical reactions for the selective isolation of specific peptides. For example, the previously described ICAT.™. reagent contained a sulfhydryl reactive group, and therefore an ICAT.™.-type reagent can be used to label cysteine-containing peptide fragments released from the solid support. Other reactive groups, as described above, can also be used.

[0140] The analysis of the non-glycosylated peptides, in conjunction with the methods of analyzing glycosylated peptides, provides additional information on the state of polypeptide expression in the sample. By analyzing both the glycopeptide fragments as well as the non-glycosylated peptides, changes in glycoprotein abundance as well as changes in the state of glycosylation at a particular glycosylation site can be readily determined.

[0141] If desired, the sample can be fractionated by a number of known fractionation techniques. Fractionation techniques can be applied at any of a number of suitable points in the methods of the invention. For example, a sample can be fractionated prior to oxidation and/or binding of glycopolypeptides to a solid support. Thus, if desired, a substantially purified fraction of glycopolypeptide(s) can be used for immobilization of sample glycopolypeptides. Furthermore, fractionation/purification steps can be applied to non-glycosylated peptides or glycopeptides after release from the solid support. One skilled in the art can readily determine appropriate steps for fractionating sample molecules based on the needs of the particular application of methods of the invention.

[0142] Methods for fractionating sample molecules are well known to those skilled in the art. Fractionation methods include but are not limited to subcellular fractionation or chromatographic techniques such as ion exchange, including strong and weak anion and cation exchange resins, hydrophobic and reverse phase, size exclusion, affinity, hydrophobic charge-induction chromatography, dye-binding, and the like (Ausubel et al., Current Protocols in Molecular Biology (Supplement 56), John Wiley & Sons, New York (2001); Scopes, Protein Purification: Principles and Practice, third edition, Springer-Verlag, New York (1993)). Other fractionation methods include, for example, centrifugation, electrophoresis, the use of salts, and the like (see Scopes, supra, 1993). In the case of analyzing membrane glycoproteins, well known solubilization conditions can be applied to extract membrane bound proteins, for example, the use of denaturing and/or non-denaturing detergents (Scopes, supra, 1993).

[0143] Affinity chromatography can also be used including, for example, dye-binding resins such as Cibacron blue, substrate analogs, including analogs of cofactors such as ATP, NAD, and the like, ligands, specific antibodies useful for immuno-affinity isolation, either polyclonal or monoclonal, and the like. A subset of glycopolypeptides can be isolated using lectin-affinity chromatography, if desired. An exemplary affinity resin includes affinity resins that bind to specific moieties that can be incorporated into a polypeptide such as an avidin resin that binds to a biotin tag on a sample molecule labeled with an ICAT.™.-type reagent. The resolution and capacity of particular chromatographic media are known in the art and can be determined by those skilled in the art. The usefulness of a particular chromatographic separation for a particular application can similarly be assessed by those skilled in the art.

[0144] Those of skill in the art will be able to determine the appropriate chromatography conditions for a particular sample size or composition and will know how to obtain reproducible results for chromatographic separations under defined buffer, column dimension, and flow rate conditions. The fractionation methods can optionally include the use of an internal standard for assessing the reproducibility of a particular chromatographic application or other fractionation method. Appropriate internal standards will vary depending on the chromatographic medium or the fractionation method used. Those skilled in the art will be able to determine an internal standard applicable to a method of fractionation such as chromatography. Furthermore, electrophoresis, including gel electrophoresis or capillary electrophoresis, can also be used to fractionate sample molecules.

Tissue-Derived Serum Glycoprotein/Glycosite Sets and Fingerprints

[0145] According to the present invention, tissue-derived proteins identified as described herein are compared to plasma-derived proteins identified as described herein to determine overlap between the two (see Example 1). Thus, from the peptides identified from plasma, tissues, or cells, a set of shared peptides and proteins between tissues/cells and plasma are identified (FIG. 2). Illustrative glycoproteins and glycosites of the invention are set forth in Table 1 and SEQ ID NOs:1-11,375; illustrative polynucleotides encoding these glycoproteins are set forth in Table 1 and SEQ ID NOs:11,376-14,917. As outlined in FIG. 1, in one embodiment, the process entails the following: 1) Sample preparation. Cell surface and secreted proteins from tissues/cells and plasma are processed by solid-phase extraction of glylcopeptides (SPEG) as described herein, as well as US Patent Application No 20040023306 and in Zhang, et al., Nature Biotechnology 2003 21:660. Peptides that contain N-linked carbohydrates in the native protein are generally isolated in their de-glycosylated form (8). As would be recognized by the skilled artisan, other similar methods known in the art may be used to isolate glycopeptides from tissue/plasma samples. 2) Pattern generation. Isolated peptides are analyzed to generate three-dimensional (retention time, m/z, and intensity) patterns from LC-MS analysis or an identified peptide patterns from LC-MS/MS analysis and SEQUEST search (11). Other known methods to determine the identity of the isolated peptides may also be used. 3) Pattern analysis. Peptide patterns obtained from different samples are compared and the common peptides from both tissues/cells and plasma are determined (12). 4) Peptide identification. For peptide patterns generated by LC-MS, the common peptides and the proteins from which they originated are identified by tandem mass spectrometry and sequence database searching (FIG. 1).

[0146] The levels of tissue-derived plasma glycoproteins taken together represent fingerprints in the blood that reflect the operation of normal tissues. While there may be overlap in the tissue expression of certain proteins found in the blood (see e.g., FIG. 4, CD107b, present in the blood and found in prostate and breast), each tissue has a specific normal tissue-derived serum glycoprotein fingerprint (see FIG. 4). When disease attacks a tissue, that blood fingerprint changes, for example, in the levels of these proteins found in the blood and the change in the fingerprint correlates with the specific disease. The changes in the fingerprints occur as a consequence of virtually any disease or tissue perturbation with each disease fingerprint being unique. The changes in the fingerprints are sufficiently informative to carry out disease stratification, follow the progression of the particular disease stratification or type and follow responses to therapy. Measuring the level of glycoproteins that make up a particular tissue-derived serum glycoprotein set in different settings allows one to stratify patients with regard to their ability to respond to particular therapies and even to visualize adverse effects of drugs. The disease-associated fingerprints are determined by comparing the blood from normal individuals against that from patients with specific diseases at known stages. Not only will the absolute levels of the proteins constituting individual fingerprints be determined, but all the protein changes (e.g. N changed proteins) will be compared against one another to generate an N-dimensional shape space that will correlate even more powerfully with the disease stratifications and progression states described above (see e.g., U.S. Patent Application No. 20020095259).

[0147] Thus, the present invention is generally directed to methods for identifying tissue-derived glycoproteins present in the blood. The present invention is also directed to methods for defining tissue-derived glycoprotein blood fingerprints and further provides defined examples of tissue-derived glycoprotein blood fingerprints. Additionally, the present invention is directed to panels of reagents or proteomic techniques employing mass spectrometry and other techniques known in the art that detect tissue-derived glycoproteins in the blood for use in diagnostics and other settings.

[0148] Thus, the present invention enables the skilled artisan to 1) identify blood glycoproteins which collectively constitute unique molecular blood fingerprints for healthy and diseased individuals; 2) identify unique fingerprints for each different disease; 3) identify fingerprints that can uniquely distinguish the different types of a particular disease (e.g., for prostate cancer, the ability to distinguish between benign disease, slowly growing disease and rapidly metastatic disease); 4 )identify fingerprints that can reveal the stage of progression of each type of disease, and 5) fingerprints that will allow one to assess the response to therapy. The methods for determining the tissue-derived blood fingerprints described herein allow disease detection at very early stages, since even in the earliest disease stages, the cellular networks which control the expression patterns of these blood molecular signatures will be perturbed. Hence the present invention allows detection of virtually any type of disease and detection of each disease at a very early stage.

[0149] Normal serum glycoproteins including normal tissue-derived serum glycoproteins are generally identified from a sample of blood collected from a subject using accepted techniques. In one embodiment, blood samples are collected in evacuated serum separator tubes. In another embodiment, blood may be collected in blood collection tubes that contain any anti-coagulant. Illustrative anticoagulants include ethylenediaminetetraacetic acid (EDTA) and lithium heparin. However, any method of blood sample or other bodily fluid or biological/tissue sample collection and storage is contemplated herein. In particular blood may be collected by any portal including the finger, foot, intravenous lines, and portable catheter lines. In one embodiment, blood is centrifuged and the serum layer that separates from the red cells is collected for analysis. In another embodiment, whole blood or plasma is used for analysis.

[0150] In certain embodiments a normal blood sample is obtained from human serum recovered from whole blood donations from an FDA-approved clinical source. In this embodiment, the normal, healthy donor hematocrit is between the range of 38% and 55%, the donor weight is over 110 pounds, the donor age is between 18 and 65 years old, the donor blood pressure is in the range of 90-180 mmHg (systolic) and 50-100 mmHg (diastolic), the arms and general appearance of the donor are free of needle marks and any mark signifying risky behavior. The donor pulse should be between 50 bpm-100 bpm, the temperature of the donor should be between 97 and 99.5 degrees. The donor does not have diseases including, but not limited to chest pain, heart disease or lung disease including tuberculosis, cancer, skin disease, any blood disease, or bleeding problems, yellow jaundice, liver disease, hepatitis or a positive test for hepatitis. The donor has not had close contact with hepatitis in the past 12 months nor has the donor ever received pituitary growth hormones.

[0151] In certain embodiments, disease free blood is as follows: the donor has not made a donation of blood within the previous 8 weeks, the donor has not had a fever with headache within one week from the date of donation, the donor has not donated a double unit of red cells using an aphaeresis machine within the previous 16 weeks, the donor is not ill with Severe Acute Respiratory Syndrome (SARS), nor has the donor had close contact with someone with SARS, nor has the donor visited (SARS) affected areas. The donor has had no sexual contact with anyone who has HIV/AIDS or has had a positive test for the HIV/AIDS virus, and does not have syphilis or gonorrhea. From 1977 to present, the donor never received money, drugs, or other payment for sex, male donors have never had sexual contact with another male, donors have not had a positive test for the HIV/AIDS virus, donors have not used needles to take drugs, steroids, or anything not prescribed by a physician, donors have not used clotting factor concentrates, donors have not had sexual contact with anyone who was born in or lived in Africa, or traveled to Africa.

[0152] Thus, in further embodiments, the present invention provides the normal serum level of components that make up a normal tissue-derived serum glycoprotein set. This level is an average of the levels of a given component measured in a statistically large number of blood samples from normal, healthy individuals. Thus, a “predetermined normal level” is a statistical range of normal and is also referred to herein as “predetermined normal range”. The normal levels or range of levels in the blood for each component are determined by measuring the level of protein in the blood using any of a variety of techiques known in the art and described herein in a sufficient number of blood samples from normal, healthy individuals to determine the standard deviation (SD) with statistically meaningful accuracy.

[0153] As would be recognized by the skilled artisan upon reading the present disclosure, in determining the normal serum level of a particular component of a tissue-derived serum glycoprotein set, general biological data is considered and compared, including, for example, gender, time of day of blood sampling, fasting or after food intake, age, race, environment and/or polymorphisms. Biological data may also include data concerning the height, growth rate, cardiovascular status, reproductive status (pre-pubertal, pubertal, post-pubertal, pre-menopausal, menopausal, post-menopausal, fertile, infertile), body fat percentage, and body fat distribution. This list of individual differences that can be measured is exemplary and additional biological data is contemplated.

[0154] Thus, the levels of the components that make up a normal tissue-derived serum glycoprotein set are determined. Normal tissue-derived serum glycoprotein fingerprints comprise a data set comprising determined levels in blood from normal, healthy individuals of one, two, three, four, five, six, seven, eight, nine, ten, or more components of a normal tissue-derived serum glycoprotein set. The normal levels in the blood for each component included in a fingerprint are determined by measuring the level of protein in the blood using any of a variety of techniques known in the art and described herein, in a sufficient number of blood samples from normal, healthy individuals to determine the standard deviation (SD) with statistically meaningful accuracy. Thus, as would be recognized by one of skill in the art, a determined normal level is defined by averaging the level of protein measured in a statistically large number of blood samples from normal, healthy individuals and thereby defining a statistical range of normal. A normal tissue-derived serum glycoprotein fingerprint comprises the determined levels in normal, healthy blood of N members of a normal tissue-derived serum glycoprotein set wherein N is 1, 2, 3, 4, 5, 6, 7, 8, 9, 10, 11, 12, 13, 14, 15, 16, 17, 18, 19, 20, 21, 22, 23, 24, 25, 26, 27, 28, 29, 30, or more members up to the total number of members in a given normal tissue-derived serum glycoprotein set. In certain embodiments, a normal tissue-derived serum glycoprotein fingerprint comprises the determined levels in normal, healthy blood of at least two components of a normal tissue-derived serum glycoprotein set. In other embodiments, a normal tissue-derived serum glycoprotein fingerprint comprises the determined levels in normal, healthy blood of at least 3, 4, 5, 6, 7, 8, 9, 10, 11, 12, 13, 14, 15, 16, 17, 18, 19, or 20 components of a normal tissue-derived serum glycoprotein set. In yet further embodiments, a normal control would be run at the time of the assay such that only the presence of a normal sample and the test sample would be necessary and the specific differences between the test sample and the normal sample would then be delineated based upon the panels provided herein.

[0155] Each normal tissue controls the expression of a variety of glycoproteins, some of which are expressed at major levels at other tissues in the body and some of which are specifically expressed in the tissue of interest (where specific means that the tissue of interest expresses far more of the glycoprotein than other tissues). Some of the tissue-derived glycoproteins are detected in the blood. Hence a tissue-derived blood fingerprint is comprised of the determined level in the blood of one or more of these tissue-derived glycoproteins. Analysis of levels of these proteins in the blood provides tissue-derived glycoprotein blood fingerprints that are indicative of biological states, including a healthy state or disease states. Thus, there are glycoprotein fingerprints in the blood that reflect the operation of normal tissues and each tissue has a specific glycoprotein fingerprint. These tissue-derived glycoprotein blood fingerprints are perturbed when disease, or other agents such as drugs, affects the tissue. Different diseases will alter the tissue-derived glycoprotein blood fingerprints in different ways. Thus, a unique perturbed glycoprotein blood fingerprint is associated with each type of distinct disease (disease-associated tissue-derived blood fingerprint). In effect, each distinct disease, or stage of a disease, creates its own tissue-derived glycoprotein blood fingerprint for each tissue that it affects. As would be readily appreciated by the skilled artisan, each disease or stage of a disease can affect multiple tissues. For example, in kidney cancer, a primary perturbation in the kidney-derived glycoprotein blood fingerprint would occur. However, a secondary or indirect effect may also be observed in the bladder-derived glycoprotein blood fingerprint. As another example, in liver cancer, perturbation of a liver-derived glycoprotein blood fingerprint as a primary indicator of disease would occur. However, secondary or indirect effects at other sites, for example in a lymphocyte-derived glycoprotein blood fingerprint, would also be observed. As described elsewhere herein, each disease type and stage results in a unique, identifiable blood fingerprint for each tissue that it affects, for primary and secondary tissues affected. Thus, multiple tissue-derived serum glycoprotein sets or components thereof can be measured and used in combination to determine a particular biological state and the blood fingerprints may include the measured level of one or more components derived from the primary tissue affected and/or for a secondary or indirect tissue that is affected by a particular disease.

[0156] Most common diseases such as prostate cancer actually represent multiple distinct diseases that initially appear similar (e.g., benign and very slowly growing prostate cancer, slowly invasive prostate cancer and rapidly metastatic prostate cancer represent three different types of prostate cancer—the process of dividing individual prostate cancers into one of these three types is called stratification). The glycoprotein blood fingerprints will be distinct for each of these disease types, thus allowing for the stratification of similar diseases and rapid intervention where necessary. The glycoprotein blood fingerprints will also be perturbed in unique ways as each type of disease progresses—hence the glycoprotein blood fingerprints will also permit the progression of disease to be followed. The glycoprotein blood fingerprints also change with therapy, and hence will permit the effectiveness of therapy to be followed, thereby allowing a physician to alter treatment accordingly. Further, the glycoprotein blood fingerprints change with exposure to a variety of environmental factors, such as drugs, and can be used to assess toxic or off target damage by the drug and it will even permit following the subsequent recovery from such adverse drug exposure.

[0157] Thus, a tissue-derived glycoprotein blood fingerprint for a given setting (e.g., a healthy state or a particular disease) is defined by the levels in the blood of the glycoprotein components of a tissue-derived glycoprotein set. As such, a tissue-derived glycoprotein blood fingerprint for a given tissue at any given time and in any given disease setting is determined by measuring the levels of each of a plurality of tissue-derived glycoproteins in the blood. It is the combination of the different levels in the blood of the tissue-derived glycoproteins that make up the tissue-derived glycoprotein set that reveals a unique pattern that defines the fingerprint. Equally important, each of the levels of the proteins can be compared against one another to create an N-dimensional measure of the fingerprint space, a very powerful correlate to health and disease (see e.g., U.S. Patent Application No 20020095259).

[0158] As such, a tissue-derived glycoprotein blood fingerprint may comprise the determined level in the blood of anywhere from about 2 to more than about 100, 200 or more tissue-derived glycoproteins derived from a particular tissue or tissues of interest. In one embodiment, the tissue-derived glycoprotein blood fingerprint comprises the quantitatively measured level in the blood of at least 3, 4, 5, 6, 7, 8, 9, or 10 tissue-derived glycoproteins derived from a particular tissue of interest. In another embodiment, the tissue-derived glycoprotein blood fingerprint comprises the determined level in the blood of at least 11, 12, 13, 14, 15, 16, 17, 18, 19, 20, 21, 22, 23, 24, 25, 26, 28, 29, or 30 tissue-derived glycoproteins derived from a particular tissue of interest. In a further embodiment, the tissue-derived glycoprotein blood fingerprint comprises the determined level in the blood of at least, 31, 32, 33, 34, 35, 36, 37, 38, 39, or 40 tissue-derived glycoproteins derived from a particular tissue of interest. In yet a further embodiment, the tissue-derived glycoprotein blood fingerprint comprises the determined level in the blood of at least, 41, 42, 43, 44, 45, 46, 47, 48, 49, or 50 tissue-derived glycoproteins derived from a particular tissue of interest. In an additional embodiment, the tissue-derived glycoprotein blood fingerprint comprises the determined level in the blood of 51, 52, 53, 54, 55, 56, 57, 58, 59, or 60 tissue-derived glycoproteins derived from a particular tissue of interest. In another embodiment, the tissue-derived glycoprotein blood fingerprint comprises the determined level in the blood of 61, 62, 63, 64, 65, 66, 67, 68, 69, or 70 tissue-derived glycoproteins derived from a particular tissue of interest. In further embodiments, the tissue-derived glycoprotein blood fingerprint comprises the determined level in the blood of 75, 80, 85, 90, 100, or more tissue-derived glycoproteins derived from a particular tissue of interest.

[0159] In one embodiment, a prostate-derived glycoprotein blood fingerprint comprises the determined level in the blood of any one or more of the following glycoproteins: CD91, CD107a, CD143, PSMA-1, and tumor endothelial marker 7-related precursor (see Table 1 and FIG. 4). In a further embodiment, a prostate-derived glycoprotein blood fingerprint comprises the determined level in the blood of any one or more of the following glycoproteins: CD13, CD14, CD26, CD44, CD45, CD56, CD90, CD91, CD107a, CD107b, CD109, CD166, CD143, CD224, PSMA-1, Glutamate carboxypeptidase II, MAC-2 binding protein, metalloproteinase inhibitor 1, and tumor endothelial marker 7-related precursor (see Table 1 and FIG. 4).

[0160] In one embodiment, a lymphocyte-derived glycoprotein blood fingerprint comprises the determined level in the blood of any one or more of the following glycoproteins: CD2, CD21, CD49d, CD50, CD62L, CD102, CD124, and interferon-alpha/beta receptor beta chain. In a further embodiment, a lymphocyte-derived glycoprotein blood fingerprint comprises the determined level in the blood of any one or more of the following glycoproteins: CD2, CD13, CD21, CD44, CD45, CD49c, CD49d, CD50, CD54, CD56, CD62L, CD71, CD74, CD90, CD98, CD109, CD166, CD102, CD124, CD224, MAC-2 binding protein, and interferon-alpha/beta receptor beta chain.

[0161] In one embodiment, a bladder-derived glycoprotein blood fingerprint comprises the determined level in the blood of any one or more of the following glycoproteins: CD13, CD44, CD56, MAC2-binding protein, and metalloproteinase inhibitor 1.

[0162] In another embodiment, a breast-derived glycoprotein blood fingerprint comprises the determined level in the blood of any one or more of the following glycoproteins: CD71, CD98, CD107b, CD155, CD224, MAC-2 binding protein, receptor protein-tyrosine kinase erbB-2, and tumor-associated calcium signal transducer 2. In a further embodiment, a breast-derived glycoprotein blood fingerprint comprises the determined level in the blood of any one or more of the following glycoproteins: CD155, receptor protein-tyrosine kinase erbB-2, and tumor-associated calcium signal transducer 2.

[0163] In one embodiment, a liver-derived glycoprotein blood fingerprint comprises the determined level in the blood of any one or more of the following glycoproteins: CD13, CD14, CD44, CD54, CD56, CD90, CD166, MAC-2 binding protein, metalloproteinase inhibitor 1, and receptor protein-tyrosine kinase erbB-4.

[0164] It should be noted that in certain circumstances, a tissue-derived glycoprotein blood fingerprint can be defined (in part or entirely) merely by the presence or absence of one or a plurality of tissue-derived glycoproteins, and determining the exact level of each of a plurality of tissue-derived glycoproteins in the blood may not be necessary.

[0165] In a further embodiment, the disease-associated (e.g., perturbed) tissue-derived glycoprotein blood fingerprints for a particular tissue are determined by comparing the blood from normal individuals against that from patients with specific diseases at known stages. Thus, the disease-associated fingerprint is a data set comprising the determined level in a blood sample from an individual afflicted with a disease of one or more components of a normal tissue-derived serum glycoprotein set that demonstrates a statistically significant change as compared to the determined normal level (e.g., wherein the level in the disease sample is above or below a predetermined normal range). The data set is compiled from samples from individuals who are determined to have a particular disease using established medical diagnostics for the particular disease. The blood (serum) level of each protein member of a normal tissue-derived serum glycoprotein set as measured in the blood of the diseased sample is compared to the corresponding determined normal level. A statistically significant variation from the determined normal level for one or more members of the normal serum tissue-derived protein set provides diagnostically useful information (disease-associated fingerprint) for that disease. Note that it may be determined for a particular disease or disease state that the level of only a few members of the normal tissue-derived serum protein set change relative to the normal levels. Thus, a disease-associated tissue-derived blood fingerprint may comprise the determined levels in the blood of only a subset of the components of a normal tissue-derived serum glycoprotein set for a given tissue and a particular disease. Thus, a disease-associated tissue-derived blood fingerprint comprises the determined levels in blood (or as noted herein any bodily fluid or tissue sample, however in most embodiments samples from blood are compared with a normal from blood and so on) of N members of a tissue-derived serum glycoprotein set wherein N is 1, 2, 3, 4, 5, 6, 7, 8, 9, 10, 11, 12, 13, 14, 15, 16, 17, 18, 19, 20, 21, 22, 23, 24, 25, 26, 27, 28, 29, 30, 31, 32, 33, 34, 35, 36, 37, 38, 39, 40, 41, 42, 43, 44, 45, 46, 47, 48, 49, 50, 60, 70, 80, 90, 100, 110 or more or any integer value therebetween., or more members up to the total number of members in a given tissue-derived serum glycoprotein set tissue-derived serum glycoprotein set. In this regard, in certain embodiments, a disease-associated tissue-derived blood fingerprint comprises the determined levels of one or more components of a normal tissue-derived serum glycoprotein set. In one embodiment, a disease-associated tissue-derived blood fingerprint comprises the determined levels of at least two components of a normal tissue-derived serum glycoprotein set. In other embodiments, a disease-associated tissue-derived blood fingerprint comprises the determined levels of at least 1, 2, 3, 4, 5, 6, 7, 8, 9, 10, 11, 12, 13, 14, 15, 16, 17, 18, 19, 20, 21, 22, 23, 24, 25, 26, 27, 28, 29, 30, 31, 32, 33, 34, 35, 36, 37, 38, 39, 40, 41, 42, 43, 44, 45, 46, 47, 48, 49, 50, 60, 70, 80, 90, 100, 110 or more or any integer value therebetween components of a normal tissue-derived serum glycoprotein set.

[0166] The skilled artisan would readily appreciate that a variety of statistical tests can be used to determine if an altered level of a given protein is significant. The Z-test (Man, M. Z., et al., Bioinformatics, 16: 953-959, 2000) or other appropriate statistical tests can be used to calculate P values for comparison of protein expression levels.

[0167] Tissue-derived glycoprotein blood fingerprints can be determined using any of a variety of detection reagents such as described herein and known in the art in the context of a variety of methods for measuring protein levels known in the art and described herein. Any detection reagent that can specifically bind to or otherwise detect tissue-derived glycoproteins as described herein is contemplated as a suitable detection reagent. Illustrative detection reagents are described elsewhere herein and include, but are not limited to antibodies, or antigen-binding fragments thereof, yeast ScFv, DNA or RNA aptamers, isotope labeled peptides, microfluidic/nanotechnology measurement devices and the like.

[0168] Methods for measuring tissue-derived glycoprotein levels from blood/serum/plasma include, but are not limited to, immunoaffinity based assays such as ELISAs, Western blots, and radioimmunoassays, and mass spectrometry based methods (matrix-assisted laser desorption ionization (MALDI), MALDI-Time-of-Flight (TOF), Tandem MS (MS/MS), electrospray ionization (ESI), Surface Enhanced Laser Desorption Ionization (SELDI)-TOF MS, liquid chromatography (LC)-MS/MS, etc). Other methods useful in this context include isotope-coded affinity tag (ICAT) followed by multidimensional chromatography and MS/MS. The procedures described herein for analysis of blood tissue-derived glycoprotein fingerprints can be modified and adapted to make use of microfluidics and nanotechnology in order to miniaturize, parallelize, integrate and automate diagnostic procedures (see e.g., U.S. Patent Application Nos. 20040023306, 20050095649, and 20060141528; L. Hood, et al., Science 306:640-643; R. H. Carlson, et al., Phys. Rev. Lett. 79:2149 (1997); A. Y. Fu, et al., Anal. Chem. 74:2451 (2002); J. W. Hong, et al., Nature Biotechnol. 22:435 (2004); A. G. Hadd, et al., Anal. Chem. 69:3407 (1997); I. Karube, et al., Ann. N.Y. Acad. Sci. 750:101 (1995); L. C. Waters et al., Anal. Chem. 70:158 (1998); J. Fritz et al., Science 288, 316 (2000)).

[0169] It should be noted that when the term “blood” is used herein, any part of the blood is intended. Accordingly, for determining tissue-derived glycoprotein blood fingerprints, whole blood may be used directly where appropriate, or plasma or serum may be used.

[0170] As one of skill in the art could readily appreciate any number of methodologies can be employed to investigate the tissue-derived nucleic acid and polypeptide sequences set forth by the present invention. In addition to protein or nucleic acid array or microarray analysis, other nanoscale analysis may be employed. Such methodologies include, but are not limited to microfluidic platforms, nanowire sensors (Bunimovich et al., Electrocheically Programmed, Spatially Selective Biofunctionalization of Silicon Wires, Langmuir 20, 10630-10638, 2004; Curreli et al., J. Am. Chem. Soc. 127, 6922-6923, 2005). Further, the use of high-affinity protein-capture agents is contemplated. Such capture agents may include DNA aptamers (U.S. Patent Application Pub. No. 20030219801, as well as the use of click chemistry for target-guided synthesis (Lewis et al., Angewandte Chemie-International Edition, 41, 1053-, 2002; Manetsch et al., J. Am. Chem. Soc. 126, 12809-12818, 2004; Ramstrom et al., Nature Rev. Drug Discov. 1, 26-36, 2002).

[0171] The practice of the present invention may employ, unless otherwise indicated, conventional techniques and descriptions of organic chemistry, polymer technology, molecular biology (including recombinant techniques), cell biology, biochemistry, and immunology, which are within the skill of the art. Such conventional techniques include polymer array synthesis, hybridization, ligation, and detection of hybridization using a label. Specific illustrations of suitable techniques can be had by reference to the example herein below. However, other equivalent conventional procedures can, of course, also be used. Such conventional techniques and descriptions can be found in standard laboratory manuals such as Genome Analysis: A Laboratory Manual Series (Vols. I-IV), Using Antibodies: A Laboratory Manual, Cells: A Laboratory Manual, PCR Primer: A Laboratory Manual, and Molecular Cloning: A Laboratory Manual (all from Cold Spring Harbor Laboratory Press), Stryer, L. (1995) Biochemistry (4th Ed.) Freeman, New York, Gait, “Oligonucleotide Synthesis: A Practical Approach” 1984, IRL Press, London, Nelson and Cox (2000), Lehninger, Principles of Biochemistry ³rd Ed., W. H. Freeman Pub., New York, N.Y. and Berg et al. (2002) Biochemistry, 5th Ed., W. H. Freeman Pub., New York, N.Y., all of which are herein incorporated in their entirety by reference for all purposes.

[0172] As would be recognized by the skilled artisan, while the tissue- and/or serum-derived glycoproteins, the levels of which make up a given normal or disease-associated fingerprint, need not be isolated, in certain embodiments, it may be desirable to isolate such proteins (e.g., for antibody production or for developing other detection reagents as described herein). As such, the present invention provides for isolated tissue- and/or serum-derived glycoproteins or fragments or portions thereof and polynucleotides that encode such proteins. As used herein, the terms protein and polypeptide are used interchangeably. Also, the isolated glycoproteins may not remain glycoproteins when isolated as isolation may remove glycosylation. Illustrative (glyco)proteins include those provided in the amino acid sequences set forth in in the appended sequence listing. The terms polypeptide and protein encompass amino acid chains of any length, including full-length endogenous (i.e., native) proteins and variants of endogenous polypeptides described herein. Variants are polypeptides that differ in sequence from the polypeptides of the present invention only in substitutions, deletions and/or other modifications, such that either the variants disease-specific expression patterns are not significantly altered or the polypeptides remain useful for diagnostics/detection of glycoproteins and glycosites as described herein. For example, modifications to the polypeptides of the present invention may be made in the laboratory to facilitate expression and/or purification and/or to improve immunogenicity for the generation of appropriate antibodies and other detection agents. Modified variants (e.g., chemically modified) of the (glyco)proteins may be useful herein, (e.g., as standards in mass spectrometry analyses of the corresponding proteins in the blood, and the like). As such, in certain embodiments, the biological function of a variant protein is not relevant for utility in the methods for detection and/or diagnostics described herein. Polypeptide variants generally encompassed by the present invention will typically exhibit at least about 70%, 75%, 80%, 85%, 86%, 87%, 88%, 89%, 90%, 91%, 92%, 93%, 94%, 95%, 96%, 97%, 98%, or 99% or more identity along its length, to a polypeptide sequence set forth herein. Within a polypeptide variant, amino acid substitutions are usually made at no more than 50% of the amino acid residues in the native polypeptide, and in certain embodiments, at no more than 25% of the amino acid residues. In certain embodiments, such substitutions are conservative. A conservative substitution is one in which an amino acid is substituted for another amino acid that has similar properties, such that one skilled in the art of peptide chemistry would expect the secondary structure and hydropathic nature of the polypeptide to be substantially unchanged. In general, the following amino acids represent conservative changes: (1) ala, pro, gly, glu, asp, gin, asn, ser, thr; (2) cys, ser, tyr, thr; (3) val, ile, leu, met, ala, phe; (4) lys, arg, his; and (5) phe, tyr, trp, his. Thus, a variant may comprise only a portion of a native polypeptide sequence as provided herein. In addition, or alternatively, variants may contain additional amino acid sequences (such as, for example, linkers, tags and/or ligands), usually at the amino and/or carboxy termini. Such sequences may be used, for example, to facilitate purification, detection or cellular uptake of the polypeptide.

[0173] When comparing polypeptide sequences, two sequences are said to be identical if the sequence of amino acids in the two sequences is the same when aligned for maximum correspondence, as described below. Comparisons between two sequences are typically performed by comparing the sequences over a comparison window to identify and compare local regions of sequence similarity. A comparison window as used herein, refers to a segment of at least about 20 contiguous positions, usually 30 to about 75, 40 to about 50, in which a sequence may be compared to a reference sequence of the same number of contiguous positions after the two sequences are optimally aligned.

[0174] Optimal alignment of sequences for comparison may be conducted using the Megalign program in the Lasergene suite of bioinformatics software (DNASTAR, Inc., Madison, Wis.), using default parameters. This program embodies several alignment schemes described in the following references: Dayhoff, M. O. (1978) A model of evolutionary change in proteins Matrices for detecting distant relationships. In Dayhoff, M. O. (ed.) Atlas of Protein Sequence and Structure, National Biomedical Research Foundation, Washington D.C. Vol. 5, Suppl. 3, pp. 345-358; Hein J. (1990) Unified Approach to Alignment and Phylogenes pp. 626-645 Methods in Enzymology vol. 183, Academic Press, Inc., San Diego, Calif.; Higgins, D. G. and Sharp, P. M. (1989) CABIOS 5:151-153; Myers, E. W. and Muller W. (1988) CABIOS 4:11-17; Robinson, E. D. (1971) Comb. Theor 11:105; Saitou, N. Nei, M. (1987) Mol. Biol. Evol. 4:406-425; Sneath, P. H. A. and Sokal, R. R. (1973) Numerical Taxonomy the Principles and Practice of Numerical Taxonomy, Freeman Press, San Francisco, Calif.; Wilbur, W. J. and Lipman, D. J. (1983) Proc. Natl. Acad., Sci. USA 80:726-730.

[0175] Alternatively, optimal alignment of sequences for comparison may be conducted by the local identity algorithm of Smith and Waterman (1981) Add. APL. Math 2:482, by the identity alignment algorithm of Needleman and Wunsch (1970) J. Mol. Biol. 48:443, by the search for similarity methods of Pearson and Lipman (1988) Proc. Natl. Acad. Sci. USA 85: 2444, by computerized implementations of these algorithms (GAP, BESTFIT, BLAST, FASTA, and TFASTA in the Wisconsin Genetics Software Package, Genetics Computer Group (GCG), 575 Science Dr., Madison, Wis.), or by inspection.

[0176] Illustrative examples of algorithms that are suitable for determining percent sequence identity and sequence similarity include the BLAST and BLAST 2.0 algorithms, which are described in Altschul et al. (1977) Nucl. Acids Res. 25:3389-3402 and Altschul et al. (1990) J. Mol. Biol. 215:403-410, respectively. BLAST and BLAST 2.0 can be used, for example, to determine percent sequence identity for the polynucleotides and polypeptides of the invention. Software for performing BLAST analyses is publicly available through the National Center for Biotechnology Information.

[0177] An isolated polypeptide is one that is removed from its original environment. For example, a naturally occurring protein or polypeptide is isolated if it is separated from some or all of the coexisting materials in the natural system. In certain embodiments, such polypeptides are also purified, e.g., are at least about 90% pure by weight of protein in the preparation, in some embodiments, at least about 95% pure by weight of protein in the preparation and in further embodiments, at least about 99% pure by weight of protein in the preparation.

[0178] In one embodiment of the present invention, a polypeptide comprises a fusion protein comprising a glycopolypeptide or glycosite as described herein. The present invention further provides fusion proteins that comprise at least one polypeptide as described herein, as well as polynucleotides encoding such fusion proteins. The fusion proteins may comprise multiple polypeptides or portions/variants thereof, as described herein, and may further comprise one or more polypeptide segments for facilitating the expression, purification, detection, and/or activity of the polypeptide(s).

[0179] In certain embodiments, the proteins and/or polynucleotides, and/or fusion proteins are provided in the form of compositions, e.g., pharmaceutical compositions, vaccine compositions, compositions comprising a physiologically acceptable carrier or excipient. Such compositions may comprise buffers such as neutral buffered saline, phosphate buffered saline and the like; carbohydrates such as glucose, mannose, sucrose or dextrans, mannitol; proteins; polypeptides or amino acids such as glycine; antioxidants; chelating agents such as EDTA or glutathione; adjuvants (e.g., aluminum hydroxide); and preservatives.

[0180] In certain embodiments, wash buffer refers to a solution that may be used to wash and remove unbound material from an adsorbent surface. Wash buffers typically include salts that may or may not buffer pH within a specified range, detergents and optionally may include other ingredients useful in removing adventitiously associated material from a surface or complex.

[0181] In certain embodiments, elution buffer refers to a solution capable of dissociating a binding moiety and an associated analyte. In some circumstances, an elution buffer is capable of disrupting the interaction between subunits when the subunits are associated in a complex. As with wash buffers, elution buffers may include detergents, salt, organic solvents and may be used separately or as mixtures. Typically, these latter reagents are present at higher concentrations in an elution buffer than in a wash buffer making the elution buffer more disruptive to molecular interactions. This ability to disrupt molecular interactions is termed “stringency,” with elution buffers having greater stringency that wash buffers.

[0182] In general, tissue- and/or serum-derived glycopolypeptides and polynucleotides encoding such polypeptides as described herein, may be prepared using any of a variety of techniques that are well known in the art. For example, a polynucleotide encoding a protein may be prepared by amplification from a suitable cDNA or genomic library using, for example, polymerase chain reaction (PCR) or hybridization techniques. Libraries may generally be prepared and screened using methods well known to those of ordinary skill in the art, such as those described in Sambrook et al., Molecular Cloning: A Laboratory Manual, Cold Spring Harbor Laboratories, Cold Spring Harbor, N.Y., 1989. cDNA libraries may be prepared from any of a variety of organs, tissues, cells, as described herein. Other libraries that may be employed will be apparent to those of ordinary skill in the art upon reading the present disclosure. Primers for use in amplification may be readily designed based on the polynucleotide sequences encoding polypeptides as provided herein, for example, using programs such as the PRIMER3 program (see website: http colon double slash www dash genome dot wi dot mit dot edu slash cgi dash bin slash primer slash primer3 www dot cgi).

Diagnostic/Prognostic Panels

[0183] The normal tissue-derived serum glycoprotein and glycosite sets defined herein and the predetermined normal levels of the components that make up the tissue-derived serum glycoprotein or glycosite sets (e.g., the database of predetermined normal serum levels of tissue-derived glycoproteins or glycosites) can be used as a baseline against which one can determine any perturbation of the normal state. Perturbation of the normal biological state is identified by measuring levels of tissue-derived serum glycoproteins or glycosites from a patient and comparing the measured levels against the predetermined normal levels. Any level that is statistically significantly altered from the normal level (i.e., any level from the disease sample that is outside (either above or below) the predetermined normal range) indicates a perturbation of normal and thus, the presence of disease (or effect of a drug or environmental agent, etc.). In this way, the predetermined normal levels of normal tissue-derived serum glycoproteins or glycosites are also used to identify and define disease-associated tissue-derived blood fingerprints. The diagnostic/prognostic panels of the present invention typically comprise detection reagents for detecting proteins, glycosites, or nucleic acid molecules that are tissue-derived glycoproteins, but that may be found in a bodily fluid such as blood, urine, saliva, etc. or a tissue sample.

[0184] As used herein, a panel may detect less than the entire set of tissue-derived glycoprotein sequences, or the polynucleotides that encode these proteins, as defined in the tables herein (see e.g., Table 1) for a given tissue. For example, as can be readily appreciated by the skilled artisan, measuring the level of 1 transcript or protein of each tissue may be enough to generally monitor the health of a tissue. However, increasing the number of probes targeting the component (nucleic acid or polypeptide), while not necessary, will add specificity and sensitivity to the assay. Accordingly, in certain aspects at least 5 probes per tissue-derived serum glycoprotein set will be present in the panel, in other aspects at least 10 probes per tissue-derived serum glycoprotein set will be present, yet in others there may be 20, 30, 40, 50 or more probes present per tissue-derived serum glycoprotein set. In certain embodiments, probes per set may include 1, 2, 3, 4, 5, 6, 7, 8, 9, 10, 11, 12, 13, 14, 15, 16, 17, 18, 19, 20, 21, 22, 23, 24, 25, 26, 27, 28, 29, 30, 31, 32, 33, 34, 35, 36, 37, 38, 39, 40, 41, 42, 43, 44, 45, 46, 47, 48, 49, 50, 60, 70, 80, 90, 100, 110 or any integer value therebetween.

[0185] Thus, the present invention provides panels for detecting and measuring the level of tissue-derived glycoproteins and glycosites in serum that can be used in a variety of diagnostic settings. Illustrative glycoproteins and glycosites of the invention are set forth in Table 1 and SEQ ID NOs:1-11,375; illustrative polynucleotides encoding these glycoproteins are set forth in Table 1 and SEQ ID NOs:11,376-14,917. As used herein and discussed further below, “diagnostic panel or prognostic panel” is meant to encompass panels, arrays, mixtures, and kits that may comprise detection reagents or probes specific to a tissue-derived glycoprotein component or a control (control nucleic acid or polypeptide sequences may or may not be a component of a tissue-derived serum glycoprotein set) and any of a variety of associated buffers, solutions, appropriate negative and positive controls, instruction sets, and the like. In certain embodiments, a detection reagent may comprise antibodies (or antigen-binding fragments thereof) either with a secondary detection reagent attached thereto or without, nucleic acid probes, aptamers, click reagents, etc. Further, a “panel” may comprise panels, arrays, mixtures, kits, or other arrangements of proteins, antibodies or antigen-binding fragments thereof to tissue-derived serum glycoproteins, nucleic acid molecules encoding tissue-derived serum glycoproteins, nucleic acid probes that hybridize to nucleic acid sequences encoding tissue-derived serum glycoproteins. Moreover, a panel may be derived from only one tissue or two, three, four, five, six, seven, eight, or more tissues. Certain biological systems such as the cardiovascular system or the central nervous system, comprise numerous tissues. Thus, in certain embodiments, numerous such tissues may be grouped together in a single panel.

[0186] The present invention also provides panels for detecting the tissue-derived serum glycoproteins at any given time in a subject. The term “subject” is intended to include any mammal or indeed any vertebrate that may be used as a model system for human disease. Examples of subjects include humans, monkeys, apes, dogs, cats, mice, rats, zebra fish, and transgenic species thereof.

[0187] The panels are comprised of a plurality of detection reagents (e.g., at least two) that each specifically detects a tissue-derived serum glycoprotein, or a transcript encoding such a protein), wherein the levels of tissue-derived glycoproteins in blood derived from a particular tissue taken together form a unique pattern that defines the fingerprint. In certain embodiments, detection reagents can be bispecific such that the panel is comprised of a plurality of bispecific detection reagents that may specifically detect more than one tissue-derived blood glycoprotein. The term “specifically” is a term of art that would be readily understood by the skilled artisan to mean, in this context, that the protein or proteins of interest is/are detected by the particular detection reagent but other unrelated proteins are not significantly detected. Specificity can be determined using appropriate positive and negative controls and by routinely optimizing conditions. In certain embodiments, detection reagents specifically detect one or more members of a family of related proteins (or polynucleotides encoding such proteins) but do not significantly detect other unrelated control proteins or transcripts. Thus, as would be understood by the skilled artisan, detection reagents may specifically detect a single variant protein or transcript or may specifically detect a group of related proteins or transcripts encoding such proteins.

[0188] The diagnostic panels of the present invention comprise detection reagents wherein each detection reagent binds to one tissue-derived serum glycoprotein. As discussed elsewhere herein, in certain embodiments, the detection reagent may bind to one glycosite present in one or more tissue-derived serum glycoptroteins. As noted above, panels may also comprise controls that are not or may not be specific for a particular tissue-derived protein or transcript. In certain embodiments, the detection reagents of a panel can each bind to tissue-derived proteins from one tissue-derived serum glycoprotein set or from more than one tissue-derived serum glycoprotein set. For example, a particular diagnostic panel may comprise detection reagents that together detect one, two, three, four, five, six, seven, eight, nine, ten, eleven, twelve, thirteen, fourteen, fifteen, sixteen, seventeen, eighteen, nineteen, twenty, twenty-one, twenty-two, twenty-three, twenty-four, twenty-five, twenty-six, twenty-seven, twenty-eight, twenty-nine, thirty, thirty-one, thirty-two, thirty-three, thirty-four, thirty-five, thirty-six, thirty-seven, thirty-eight, thirty-nine, forty, forty-one, forty-two, forty-three, forty-four, forty-five, forty-six, forty-seven, forty-eight, forty-nine, fifty, sixty, seventy, eighty, ninety, one-hundred or more tissue-derived serum glycoproteins, such as those provided in Table 1. In particular, a diagnostic panel may comprise detection reagents that detect one or more prostate-derived serum glycoproteins or one or more bladder-derived serum glycoproteins as listed in Table 1.

[0189] It should be noted that in certain embodiments, the tissue-derived glycoproteins and glycosites as listed in Table 1 that do not overlap with the normal serum glycoprotein or glycosite set are also useful diagnostically. For example, two prostate cancer tissue proteins, prostatic acid phosphatase (PAP) and prostate-specific antigen (PSA) were not found in the plasma dataset. However, the levels of these proteins have been shown to be elevated in the plasma of prostate cancer patients and are unlikely to be detected in plasma of normal donors (Ludwig J A, Weinstein J N. (2005) Biomarkers in cancer staging, prognosis and treatment selection. Nat Rev Cancer 5: 845-856). Accordingly, the present invention also contemplates diagnostic/prognostic panels that detect one, two, three, four, five, six, seven, eight, nine, ten, eleven, twelve, thirteen, fourteen, fifteen, sixteen, seventeen, eighteen, nineteen, twenty, twenty-one, twenty-two, twenty-three, twenty-four, twenty-five, twenty-six, twenty-seven, twenty-eight, twenty-nine, thirty, thirty-one, thirty-two, thirty-three, thirty-four, thirty-five, thirty-six, thirty-seven, thirty-eight, thirty-nine, forty, forty-one, forty-two, forty-three, forty-four, forty-five, forty-six, forty-seven, forty-eight, forty-nine, fifty, sixty, seventy, eighty, ninety, one-hundred or more tissue-derived glycoproteins, wherein the tissue-derived glycoproteins are derived from the same tissue, such as those listed in Table 1 (e.g., prostate-derived glycoproteins, bladder-derived glycoproteins, ovary-derived glycoproteins, breast-derived glycoproteins, lymphocyte-derived glycoproteins, etc.).

[0190] In certain embodiments, the diagnostic/prognostic panels of the present invention comprise detection reagents that specifically bind to the identified glycosites described in Table 1. In this regard, the identified glycosites may map to more than one glycoprotein in the public databases. In other words, multiple glycoproteins contain the same glycosite. Thus, in certain embodiments, it is not necessary to measure the levels of a single glycoprotein that contains the glycosite; it is sufficient to detect and measure the level of all proteins that contain a given glycosite by using detection reagents the specifically bind to the glycosite itself. Differential glycoprotein levels determined in this manner are useful in a variety of diagnostic settings. Thus, the panels of the present invention may comprise detection reagents that bind to one, two, three, four, five, six, seven, eight, nine, ten, eleven, twelve, thirteen, fourteen, fifteen, sixteen, seventeen, eighteen, nineteen, twenty, twenty-one, twenty-two, twenty-three, twenty-four, twenty-five, twenty-six, twenty-seven, twenty-eight, twenty-nine, thirty, thirty-one, thirty-two, thirty-three, thirty-four, thirty-five, thirty-six, thirty-seven, thirty-eight, thirty-nine, forty, forty-one, forty-two, forty-three, forty-four, forty-five, forty-six, forty-seven, forty-eight, forty-nine, fifty, sixty, seventy, eighty, ninety, one-hundred or more glycosites, wherein the tissue-derived glycosites are derived from the same tissue, such as those listed in Table 1.

[0191] Panels of the invention comprise N detection reagents wherein N is 1, 2, 3, 4, 5, 6, 7, 8, 9, 10, 11, 12, 13, 14, 15, 16, 17, 18, 19, 20, 21, 22, 23, 24, 25, 26, 27, 28, 29, 30, or more detection reagents up to the total number of members in a given glycoprotein or glycosite set that are to be detected. As noted above, in certain embodiments, it may be desirable to detect proteins from two or more tissue-derived serum glycoprotein sets. Accordingly, the diagnostic panels of the invention may comprise N detection reagents wherein N is 1, 2, 3, 4, 5, 6, 7, 8, 9, 10, 11, 12, 13, 14, 15, 16, 17, 18, 19, 20, 21, 22, 23, 24, 25, 26, 27, 28, 29, 30, or more detection reagents up to the total number of members in one or more tissue-derived serum glycoprotein sets that are to be detected. Detection reagents of a given diagnostic panel may detect proteins from 1, 2, 3, 4, 5, 6, 7, 8, 9, 10, 11, 12, 13, 14, 15, 16, 17, 18, 19, 20, or more tissue-derived serum glycoprotein sets, such as those provided in Table 1, or normal serum tissue-derived glycoprotein sets thereof.

[0192] In certain embodiments, the detection reagents for a diagnostic panel are selected such that the level of at least one of the tissue-derived serum glycoprotein detected by the plurality of detection reagents in a blood sample from a subject afflicted with a disease affecting the tissue or tissues from which the tissue-derived serum glycoprotein are derived is above or below a predetermined normal range. In certain embodiments, the detection reagents for a diagnostic panel are selected such that the level of at least two, three, four, five, six, seven, eight, nine, ten, eleven, twelve, thirteen, fourteen, fifteen, sixteen, seventeen, eighteen, nineteen, twenty, twenty-one, twenty-two, twenty-three, twenty-four, twenty-five, twenty-six, twenty-seven, twenty-eight, twenty-nine, thirty, thirty-one, thirty-two, thirty-three, thirty-four, thirty-five, thirty-six, thirty-seven, thirty-eight, thirty-nine, forty, forty-one, forty-two, forty-three, forty-four, forty-five, forty-six, forty-seven, forty-eight, forty-nine, fifty, sixty, seventy, eighty, ninety, one-hundred or more of the tissue-derived serum glycoprotein detected by the plurality of detection reagents in a biological sample (e.g., blood) from a subject afflicted with a disease affecting the tissue or tissues from which the glycoproteins are derived is above or below a predetermined normal range. Thus, the detection reagents for a diagnostic panel, kit, or array may be selected such that the level of at least 1, 2, 3, 4, 5, 6, 7, 8, 9, 10, 11, 12, 13, 14, 15, 16, 17, 18, 19, 20, 21, 22, 23, 24, 25, 26, 27, 28, 29, 30, 31, 32, 33, 34, 35, 36, 37, 38, 39, 40, 41, 42, 43, 44, 45,4 6, 47, 48, 49, 50, 60, 70, 80, 90, 100, 110 or any integer value therebetween, or more of the tissue-derived and/or serum glycoproteins or glycosites detected by the plurality of detection reagents in a blood sample from a subject afflicted with a disease affecting the tissue or tissues from which the tissue-derived serum glycoprotein are derived is above or below a predetermined normal range.

[0193] Tissue-derived and/or serum glycoproteins or glycosites can be detected and measured using any of a variety of detection reagents in the context of a variety of methods for quantifying protein levels. Any detection reagent that can specifically bind to or otherwise detect a tissue-derived glycoprotein as described herein is contemplated as a suitable detection reagent. Illustrative detection reagents include, but are not limited to antibodies, or antigen-binding fragments thereof, oligopeptides, polynucleotides, oligonucleotide probes/primers, binding organic molecules, yeast ScFv, DNA or RNA aptamers, isotope labeled peptides, receptors, ligands, click reagents, molecular beacons, quantum dots, microfluidic/nanotechnology measurement devices and the like. The “detection reagents” of the present invention may comprise methods for detecting and quantifying proteins, such mass spectrometry based methods (matrix-assisted laser desorption ionization (MALDI), MALDI-Time-of-Flight (TOF), Tandem MS (MS/MS), electrospray ionization (ESI), Surface Enhanced Laser Desorption Ionization (SELDI)-TOF MS, liquid chromatography (LC)-MS/MS, etc). Other methods useful in this context include isotope-coded affinity tag (ICAT) followed by multidimensional chromatography and MS/MS.

[0194] The detection reagents of the present invention may comprise any of a variety of detectable labels or reporter groups. The invention contemplates the use of any type of detectable label, including, e.g., visually detectable labels, fluorophores, and radioactive labels. The detectable label may be incorporated within or attached, either covalently or non-covalently, to the detection reagent. Detectable labels or reporter groups may include radioactive groups, dyes, fluorophores, biotin, colorimetric substrates, enzymes, or colloidal compounds. Illustrative detectable labels or reporter groups include but are not limited to, fluorescein, tetramethyl rhodamine, Texas Red, coumarins, carbonic anhydrase, urease, horseradish peroxidase, dehydrogenases and/or colloidal gold or silver. For radioactive groups, scintillation counting or autoradiographic methods are generally appropriate for detection. Spectroscopic methods may be used to detect dyes, luminescent groups and fluorescent groups. Biotin may be detected using avidin, coupled to a different reporter group (commonly a radioactive or fluorescent group or an enzyme). Enzyme reporter groups may generally be detected by the addition of substrate (generally for a specific period of time), followed by spectroscopic or other analysis of the reaction products.

[0195] The present invention also contemplates detecting polynucleotides that encode the tissue-derived glycoproteins of the present invention. Accordingly, detection reagents also include polynucleotides, oligonucleotide primers and probes that specifically detect polynucleotides encoding any of the tissue-derived serum glycoproteins as described herein from any of a variety of tissue sources. Thus, the present invention contemplates detection of expression levels by detection of polynucleotides encoding any of the tissue-derived glycoproteins and tissue-derived serum-glycoproteins described herein using any of a variety of known techniques including, for example, PCR, RT-PCR, quantitative PCR, real-time PCR, northern blot analysis, and the like, as further described herein. Oligonucleotide primers for amplification of the polynucleotides encoding tissue-derived glycoproteins and tissue-derived serum-glycoproteins are within the scope of the present invention where polynucleotide-based detection is desired to better detect tissue-derived serum glycoproteins in a diagnostic assay or kit. Oligonucleotide primers for amplification of the polynucleotides encoding tissue-derived serum glycoproteins are also within the scope of the present invention to amplify transcripts in a biological sample. Many amplification methods are known in the art such as PCR, RT-PCR, quantitative real-time PCR, and the like. The PCR conditions used can be optimized in terms of temperature, annealing times, extension times and number of cycles depending on the oligonucleotide and the polynucleotide to be amplified. Such techniques are well known in the art and are described in, for example, Mullis et al., Cold Spring Harbor Symp. Quant. Biol., 51:263, 1987; Erlich ed., PCR Technology, Stockton Press, NY, 1989. Oligonucleotide primers can be anywhere from 8, 9, 10, 11, 12, 13, 14, 15, 16, 17, 18, 19, 20, 21, 22, 23, 24, 25, 26, 27, 28, 29, or 30 nucleotides in length. In certain embodiments, the oligonucleotide primers/probes of the present invention are typically 35, 40, 45, 50, 55, 60, or more nucleotides in length.

[0196] The panels may be comprised of a solid phase surface having attached thereto a plurality of detection reagents each attached at a distinct location. As would be recognized by the skilled artisan, the number of detection reagents on a given panel would be determined from the number of glycoprotein components in a tissue-derived serum glycoprotein set to be measured. In this regard, the plurality of detection reagents may be anywhere from about 2 to about 100, 150, 160, 170, 180, 190, 200 or more detection reagents each specific for a tissue-derived serum glycoprotein. In certain embodiments, the diagnostic panels comprise one or more detection reagents. In another embodiment, a diagnostic panel of the invention may comprise two or more detection reagents. Thus, the diagnostic panels of the invention may comprise a plurality of detection reagents. As would be recognized by the skilled artisan, the number of detection reagents on a given panel would be determined from the number of tissue-derived glycoproteins or glycosites or serum glycoproteins or glycosites to be measured. In this regard, the plurality of detection reagents may be anywhere from 2 to 10, 20, 30, 40, 50, 60, 70, 80, 90, 100, 150, 160, 170, 180, 190, 200 or more detection reagents each specific for a tissue-derived serum glycoprotein or glycosite. In specific embodiments, the panel may comprise for example, 10-50 probes per tissue type and probe two, three, four, five, six, seven, eight, nine, ten, twenty, thirty or more tissues. Accordingly, such arrays/panels may comprise 2500 or more probes.

[0197] In one embodiment, the panel comprises at least 3, 4, 5, 6, 7, 8, 9, or 10 detection reagents wherein each reagent specifically bind to or otherwise detects one of the plurality of tissue-derived serum glycoproteins or glycosites that make up a given fingerprint. In another embodiment, the panel comprises at least 11, 12, 13, 14, 15, 16, 17, 18, 19, or 20 detection reagents each specific for one of the plurality of tissue-derived blood glycoproteins that make up a given fingerprint. In a further embodiment, the panel comprises at least 21, 22, 23, 24, 25, 26, 27, 28, 29, or 30 detection reagents each specific for one of the plurality of tissue-derived blood glycoproteins that make up a given fingerprint. In an additional embodiment, the panel comprises at least 31, 32, 33, 34, 35, 36, 37, 38, 39, or 40 detection reagents each specific for one of the plurality of tissue-derived blood glycoproteins that make up a given fingerprint. In yet a further embodiment, the panel comprises at least 41, 42, 43, 44, 45, 46, 47, 48, 49, or 50 detection reagents each specific for one of the plurality of tissue-derived blood glycoproteins that make up a given fingerprint. In an additional embodiment, the panel comprises at least 51, 52, 53, 54, 55, 56, 57, 58, 59, or 60 detection reagents each specific for one of the plurality of tissue-derived blood glycoproteins that make up a given fingerprint. In one embodiment, the panel comprises at least 61, 62, 63, 64, 65, 66, 67, 68, 69, or 70 detection reagents each specific for one of the plurality of tissue-derived blood glycoproteins that make up a given fingerprint. In one embodiment, the panel comprises at least 75, 80, 85, 90, 100, 150, 160, 170, 180, 190, 200, or more, detection reagents each specific for one of the plurality of tissue-derived blood glycoproteins that make up a given fingerprint.

[0198] Further in this regard, the solid phase surface may be of any material, including, but not limited to, plastic, polycarbonate, polystyrene, polypropylene, polyethlene, glass, nitrocellulose, dextran, nylon, metal, silicon and carbon nanowires, nanoparticles that can be made of a variety of materials and photolithographic materials. In certain embodiments, the solid phase surface is a chip. In another embodiment, the solid phase surface may comprise microtiter plates, beads, membranes, microparticles, the interior surface of a reaction vessel such as a test tube or other reaction vessel. In other embodiments the peptides will be fractionated by one or more one-dimensional columns using size separations, ion exchange or hydrophobicity properties and, for example, deposited in a MALDI 96 or 384 well plate and then injected into an appropriate mass spectrometer.

[0199] In one embodiment, the panel is an addressable array. As such, the addressable array may comprise a plurality of distinct detection reagents, such as antibodies or aptamers, attached to precise locations on a solid phase surface, such as a plastic chip. The position of each distinct detection reagent on the surface is known and therefore “addressable”. In one embodiment, the detection reagents are distinct antibodies that each have specific affinity for one of a plurality of tissue-derived glycopolypeptides or glycosites.

[0200] In one embodiment, the detection reagents, such as antibodies, are covalently linked to the solid surface, such as a plastic chip, for example, through the Fc domains of antibodies. In another embodiment, antibodies are adsorbed onto the solid surface. In a further embodiment, the detection reagent, such as an antibody, is chemically conjugated to the solid surface. In a further embodiment, the detection reagents are attached to the solid surface via a linker. In certain embodiments, detection with multiple specific detection reagents is carried out in solution.

[0201] Methods of constructing protein arrays, including antibody arrays, are known in the art (see, e.g., U.S. Pat. No. 5,489,678; U.S. Pat. No. 5,252,743; Blawas and Reichert, 1998, Biomaterials 19:595-609; Firestone et al., 1996, J. Amer. Chem. Soc. 18, 9033-9041; Mooney et al., 1996, Proc. Natl. Acad. Sci. 93, 12287-12291; Pirrung et al, 1996, Bioconjugate Chem. 7, 317-321; Gao et al, 1995, Biosensors Bioelectron 10, 317-328; Schena et al, 1995, Science 270, 467-470; Lom et al., 1993, J. Neurosci. Methods, 385-397; Pope et al., 1993, Bioconjugate Chem. 4, 116-171; Schramm et al., 1992, Anal. Biochem. 205, 47-56; Gombotz et al., 1991, J. Biomed. Mater. Res. 25, 1547-1562; Alarie et al., 1990, Analy. Chim. Acta 229, 169-176; Owaku et al, 1993, Sensors Actuators B, 13-14, 723-724; Bhatia et al., 1989, Analy. Biochem. 178, 408-413; Lin et al., 1988, IEEE Trans. Biomed. Engng., 35(6), 466-471).

[0202] In one embodiment, the detection reagents, such as antibodies, are arrayed on a chip comprised of electronically activated copolymers of a conductive polymer and the detection reagent. Such arrays are known in the art (see e.g., U.S. Pat. No. 5,837,859 issued Nov. 17, 1998; PCT publication WO 94/22889 dated Oct. 13, 1994). The arrayed pattern may be computer generated and stored. The chips may be prepared in advance and stored appropriately. The antibody array chips can be regenerated and used repeatedly.

[0203] The present invention can employ solid substrates, including arrays in some preferred embodiments. Methods and techniques applicable to polymer (including protein) array synthesis have been described in U.S. Ser. No. 09/536,841, WO 00/58516, U.S. Pat. Nos. 5,143,854, 5,242,974, 5,252,743, 5,324,633, 5,384,261, 5,405,783, 5,424,186, 5,451,683, 5,482,867, 5,491,074, 5,527,681, 5,550,215, 5,571,639, 5,578,832, 5,593,839, 5,599,695, 5,624,711, 5,631,734, 5,795,716, 5,831,070, 5,837,832, 5,856,101, 5,858,659, 5,936,324, 5,968,740, 5,974,164, 5,981,185, 5,981,956, 6,025,601, 6,033,860, 6,040,193, 6,090,555, 6,136,269, 6,269,846 and 6,428,752, in PCT Applications Nos. PCT/US99/00730 (International Publication No. WO 99/36760) and PCT/US01/04285 (International Publication No. WO 01/58593), which are all incorporated herein by reference in their entirety for all purposes. Patents that describe synthesis techniques in specific embodiments include U.S. Pat. Nos. 5,412,087, 6,147,205, 6,262,216, 6,310,189, 5,889,165, and 5,959,098.

[0204] Nucleic acid arrays that are useful in the present invention include those known in the art and that can be manufactured using the cognate sequences to those nucleic acid sequences set forth in Table 1 and the attached sequence listing, as well as those that are commercially available from Affymetrix (Santa Clara, Calif.) under the brand name GeneChip™. Example arrays are shown on the website at affymetrix dot com. Further exemplary methods of manufacturing and using arrays are provided in, for example, U.S. Pat. Nos. 7,028,629; 7,011,949; 7,011,945; 6,936,419; 6,927,032; 6,924,103; 6,921,642; and 6,818,394 to name a few.

[0205] The present invention as related to arrays and microarrays also contemplates many uses for polymers attached to solid substrates. These uses include gene expression monitoring, profiling, library screening, genotyping and diagnostics. Gene expression monitoring and profiling methods and methods useful for gene expression monitoring and profiling are shown in U.S. Pat. Nos. 5,800,992, 6,013,449, 6,020,135, 6,033,860, 6,040,138, 6,177,248 and 6,309,822. Genotyping and uses therefore are shown in U.S. Ser. Nos. 10/442,021, 10/013,598 (U.S. Patent Application Publication 20030036069), and U.S. Pat. Nos. 5,925,525, 6,268,141, 5,856,092, 6,267,152, 6,300,063, 6,525,185, 6,632,611, 5,858,659, 6,284,460, 6,361,947, 6,368,799, 6,673,579 and 6,333,179. Other methods of nucleic acid amplification, labeling and analysis that may be used in combination with the methods disclosed herein are embodied in U.S. Pat. Nos. 5,871,928, 5,902,723, 6,045,996, 5,541,061, and 6,197,506.

[0206] In certain embodiments the use of click chemistry (e.g., click reagents) to anchor one or more probes/reagents specific to a glycoprotein as set forth herein or transcript as set forth herein to a detection label or to an array or other surface (e.g., nanoparticle). While such chemistries are well known in the art, in short, the chemistries utilized allow bioconjugation by the formation of triazoles that readily associate with biological targets, through hydrogen bonding and dipole interactions. Chemistries such as this are detailed in the art that is incorporated herein by reference in its entirety and includes Kolb and Sharpless, DDT, Vol. 8 (24), 1128-1137, 2003; U.S. Patent Application Publication No. 20050222427.

[0207] In certain embodiments, detection with multiple specific detection reagents is carried out in solution.

[0208] The detection reagents of the present invention may be provided in a diagnostic kit. As such a diagnostic kit may comprise any of a variety of appropriate reagents or buffers, enzymes, dyes, colorimetric or other substrates, and appropriate containers to be used in any of a variety of detection assays as described herein. Kits may also comprise one or more positive controls, one or more negative controls, and a protocol for identification of the glycoproteins or glycosites of interest using any one of the assays as described herein.

[0209] In certain embodiments of the present invention, kits or panels comprise a plurality of nucleic acid molecules or protein sequences that correspond to two, three, four, five, six, seven, eight, nine, ten, eleven, twelve, thirteen, fourteen, fifteen, sixteen, seventeen, eighteen, nineteen, twenty, or more sequences from Tables 1.

[0210] In another embodiment of the present invention, there is an array which comprises a plurality of nucleic acid molecules or protein-binding agents (such as immunoglobulins and antigen-binding fragments thereof) that correspond or specifically bind to two, three, four, five, six, seven, eight, nine, ten, eleven, twelve, thirteen, fourteen, fifteen, sixteen, seventeen, eighteen, nineteen, twenty, or more sequences from Tables 1.

[0211] In another embodiment of the present invention, there is a kit for monitoring a course of therapeutic treatment of a disease, comprising a) two gene-specific priming means designed to produce double stranded DNA complementary to a gene selected from the group consisting of any sequence from Table 1; wherein a first priming means contains a sequence which can hybridize to RNA, cDNA or an EST complementary to said gene to create an extension product and a second priming means capable of hybridizing to said extension product; b) an enzyme with reverse transcriptase activity c) an enzyme with thermostable DNA polymerase activity and d) a labeling means; wherein said primers are used to detect the quantitative expression levels of said gene in a test subject.

[0212] In another embodiment of the present invention, there is a kit for monitoring progression or regression of a disease, comprising: a) two gene-specific priming means designed to produce double stranded DNA complementary to a gene selected from the group consisting of any sequence in Table 1; wherein a first priming means contains a sequence which can hybridize to RNA, cDNA or an EST complementary to said gene to create an extension product and a second priming means capable of hybridizing to said extension product; b) an enzyme with reverse transcriptase activity c) an enzyme with thermostable DNA polymerase activity and d) a labeling means; wherein said primers are used to detect the quantitative expression levels of said gene in a test subject.

[0213] In another embodiment of the present invention, there is a diagnostic panel or kit that comprises a plurality of nucleic acid molecules or polypeptide molecules that identify or correspond to two or more sequences from Table 1.

[0214] It would be readily understood by review of the instant specification that while some methods are described as gene or nucleic acid based or polypeptide based, that all such methods would be readily interchangeable. Accordingly, where a method is described that could use a polypeptide for detection of another polypeptide in place of nucleic acid to nucleic acid detection and vice versa, such interchangeability is explicitly considered to be a part of the invention described herein. Likewise, wherein blood is described as the prototypic biological component for analysis, it should be understood that any cell sample, tissue sample, or biological fluid sample may be used interchangeably therewith.

[0215] As noted elsewhere herein, perturbation of a normal fingerprint can indicate primary disease of the tissue being tested or secondary, indirect affects on that tissue resulting from disease of another tissue. Perturbation from normal may also include the presence of a glycoprotein in a sample of a patient being tested for a perturbed state not present in a given tissue-derived serum glycoprotein set (e.g., when analyzing a certain patient sample such as in the prostate a glycoprotein or transcript not found in the normal prostate set may appear in a perturbed sample) may be an indicator of disease. Further, the absence of a protein or transcript found in the normal tissue-derived serum glycoprotein set may also be an indicator of a perturbed state.

[0216] The levels and locations of tissue-derived serum glycoproteins may change as the result of disease. Thus, in certain embodiments, in vivo imaging techniques can be used to visualize the levels and locations of tissue-derived and/or serum-derived glycoproteins or glycosites in bodily fluid. In this embodiment, exemplary in vivo imaging techniques include, but are not limited to PET, SPECT (Sharma et al; Journal of Magnetic Resonance Imaging (2002), 16: 336-351), MALDI (Stoeckli, et al. Nature Medicine (2001) 7: 493-496), and Fluorescence resonance energy transfer (FRET) (Seker et al, The Journal of Cell Biology, 160 5, (2003) 629-633).

[0217] Using the methods described herein, a vast array of tissue-derived glycoprotein blood fingerprints can be defined for any of a variety of diseases as described further herein. As such, the present invention further provides information databases comprising data that make up tissue-derived glycoprotein blood fingerprints as described herein. As such, the databases may comprise the defined differential expression levels as determined using any of a variety of methods such as those described herein, of each of the plurality of tissue-derived glycoproteins that make up a given fingerprint in any of a variety of settings (e.g., normal or disease-associated fingerprints).

Antibodies/Binding Oligopeptides/Binding Organic Molecules

[0218] The present invention provides anti-tissue-derived glycoprotein or glycosite specific antibodies and anti-tissue-derived serum glycoprotein or glycosite specific antibodies which may find use herein as therapeutic, diagnostic, and/or imaging agents. Exemplary antibodies include polyclonal, monoclonal, humanized, bispecific, and heteroconjugate antibodies.

[0219] Thus, the invention provides antibodies which bind, preferably specifically, to any of the polypeptides described herein. Optionally, the antibody is a monoclonal antibody, antigen-binding fragment thereof, chimeric antibody, humanized antibody, single-chain antibody or antibody that competitively inhibits the binding of an anti-tissue- and/or serum-derived glycopolypeptide antibody to its respective antigenic epitope. Antibodies of the present invention may optionally be conjugated to a growth inhibitory agent or cytotoxic agent such as a toxin, including, for example, a maytansinoid or calicheamicin, an antibiotic, a radioactive isotope, a nucleolytic enzyme, or the like. The antibodies of the present invention may optionally be produced in CHO cells or bacterial cells and preferably induce death of a cell to which they bind. For diagnostic purposes, the antibodies of the present invention may be detectably labeled, attached to a solid support, or the like.

[0220] Antibodies may be prepared by any of a variety of techniques known to those of ordinary skill in the art. See, e.g., Harlow and Lane, Antibodies: A Laboratory Manual, Cold Spring Harbor Laboratory, 1988. In general, antibodies can be produced by cell culture techniques, including the generation of monoclonal antibodies using well-established techniques known to the skilled artisan or via transfection of antibody genes into suitable bacterial or mammalian cell hosts, in order to allow for the production of recombinant antibodies. In one technique, an immunogen comprising the polypeptide is initially injected into any of a wide variety of mammals (e.g., mice, rats, rabbits, sheep or goats). In this step, the polypeptides of this invention may serve as the immunogen without modification. Alternatively, particularly for relatively short polypeptides, a superior immune response may be elicited if the polypeptide is joined to a carrier protein, such as bovine serum albumin or keyhole limpet hemocyanin. The immunogen is injected into the animal host, usually according to a predetermined schedule incorporating one or more booster immunizations, and the animals are bled periodically. Polyclonal antibodies specific for the polypeptide may then be purified from such antisera by, for example, affinity chromatography using the polypeptide coupled to a suitable solid support.

[0221] In one embodiment, multiple target proteins or peptides are used in a single immune response to generate multiple useful detection reagents simultaneously. In one embodiment, the individual specificities are later separated out.

[0222] In certain embodiments, antibody can be generated by phage display methods (such as described by Vaughan, T. J., et al., Nat Biotechnol, 14: 309-314, 1996; and Knappik, A., et al., Mol Biol, 296: 57-86, 2000); ribosomal display (such as described in Hanes, J., et al., Nat Biotechnol, 18: 1287-1292, 2000), or periplasmic expression in E. coli (see e.g., Chen, G., et al., Nat Biotechnol, 19: 537-542, 2001.). In further embodiments, antibodies can be isolated using a yeast surface display library. See e.g., nonimmune library of 10⁹ human antibody scFv fragments as constructed by Feldhaus, M. J., et al., Nat Biotechnol, 21: 163-170, 2003. There are several advantages of this yeast surface display compared to more traditional large nonimmune human antibody repertoires such as phage display, ribosomal display, and periplasmic expression in E. coli 1). The yeast library can be amplified 10¹⁰-fold without measurable loss of clonal diversity and repertoire bias as the expression is under control of the tightly GAL1/10 promoter and expansion can be done under non induction conditions; 2) nanomolar-affinity scFvs can be routinely obtained by magnetic bead screening and flow-cytometric sorting, thus greatly simplified the protocol and capacity of antibody screening; 3) with equilibrium screening, a minimal affinity threshold of the antibodies desired can be set; 4) the binding properties of the antibodies can be quantified directly on the yeast surface; 5) multiplex library screening against multiple antigens simultaneously is possible; and 6) for applications demanding picomolar affinity (e.g. in early diagnosis), subsequent rapid affinity maturation (Kieke, M. C., et al., J Mol Biol, 307: 1305-1315, 2001.) can be carried out directly on yeast clones without further re-cloning and manipulations.

[0223] A number of diagnostically useful molecules are known in the art which comprise antigen-binding sites that are capable of exhibiting immunological binding properties of an antibody molecule. The proteolytic enzyme papain preferentially cleaves IgG molecules to yield several fragments, two of which (the F(ab) fragments) each comprise a covalent heterodimer that includes an intact antigen-binding site. The enzyme pepsin is able to cleave IgG molecules to provide several fragments, including the F(ab″)₂ fragment which comprises both antigen-binding sites. An Fv fragment can be produced by preferential proteolytic cleavage of an IgM, and on rare occasions IgG or IgA immunoglobulin molecule. Fv fragments are, however, more commonly derived using recombinant techniques known in the art. The Fv fragment includes a non-covalent V_{H}::V_{L} heterodimer including an antigen-binding site which retains much of the antigen recognition and binding capabilities of the native antibody molecule. Inbar et al. (1972) Proc. Nat. Acad. Sci. USA 69:2659-2662; Hochman et al. (1976) Biochem 15:2706-2710; and Ehrlich et al. (1980) Biochem 19:4091-4096.

[0224] A single chain Fv (sFv) polypeptide is a covalently linked V_{H}::V_{L} heterodimer which is expressed from a gene fusion including V_{H}- and V_{L}-encoding genes linked by a peptide-encoding linker. Huston et al. (1988) Proc. Nat. Acad. Sci. USA 85(16):5879-5883. A number of methods have been described to discern chemical structures for converting the naturally aggregated but chemically separated light and heavy polypeptide chains from an antibody V region into an sFv molecule which will fold into a three dimensional structure substantially similar to the structure of an antigen-binding site. See, e.g., U.S. Pat. Nos. 5,091,513 and 5,132,405, to Huston et al.; and U.S. Pat. No. 4,946,778, to Ladner et al.

[0225] Each of the above-described molecules includes a heavy chain and a light chain CDR set, respectively interposed between a heavy chain and a light chain FR set which provide support to the CDRS and define the spatial relationship of the CDRs relative to each other. As used herein, the term CDR set refers to the three hypervariable regions of a heavy or light chain V region. Proceeding from the N-terminus of a heavy or light chain, these regions are denoted as CDR1, CDR2, and CDR3 respectively. An antigen-binding site, therefore, includes six CDRs, comprising the CDR set from each of a heavy and a light chain V region. A polypeptide comprising a single CDR, (e.g., a CDR1, CDR2 or CDR3) is referred to herein as a molecular recognition unit. Crystallographic analysis of a number of antigen-antibody complexes has demonstrated that the amino acid residues of CDRs form extensive contact with bound antigen, wherein the most extensive antigen contact is with the heavy chain CDR3. Thus, the molecular recognition units are primarily responsible for the specificity of an antigen-binding site.

[0226] As used herein, the term FR set refers to the four flanking amino acid sequences which frame the CDRs of a CDR set of a heavy or light chain V region. Some FR residues may contact bound antigen; however, FRs are primarily responsible for folding the V region into the antigen-binding site, particularly the FR residues directly adjacent to the CDRS. Within FRs, certain amino residues and certain structural features are very highly conserved. In this regard, all V region sequences contain an internal disulfide loop of around 90 amino acid residues. When the V regions fold into a binding-site, the CDRs are displayed as projecting loop motifs which form an antigen-binding surface. It is generally recognized that there are conserved structural regions of FRs which influence the folded shape of the CDR loops into certain canonical structures regardless of the precise CDR amino acid sequence. Further, certain FR residues are known to participate in non-covalent interdomain contacts which stabilize the interaction of the antibody heavy and light chains.

[0227] In other embodiments of the present invention, the invention provides vectors comprising DNA encoding any of the herein described antibodies. Host cell comprising any such vector are also provided. By way of example, the host cells may be CHO cells, E. coli cells, or yeast cells. A process for producing any of the herein described antibodies is further provided and comprises culturing host cells under conditions suitable for expression of the desired antibody and recovering the desired antibody from the cell culture.

[0228] 1. Polyclonal Antibodies

[0229] Polyclonal antibodies are preferably raised in animals by multiple subcutaneous (sc) or intraperitoneal (ip) injections of the relevant antigen and an adjuvant. It may be useful to conjugate the relevant antigen (especially when synthetic peptides are used) to a protein that is immunogenic in the species to be immunized. For example, the antigen can be conjugated to keyhole limpet hemocyanin (KLH), serum albumin, bovine thyroglobulin, or soybean trypsin inhibitor, using a bifunctional or derivatizing agent, e.g., maleimidobenzoyl sulfosuccinimide ester (conjugation through cysteine residues), N-hydroxysuccinimide (through lysine residues), glutaraldehyde, succinic anhydride, SOCl₂, or R¹N═C′NR, where R and R¹ are different alkyl groups.

[0230] Animals are immunized against the antigen, immunogenic conjugates, or derivatives by combining, e.g., 100 μg or 5 μg of the protein or conjugate (for rabbits or mice, respectively) with 3 volumes of Freund's complete adjuvant and injecting the solution intradermally at multiple sites. One month later, the animals are boosted with ⅕ to 1/10 the original amount of peptide or conjugate in Freund's complete adjuvant by subcutaneous injection at multiple sites. Seven to 14 days later, the animals are bled and the serum is assayed for antibody titer. Animals are boosted until the titer plateaus. Conjugates also can be made in recombinant cell culture as protein fusions. Also, aggregating agents such as alum are suitably used to enhance the immune response.

[0231] 2. Monoclonal Antibodies

[0232] Monoclonal antibodies may be made using the hybridoma method first described by Kohler et al., Nature, 256:495 (1975), or may be made by recombinant DNA methods (U.S. Pat. No. 4,816,567).

[0233] In the hybridoma method, a mouse or other appropriate host animal, such as a hamster, is immunized as described above to elicit lymphocytes that produce or are capable of producing antibodies that will specifically bind to the protein used for immunization. Alternatively, lymphocytes may be immunized in vitro. After immunization, lymphocytes are isolated and then fused with a myeloma cell line using a suitable fusing agent, such as polyethylene glycol, to form a hybridoma cell (Goding, Monoclonal Antibodies: Principles and Practice, pp. 59-103 (Academic Press, 1986)).

[0234] The hybridoma cells thus prepared are seeded and grown in a suitable culture medium which medium preferably contains one or more substances that inhibit the growth or survival of the unfused, parental myeloma cells (also referred to as fusion partner). For example, if the parental myeloma cells lack the enzyme hypoxanthine guanine phosphoribosyl transferase (HGPRT or HPRT), the selective culture medium for the hybridomas typically will include hypoxanthine, aminopterin, and thymidine (HAT medium), which substances prevent the growth of HGPRT-deficient cells.

[0235] Preferred fusion partner myelomacells are those that fuse efficiently, support stable high-level production of antibody by the selected antibody-producing cells, and are sensitive to a selective medium that selects against the unfused parental cells. Preferred myeloma cell lines are murine myeloma lines, such as those derived from MOPC-21 and MPC-11 mouse tumors available from the Salk Institute Cell Distribution Center, San Diego, Calif. USA, and SP-2 and derivatives e.g., X63-Ag8-653 cells available from the American Type Culture Collection, Manassas, Va., USA. Human myeloma and mouse-human heteromyeloma cell lines also have been described for the production of human monoclonal antibodies (Kozbor, J. Immunol., 133:3001 (1984); and Brodeur et al., Monoclonal Antibody Production Techniques and Applications, pp. 51-63 (Marcel Dekker, Inc., New York, 1987)).

[0236] Culture medium in which hybridoma cells are growing is assayed for production of monoclonal antibodies directed against the antigen. Preferably, the binding specificity of monoclonal antibodies produced by hybridoma cells is determined by immunoprecipitation or by an in vitro binding assay, such as radioimmunoassay (RIA) or enzyme-linked immunosorbent assay (ELISA).

[0237] The binding affinity of the monoclonal antibody can, for example, be determined by the Scatchard analysis described in Munson et al., Anal. Biochem., 107:220 (1980).

[0238] Once hybridoma cells that produce antibodies of the desired specificity, affinity, and/or activity are identified, the clones may be subcloned by limiting dilution procedures and grown by standard methods (Goding, Monoclonal Antibodies: Principles and Practice, pp. 59-103 (Academic Press, 1986)). Suitable culture media for this purpose include, for example, D-MEM or RPMI-1640 medium. In addition, the hybridoma cells may be grown in vivo as ascites tumors in an animal e.g., by i.p. injection of the cells into mice.

[0239] The monoclonal antibodies secreted by the subclones are suitably separated from the culture medium, ascites fluid, or serum by conventional antibody purification procedures such as, for example, affinity chromatography (e.g., using protein A or protein G-Sepharose) or ion-exchange chromatography, hydroxylapatite chromatography, gel electrophoresis, dialysis, etc.

[0240] DNA encoding the monoclonal antibodies is readily isolated and sequenced using conventional procedures (e.g., by using oligonucleotide probes that are capable of binding specifically to genes encoding the heavy and light chains of murine antibodies). The hybridoma cells serve as a preferred source of such DNA. Once isolated, the DNA may be placed into expression vectors, which are then transfected into host cells such as E. coli cells, simian COS cells, Chinese Hamster Ovary (CHO) cells, or myeloma cells that do not otherwise produce antibody protein, to obtain the synthesis of monoclonal antibodies in the recombinant host cells. Review articles on recombinant expression in bacteria of DNA encoding the antibody include Skerra et al., Curr. Opinion in Immunol., 5:256-262 (1993) and Pluckthun, Immunol. Revs. 130:151-188 (1992).

[0241] In a further embodiment, monoclonal antibodies or antigen-binding fragments thereof can be isolated from antibody phage libraries generated using the techniques described in McCafferty et al., Nature, 348:552-554 (1990). Clackson et al., Nature, 352:624-628 (1991) and Marks et al., J. Mol. Biol., 222:581-597 (1991) describe the isolation of murine and human antibodies, respectively, using phage libraries. Subsequent publications describe the production of high affinity (nM range) human antibodies by chain shuffling (Marks et al., Bio/Technology, 10:779-783 (1992)), as well as combinatorial infection and in vivo recombination as a strategy for constructing very large phage libraries (Waterhouse et al., Nuc. Acids. Res. 21:2265-2266 (1993)). Thus, these techniques are viable alternatives to traditional monoclonal antibody hybridoma techniques for isolation of monoclonal antibodies.

[0242] The DNA that encodes the antibody may be modified to produce chimeric or fusion antibody polypeptides, for example, by substituting human heavy chain and light chain constant domain (C.sub.H and C.sub.L) sequences for the homologous murine sequences (U.S. Pat. No. 4,816,567; and Morrison, et al., Proc. Natl Acad. Sci. USA, 81:6851 (1984)), or by fusing the immunoglobulin coding sequence with all or part of the coding sequence for a non-immunoglobulin polypeptide (heterologous polypeptide). The non-immunoglobulin polypeptide sequences can substitute for the constant domains of an antibody, or they are substituted for the variable domains of one antigen-combining site of an antibody to create a chimeric bivalent antibody comprising one antigen-combining site having specificity for an antigen and another antigen-combining site having specificity for a different antigen.

[0243] 3. Human and Humanized Antibodies

[0244] The anti-tissue-and/or serum-derived glycoprotein or glycosite antibodies of the invention may further comprise humanized antibodies or human antibodies. Humanized forms of non-human (e.g., murine) antibodies are chimeric immunoglobulins, immunoglobulin chains or fragments thereof (such as Fv, Fab, Fab′, F(ab′)₂ or other antigen-binding subsequences of antibodies) which contain minimal sequence derived from non-human immunoglobulin. Humanized antibodies include human immunoglobulins (recipient antibody) in which residues from a complementary determining region (CDR) of the recipient are replaced by residues from a CDR of a non-human species (donor antibody) such as mouse, rat or rabbit having the desired specificity, affinity and capacity. In some instances, Fv framework residues of the human immunoglobulin are replaced by corresponding non-human residues. Humanized antibodies may also comprise residues which are found neither in the recipient antibody nor in the imported CDR or framework sequences. In general, the humanized antibody will comprise substantially all of at least one, and typically two, variable domains, in which all or substantially all of the CDR regions correspond to those of a non-human immunoglobulin and all or substantially all of the FR regions are those of a human immunoglobulin consensus sequence. The humanized antibody optimally also will comprise at least a portion of an immunoglobulin constant region (Fc), typically that of a human immunoglobulin [Jones et al., Nature 321:522-525 (1986); Riechmann et al., Nature, 332:323-329 (1988); and Presta, Curr. Op. Struct. Biol., 2:593-596 (1992)].

[0245] Methods for humanizing non-human antibodies are well known in the art. Generally, a humanized antibody has one or more amino acid residues introduced into it from a source which is non-human. These non-human amino acid residues are often referred to as “import” residues, which are typically taken from an “import” variable domain. Humanization can be essentially performed following the method of Winter and co-workers [Jones et al., Nature, 321:522-525 (1986); Riechmann et al., Nature, 332:323-327 (1988); Verhoeyen et al. Science, 239:1534-1536 (1988)], by substituting rodent CDRs or CDR sequences for the corresponding sequences of a human antibody. Accordingly, such “humanized” antibodies are chimeric antibodies (U.S. Pat. No. 4,816,567), wherein substantially less than an intact human variable domain has been substituted by the corresponding sequence from a non-human species. In practice, humanized antibodies are typically human antibodies in which some CDR residues and possibly some FR residues are substituted by residues from analogous sites in rodent antibodies.

[0246] The choice of human variable domains, both light and heavy, to be used in making the humanized antibodies is very important to reduce antigenicity and HAMA response (human anti-mouse antibody) when the antibody is intended for human therapeutic use. According to the so-called “best-fit” method, the sequence of the variable domain of a rodent antibody is screened against the entire library of known human variable domain sequences. The human V domain sequence which is closest to that of the rodent is identified and the human framework region (FR) within it accepted for the humanized antibody (Sims et al., J. Immunol. 151:2296 (1993); Chothia et al., J. Mol. Biol., 196:901 (1987)). Another method uses a particular framework region derived from the consensus sequence of all human antibodies of a particular subgroup of light or heavy chains. The same framework may be used for several different humanized antibodies (Carter et al., Proc. Natl. Acad. Sci. USA, 89:4285 (1992); Presta et al., J. Immunol. 151:2623 (1993)).

[0247] It is further important that antibodies be humanized with retention of high binding affinity for the antigen and other favorable biological properties. To achieve this goal, according to a preferred method, humanized antibodies are prepared by a process of analysis of the parental sequences and various conceptual humanized products using three-dimensional models of the parental and humanized sequences. Three-dimensional immunoglobulin models are commonly available and are familiar to those skilled in the art. Computer programs are available which illustrate and display probable three-dimensional conformational structures of selected candidate immunoglobulin sequences. Inspection of these displays permits analysis of the likely role of the residues in the functioning of the candidate immunoglobulin sequence, i.e., the analysis of residues that influence the ability of the candidate immunoglobulin to bind its antigen. In this way, FR residues can be selected and combined from the recipient and import sequences so that the desired antibody characteristic, such as increased affinity for the target antigen(s), is achieved. In general, the hypervariable region residues are directly and most substantially involved in influencing antigen binding.

[0248] Various forms of a humanized anti-tissue-/and/or serum-derived glycoprotein or glycosite antibody are contemplated. For example, the humanized antibody may be an antibody fragment, such as a Fab, which is optionally conjugated with one or more cytotoxic agent(s) in order to generate an immunoconjugate. Alternatively, the humanized antibody may be an intact antibody, such as an intact IgG1 antibody.

[0249] As an alternative to humanization, human antibodies can be generated. For example, it is now possible to produce transgenic animals (e.g., mice) that are capable, upon immunization, of producing a full repertoire of human antibodies in the absence of endogenous immunoglobulin production. For example, it has been described that the homozygous deletion of the antibody heavy-chain joining region (J.sub.H) gene in chimeric and germ-line mutant mice results in complete inhibition of endogenous antibody production. Transfer of the human germ-line immunoglobulin gene array into such germ-line mutant mice will result in the production of human antibodies upon antigen challenge. See, e.g., Jakobovits et al., Proc. Natl. Acad. Sci. USA, 90:2551 (1993); Jakobovits et al., Nature, 362:255-258 (1993); Bruggemann et al., Year in Immuno. 7:33 (1993); U.S. Pat. Nos. 5,545,806, 5,569,825, 5,591,669 (all of GenPharm); U.S. Pat. No. 5,545,807; and WO 97/17852.

[0250] Alternatively, phage display technology (McCafferty et al., Nature 348:552-553) can be used to produce human antibodies and antigen-binding fragments thereof in vitro, from immunoglobulin variable (V) domain gene repertoires from unimmunized donors. According to this technique, antibody V domain genes are cloned in-frame into either a major or minor coat protein gene of a filamentous bacteriophage, such as M13 or fd, and displayed as functional antibody fragments on the surface of the phage particle. Because the filamentous particle contains a single-stranded DNA copy of the phage genome, selections based on the functional properties of the antibody also result in selection of the gene encoding the antibody exhibiting those properties. Thus, the phage mimics some of the properties of the B-cell. Phage display can be performed in a variety of formats, reviewed in, e.g., Johnson, Kevin S. and Chiswell, David J., Current Opinion in Structural Biology 3:564-571 (1993). Several sources of V-gene segments can be used for phage display. Clackson et al., Nature, 352:624-628 (1991) isolated a diverse array of anti-oxazolone antibodies from a small random combinatorial library of V genes derived from the spleens of immunized mice. A repertoire of V genes from unimmunized human donors can be constructed and antibodies to a diverse array of probes (including self-antigens) can be isolated essentially following the techniques described by Marks et al., J. Mol. Biol. 222:581-597 (1991), or Griffith et al., EMBO J. 12:725-734 (1993). See, also, U.S. Pat. Nos. 5,565,332 and 5,573,905.

[0251] As discussed above, human antibodies may also be generated by in vitro activated B cells (see U.S. Pat. Nos. 5,567,610 and 5,229,275).

[0252] 4. Antigen-Binding Antibody Fragments

[0253] In certain circumstances there are advantages of using antibody fragments, rather than whole antibodies. The smaller size of the fragments allows for rapid clearance, and may lead to improved access to solid tumors.

[0254] Various techniques have been developed for the production of antibody fragments. Traditionally, these fragments were derived via proteolytic digestion of intact antibodies (see, e.g., Morimoto et al., Journal of Biochemical and Biophysical Methods 24:107-117 (1992); and Brennan et al., Science, 229:81 (1985)). However, these fragments can now be produced directly by recombinant host cells. Fab, Fv and ScFv antibody fragments can all be expressed in and secreted from E. coli, thus allowing the facile production of large amounts of these fragments. Antibody fragments can be isolated from the antibody phage libraries discussed above. Alternatively, Fab′-SH fragments can be directly recovered from E. coli and chemically coupled to form F(ab′)₂ fragments (Carter et al., Bio/Technology 10:163-167 (1992)). According to another approach, F(ab′)₂ fragments can be isolated directly from recombinant host cell culture. Fab and F(ab′)₂ fragment with increased in vivo half-life comprising a salvage receptor binding epitope residues are described in U.S. Pat. No. 5,869,046. Other techniques for the production of antibody fragments will be apparent to the skilled practitioner. In other embodiments, the antibody of choice is a single chain Fv fragment (scFv). See WO 93/16185; U.S. Pat. No. 5,571,894; and U.S. Pat. No. 5,587,458. Fv and sFv are the only species with intact combining sites that are devoid of constant regions; thus, they are suitable for reduced nonspecific binding during in vivo use. sFv fusion proteins may be constructed to yield fusion of an effector protein at either the amino or the carboxy terminus of an sFv. See Antibody Engineering, ed. Borrebaeck, supra. The antibody fragment may also be a “linear antibody”, e.g., as described in U.S. Pat. No. 5,641,870 for example. Such linear antibody fragments may be monospecific or bispecific.

[0255] 5. Bispecific Antibodies

[0256] Bispecific antibodies are antibodies that have binding specificities for at least two different epitopes. Exemplary bispecific antibodies may bind to two different epitopes of an glycoprotein as described herein. Other such antibodies may combine a tissue-derived or serum derived glycoprotein binding site with a binding site for another protein. Alternatively, an anti-tissue-and/or serum-derived arm may be combined with an arm which binds to a triggering molecule on a leukocyte such as a T-cell receptor molecule (e.g. CD3), or Fc receptors for IgG (FcγR), such as FcγRI (CD64), FcγRII (CD32) and FcγRIII (CD16), so as to focus and localize cellular defense mechanisms to the cell expressing a glycoprotein of interest. Bispecific antibodies may also be used for diagnostic purposes, attaching imaging agents or localizing cytotoxic agents to cells which express glycoproteins of interest. These antibodies possess an arm that binds to the glycoprotein or glycosite of interest and an arm which binds the cytotoxic agent (e.g., saporin, anti-interferon-.alpha., vinca alkaloid, ricin A chain, methotrexate or radioactive isotope hapten). Bispecific antibodies can be prepared as full length antibodies or antibody fragments (e.g., F(ab′)₂ bispecific antibodies).

[0257] WO 96/16673 describes a bispecific anti-ErbB2/anti-FcγRIII antibody and U.S. Pat. No. 5,837,234 discloses a bispecific anti-ErbB2/anti-FcγRI antibody. A bispecific anti-ErbB2/Fc .alpha. antibody is shown in WO98/02463. U.S. Pat. No. 5,821,337 teaches a bispecific anti-ErbB2/anti-CD3 antibody.

[0258] Methods for making bispecific antibodies are known in the art. Traditional production of full length bispecific antibodies is based on the co-expression of two immunoglobulin heavy chain-light chain pairs, where the two chains have different specificities (Millstein et al., Nature 305:537-539 (1983)). Because of the random assortment of immunoglobulin heavy and light chains, these hybridomas (quadromas) produce a potential mixture of 10 different antibody molecules, of which only one has the correct bispecific structure. Purification of the correct molecule, which is usually done by affinity chromatography steps, is rather cumbersome, and the product yields are low. Similar procedures are disclosed in WO 93/08829, and in Traunecker et al., EMBO J. 10:3655-3659 (1991).

[0259] According to a different approach, antibody variable domains with the desired binding specificities (antibody-antigen combining sites) are fused to immunoglobulin constant domain sequences. Preferably, the fusion is with an Ig heavy chain constant domain, comprising at least part of the hinge, C_{H2}, and C_{H3} regions. It is preferred to have the first heavy-chain constant region (C_{H1}) containing the site necessary for light chain bonding, present in at least one of the fusions. DNAs encoding the immunoglobulin heavy chain fusions and, if desired, the immunoglobulin light chain, are inserted into separate expression vectors, and are co-transfected into a suitable host cell. This provides for greater flexibility in adjusting the mutual proportions of the three polypeptide fragments in embodiments when unequal ratios of the three polypeptide chains used in the construction provide the optimum yield of the desired bispecific antibody. It is, however, possible to insert the coding sequences for two or all three polypeptide chains into a single expression vector when the expression of at least two polypeptide chains in equal ratios results in high yields or when the ratios have no significant affect on the yield of the desired chain combination.

[0260] In a preferred embodiment of this approach, the bispecific antibodies are composed of a hybrid immunoglobulin heavy chain with a first binding specificity in one arm, and a hybrid immunoglobulin heavy chain-light chain pair (providing a second binding specificity) in the other arm. It was found that this asymmetric structure facilitates the separation of the desired bispecific compound from unwanted immunoglobulin chain combinations, as the presence of an immunoglobulin light chain in only one half of the bispecific molecule provides for a facile way of separation. This approach is disclosed in WO 94/04690. For further details of generating bispecific antibodies see, for example, Suresh et al., Methods in Enzymology 121:210 (1986).

[0261] According to another approach described in U.S. Pat. No. 5,731,168, the interface between a pair of antibody molecules can be engineered to maximize the percentage of heterodimers which are recovered from recombinant cell culture. The preferred interface comprises at least a part of the C.sub.H3 domain. In this method, one or more small amino acid side chains from the interface of the first antibody molecule are replaced with larger side chains (e.g., tyrosine or tryptophan). Compensatory “cavities” of identical or similar size to the large side chain(s) are created on the interface of the second antibody molecule by replacing large amino acid side chains with smaller ones (e.g., alanine or threonine). This provides a mechanism for increasing the yield of the heterodimer over other unwanted end-products such as homodimers.

[0262] Bispecific antibodies include cross-linked or “heteroconjugate” antibodies. For example, one of the antibodies in the heteroconjugate can be coupled to avidin, the other to biotin. Such antibodies have, for example, been proposed to target immune system cells to unwanted cells (U.S. Pat. No. 4,676,980), and for treatment of HIV infection (WO 91/00360, WO 92/200373, and EP 03089). Heteroconjugate antibodies may be made using any convenient cross-linking methods. Suitable cross-linking agents are well known in the art, and are disclosed in U.S. Pat. No. 4,676,980, along with a number of cross-linking techniques.

[0263] Techniques for generating bispecific antibodies from antibody fragments have also been described in the literature. For example, bispecific antibodies can be prepared using chemical linkage. Brennan et al., Science 229:81 (1985) describe a procedure wherein intact antibodies are proteolytically cleaved to generate F(ab′)₂ fragments. These fragments are reduced in the presence of the dithiol complexing agent, sodium arsenite, to stabilize vicinal dithiols and prevent intermolecular disulfide formation. The Fab′ fragments generated are then converted to thionitrobenzoate (TNB) derivatives. One of the Fab′-TNB derivatives is then reconverted to the Fab′-thiol by reduction with mercaptoethylamine and is mixed with an equimolar amount of the other Fab′-TNB derivative to form the bispecific antibody. The bispecific antibodies produced can be used as agents for the selective immobilization of enzymes.

[0264] Recent progress has facilitated the direct recovery of Fab′-SH fragments from E. coli, which can be chemically coupled to form bispecific antibodies. Shalaby et al., J. Exp. Med. 175: 217-225 (1992) describe the production of a fully humanized bispecific antibody F(ab′)₂ molecule. Each Fab′ fragment was separately secreted from E. coli and subjected to directed chemical coupling in vitro to form the bispecific antibody. The bispecific antibody thus formed was able to bind to cells overexpressing the ErbB2 receptor and normal human T cells, as well as trigger the lytic activity of human cytotoxic lymphocytes against human breast tumor targets. Various techniques for making and isolating bispecific antibody fragments directly from recombinant cell culture have also been described. For example, bispecific antibodies have been produced using leucine zippers. Kostelny et al., J. Immunol. 148(5):1547-1553 (1992). The leucine zipper peptides from the Fos and Jun proteins were linked to the Fab′ portions of two different antibodies by gene fusion. The antibody homodimers were reduced at the hinge region to form monomers and then re-oxidized to form the antibody heterodimers. This method can also be utilized for the production of antibody homodimers. The “diabody” technology described by Hollinger et al., Proc. Natl. Acad. Sci. USA 90:6444-6448 (1993) has provided an alternative mechanism for making bispecific antibody fragments. The fragments comprise a V.sub.H connected to a V.sub.L by a linker which is too short to allow pairing between the two domains on the same chain. Accordingly, the V.sub.H and V.sub.L domains of one fragment are forced to pair with the complementary V.sub.L and V.sub.H domains of another fragment, thereby forming two antigen-binding sites. Another strategy for making bispecific antibody fragments by the use of single-chain Fv (sFv) dimers has also been reported. See Gruber et al., J. Immunol., 152:5368 (1994).

[0265] Antibodies with more than two valencies are contemplated. For example, trispecific antibodies can be prepared. Tutt et al., J. Immunol. 147:60 (1991).

[0266] 6. Heteroconjugate Antibodies

[0267] Heteroconjugate antibodies are also within the scope of the present invention. Heteroconjugate antibodies are composed of two covalently joined antibodies. Such antibodies have, for example, been proposed to target immune system cells to unwanted cells [U.S. Pat. No. 4,676,980], and for treatment of HIV infection [WO 91/00360; WO 92/200373; EP 03089]. It is contemplated that the antibodies may be prepared in vitro using known methods in synthetic protein chemistry, including those involving crosslinking agents. For example, immunotoxins may be constructed using a disulfide exchange reaction or by forming a thioether bond. Examples of suitable reagents for this purpose include iminothiolate and methyl-4-mercaptobutyrimidate and those disclosed, for example, in U.S. Pat. No. 4,676,980.

[0268] 7. Multivalent Antibodies

[0269] A multivalent antibody may be internalized (and/or catabolized) faster than a bivalent antibody by a cell expressing an antigen to which the antibodies bind. The antibodies of the present invention can be multivalent antibodies (which are other than of the IgM class) with three or more antigen binding sites (e.g. tetravalent antibodies), which can be readily produced by recombinant expression of nucleic acid encoding the polypeptide chains of the antibody. The multivalent antibody can comprise a dimerization domain and three or more antigen binding sites. The preferred dimerization domain comprises (or consists of) an Fc region or a hinge region. In this scenario, the antibody will comprise an Fc region and three or more antigen binding sites amino-terminal to the Fc region. The preferred multivalent antibody herein comprises (or consists of) three to about eight, but preferably four, antigen binding sites. The multivalent antibody comprises at least one polypeptide chain (and preferably two polypeptide chains), wherein the polypeptide chain(s) comprise two or more variable domains. For instance, the polypeptide chain(s) may comprise VD1-(X1).sub.n-VD2-(X2).sub.n-Fc, wherein VD1 is a first variable domain, VD2 is a second variable domain, Fc is one polypeptide chain of an Fc region, X1 and X2 represent an amino acid or polypeptide, and n is 0 or 1. For instance, the polypeptide chain(s) may comprise: VH-CH1-flexible linker-VH-CH1-Fc region chain; or VH-CH1-VH-CH1-Fc region chain. The multivalent antibody herein preferably further comprises at least two (and preferably four) light chain variable domain polypeptides. The multivalent antibody herein may, for instance, comprise from about two to about eight light chain variable domain polypeptides. The light chain variable domain polypeptides contemplated here comprise a light chain variable domain and, optionally, further comprise a CL domain.

[0270] 8. Effector Function Engineering

[0271] It may be desirable to modify the antibody of the invention with respect to effector function, e.g., so as to enhance antigen-dependent cell-mediated cyotoxicity (ADCC) and/or complement dependent cytotoxicity (CDC) of the antibody. This may be achieved by introducing one or more amino acid substitutions in an Fc region of the antibody. Alternatively or additionally, cysteine residue(s) may be introduced in the Fc region, thereby allowing interchain disulfide bond formation in this region. The homodimeric antibody thus generated may have improved internalization capability and/or increased complement-mediated cell killing and antibody-dependent cellular cytotoxicity (ADCC). See Caron et al., J. Exp Med. 176:1191-1195 (1992) and Shopes, B. J. Immunol. 148:2918-2922 (1992). Homodimeric antibodies with enhanced anti-tumor activity may also be prepared using heterobifunctional cross-linkers as described in Wolff et al., Cancer Research 53:2560-2565 (1993). Alternatively, an antibody can be engineered which has dual Fc regions and may thereby have enhanced complement lysis and ADCC capabilities. See Stevenson et al., Anti-Cancer Drug Design 3:219-230 (1989). To increase the serum half life of the antibody, one may incorporate a salvage receptor binding epitope into the antibody (especially an antibody fragment) as described in U.S. Pat. No. 5,739,277, for example. As used herein, the term “salvage receptor binding epitope” refers to an epitope of the Fc region of an IgG molecule (e.g., IgG.sub.1, IgG₂, IgG.sub.3, or IgG.sub.4) that is responsible for increasing the in vivo serum half-life of the IgG molecule.

[0272] 9. Immunoconjugate

[0273] The invention also pertains to immunoconjugates comprising an antibody conjugated to a cytotoxic agent such as a chemotherapeutic agent, a growth inhibitory agent, a toxin (e.g., an enzymatically active toxin of bacterial, fungal, plant, or animal origin, or fragments thereof), or a radioactive isotope (i.e., a radioconjugate).

[0274] Chemotherapeutic agents useful in the generation of such immunoconjugates have been described above. Enzymatically active toxins and fragments thereof that can be used include diphtheria A chain, nonbinding active fragments of diphtheria toxin, exotoxin A chain (from Pseudomonas aeruginosa), ricin A chain, abrin A chain, modeccin A chain, alpha-sarcin, Aleurites fordii proteins, dianthin proteins, Phytolaca americana proteins (PAPI, PAPII, and PAP-S), momordica charantia inhibitor, curcin, crotin, sapaonaria officinalis inhibitor, gelonin, mitogellin, restrictocin, phenomycin, enomycin, and the tricothecenes. A variety of radionuclides are available for the production of radioconjugated antibodies. Examples include ²12Bi, ¹³¹I, ¹³¹In, ⁹⁰Y, and ¹⁸⁶Re. Conjugates of the antibody and cytotoxic agent are made using a variety of bifunctional protein-coupling agents such as N-succinimidyl-3-(2-pyridyldithiol)propionate (SPDP), iminothiolane (IT), bifunctional derivatives of imidoesters (such as dimethyl adipimidate HCL), active esters (such as disuccinimidyl suberate), aldehydes (such as glutareldehyde), bis-azido compounds (such as bis(p-azidobenzoyl)hexanediamine), bis-diazonium derivatives (such as bis-(p-diazoniumbenzoyl)-ethylenediamine), diisocyanates (such as tolyene 2,6-diisocyanate), and bis-active fluorine compounds (such as 1,5-difluoro-2,4-dinitrobenzene). For example, a ricin immunotoxin can be prepared as described in Vitetta et al., Science, 238: 1098 (1987). Carbon-14-labeled 1-isothiocyanatobenzyl-3-methyidiethylene triaminepentaacetic acid (MX-DTPA) is an exemplary chelating agent for conjugation of radionucleotide to the antibody. See WO94/11026.

[0275] Conjugates of an antibody and one or more small molecule toxins, such as a calicheamicin, maytansinoids, a trichothene, and CC1065, and the derivatives of these toxins that have toxin activity, are also contemplated herein.

[0276] 10. Immunoliposomes

[0277] The antibodies disclosed herein may also be formulated as immunoliposomes. A “liposome” is a small vesicle composed of various types of lipids, phospholipids and/or surfactant which is useful for delivery of a drug to a mammal. The components of the liposome are commonly arranged in a bilayer formation, similar to the lipid arrangement of biological membranes. Liposomes containing the antibody are prepared by methods known in the art, such as described in Epstein et al., Proc. Natl. Acad. Sci. USA 82:3688 (1985); Hwang et al., Proc. Natl. Acad. Sci. USA 77:4030 (1980); U.S. Pat. Nos. 4,485,045 and 4,544,545; and WO97/38731 published Oct. 23, 1997. Liposomes with enhanced circulation time are disclosed in U.S. Pat. No. 5,013,556.

[0278] Particularly useful liposomes can be generated by the reverse phase evaporation method with a lipid composition comprising phosphatidylcholine, cholesterol and PEG-derivatized phosphatidylethanolamine (PEG-PE). Liposomes are extruded through filters of defined pore size to yield liposomes with the desired diameter. Fab′ fragments of the antibody of the present invention can be conjugated to the liposomes as described in Martin et al., J. Biol. Chem. 257:286-288 (1982) via a disulfide interchange reaction. A chemotherapeutic agent is optionally contained within the liposome. See Gabizon et al., J. National Cancer Inst. 81(19):1484 (1989).

[0279] In another embodiment, the invention provides oligopeptides which bind, preferably specifically, to any of the tissue-derived glycoproteins, glycopeptide or glycosites described herein. Optionally, the oligopeptides of the present invention may be conjugated to a growth inhibitory agent or cytotoxic agent such as a toxin, including, for example, a maytansinoid or calicheamicin, an antibiotic, a radioactive isotope, a nucleolytic enzyme, or the like. The oligopeptides of the present invention may optionally be produced in CHO cells or bacterial cells and preferably induce death of a cell to which they bind. For diagnostic purposes, the binding oligopeptides of the present invention may be detectably labeled, attached to a solid support, or the like.

[0280] Binding oligopeptides of the present invention are oligopeptides that bind, preferably specifically, to tissue-derived glycoproteins or glycosites and serum glycoproteins thereof as described herein (see Table 1). Binding oligopeptides may be chemically synthesized using known oligopeptide synthesis methodology or may be prepared and purified using recombinant technology. Binding oligopeptides are usually at least about 5 amino acids in length, alternatively at least about 6, 7, 8, 9, 10, 11, 12, 13, 14, 15, 16, 17, 18, 19, 20, 21, 22, 23, 24, 25, 26, 27, 28, 29, 30, 31, 32, 33, 34, 35, 36, 37, 38, 39, 40, 41, 42, 43, 44, 45, 46, 47, 48, 49, 50, 51, 52, 53, 54, 55, 56, 57, 58, 59, 60, 61, 62, 63, 64, 65, 66, 67, 68, 69, 70, 71, 72, 73, 74, 75, 76, 77, 78, 79, 80, 81, 82, 83, 84, 85, 86, 87, 88, 89, 90, 91, 92, 93, 94, 95, 96, 97, 98, 99, or 100 amino acids in length or more, wherein such oligopeptides that are capable of binding, preferably specifically, to glycopolypeptide or glycosite as described herein. Binding oligopeptides may be identified without undue experimentation using well known techniques. In this regard, it is noted that techniques for screening oligopeptide libraries for oligopeptides that are capable of specifically binding to a polypeptide target are well known in the art (see, e.g., U.S. Pat. Nos. 5,556,762, 5,750,373, 4,708,871, 4,833,092, 5,223,409, 5,403,484, 5,571,689, 5,663,143; PCT Publication Nos. WO 84/03506 and WO084/03564; Geysen et al., Proc. Natl. Acad. Sci. U.S.A., 81:3998-4002 (1984); Geysen et al., Proc. Natl. Acad. Sci. U.S.A., 82:178-182 (1985); Geysen et al., in Synthetic Peptides as Antigens, 130-149 (1986); Geysen et al., J. Immunol. Meth., 102:259-274 (1987); Schoofs et al., J. Immunol., 140:611-616 (1988), Cwirla, S. E. et al. (1990) Proc. Natl. Acad. Sci. USA, 87:6378; Lowman, H. B. et al. (1991) Biochemistry, 30:10832; Clackson, T. et al. (1991) Nature, 352: 624; Marks, J. D. et al. (1991), J. Mol. Biol., 222:581; Kang, A. S. et al. (1991) Proc. Natl. Acad. Sci. USA, 88:8363, and Smith, G. P. (1991) Current Opin. Biotechnol., 2:668).

[0281] In this regard, bacteriophage (phage) display is one well known technique which allows one to screen large oligopeptide libraries to identify member(s) of those libraries which are capable of specifically binding to a polypeptide target. Phage display is a technique by which variant polypeptides are displayed as fusion proteins to the coat protein on the surface of bacteriophage particles (Scott, J. K. and Smith, G. P. (1990) Science 249: 386). The utility of phage display lies in the fact that large libraries of selectively randomized protein variants (or randomly cloned cDNAs) can be rapidly and efficiently sorted for those sequences that bind to a target molecule with high affinity. Display of peptide (Cwirla, S. E. et al. (1990) Proc. Natl. Acad. Sci. USA, 87:6378) or protein (Lowman, H. B. et al. (1991) Biochemistry, 30:10832; Clackson, T. et al. (1991) Nature, 352: 624; Marks, J. D. et al. (1991), J. Mol. Biol., 222:581; Kang, A. S. et al. (1991) Proc. Natl. Acad. Sci. USA, 88:8363) libraries on phage have been used for screening millions of polypeptides or oligopeptides for ones with specific binding properties (Smith, G. P. (1991) Current Opin. Biotechnol., 2:668). Sorting phage libraries of random mutants requires a strategy for constructing and propagating a large number of variants, a procedure for affinity purification using the target receptor, and a means of evaluating the results of binding enrichments. U.S. Pat. Nos. 5,223,409, 5,403,484, 5,571,689, and 5,663,143.

[0282] Although most phage display methods have used filamentous phage, lambdoid phage display systems (WO95/34683; U.S. Pat. No. 5,627,024), T4 phagedisplay systems (Ren, Z-J. et al. (1998) Gene 215:439; Zhu, Z. (1997) CAN 33:534; Jiang, J. et al. (1997) can 128:44380; Ren, Z-J. et al. (1997) CAN 127:215644; Ren, Z-J. (1996) Protein Sci. 5:1833; Efimov, V. P. et al. (1995) Virus Genes 10:173) and T7 phage display systems (Smith, G. P. and Scott, J. K. (1993) Methods in Enzymology, 217, 228-257; U.S. Pat. No. 5,766,905) are also known.

[0283] Many other improvements and variations of the basic phage display concept have now been developed. These improvements enhance the ability of display systems to screen peptide libraries for binding to selected target molecules and to display functional proteins with the potential of screening these proteins for desired properties. Combinatorial reaction devices for phage display reactions have been developed (WO 98/14277) and phage display libraries have been used to analyze and control bimolecular interactions (WO 98/20169; WO 98/20159) and properties of constrained helical peptides (WO 98/20036). WO 97/35196 describes a method of isolating an affinity ligand in which a phage display library is contacted with one solution in which the ligand will bind to a target molecule and a second solution in which the affinity ligand will not bind to the target molecule, to selectively isolate binding ligands. WO 97/46251 describes a method of biopanning a random phage display library with an affinity purified antibody and then isolating binding phage, followed by a micropanning process using microplate wells to isolate high affinity binding phage. The use of Staphlylococcus aureus protein A as an affinity tag has also been reported (Li et al. (1998) Mol Biotech., 9:187). WO 97/47314 describes the use of substrate subtraction libraries to distinguish enzyme specificities using a combinatorial library which may be a phage display library. A method for selecting enzymes suitable for use in detergents using phage display is described in WO 97/09446. Additional methods of selecting specific binding proteins are described in U.S. Pat. Nos. 5,498,538, 5,432,018, and WO 98/15833.

[0284] Methods of generating peptide libraries and screening these libraries are also disclosed in U.S. Pat. Nos. 5,723,286, 5,432,018, 5,580,717, 5,427,908, 5,498,530, 5,770,434, 5,734,018, 5,698,426, 5,763,192, and 5,723,323.

[0285] In other embodiments of the present invention, the invention provides vectors comprising DNA encoding any of the herein described oligopeptides. Host cell comprising any such vector are also provided. By way of example, the host cells may be CHO cells, E. coli cells, or yeast cells. A process for producing any of the herein described oligopeptides is further provided and comprises culturing host cells under conditions suitable for expression of the desired oligopeptide and recovering the desired oligopeptide from the cell culture.

[0286] In another embodiment, the invention provides small organic molecules which bind, preferably specifically, to any of the glycoproteins or glycosites described herein and listed in Table 1. Optionally, the organic molecules of the present invention may be conjugated to a growth inhibitory agent or cytotoxic agent such as a toxin, including, for example, a maytansinoid or calicheamicin, an antibiotic, a radioactive isotope, a nucleolytic enzyme, or the like. The binding organic molecules of the present invention preferably induce death of a cell to which they bind. For diagnostic purposes, the binding organic molecules of the present invention may be detectably labeled, attached to a solid support, or the like.

[0287] Binding organic molecules of the present invention are organic molecules other than oligopeptides or antibodies as defined herein that bind, preferably specifically, to any of the tissue-derived and tissue-derived serum glycoproteins or glycosites described herein and listed in Table 1. Binding organic molecules may be identified and chemically synthesized using known methodology (see, e.g., PCT Publication Nos. WO00/00823 and WO00/39585). Binding organic molecules are usually less than about 2000 daltons in size, alternatively less than about 1500, 750, 500, 250 or 200 daltons in size, wherein such organic molecules that are capable of binding, preferably specifically, to a glycoprotein or glycosites as described herein may be identified without undue experimentation using well known techniques. In this regard, it is noted that techniques for screening organic molecule libraries for molecules that are capable of binding to a polypeptide target are well known in the art (see, e.g., PCT Publication Nos. WO00/00823 and WO00/39585). Binding organic molecules may be, for example, aldehydes, ketones, oximes, hydrazones, semicarbazones, carbazides, primary amines, secondary amines, tertiary amines, N-substituted hydrazines, hydrazides, alcohols, ethers, thiols, thioethers, disulfides, carboxylic acids, esters, amides, ureas, carbamates, carbonates, ketals, thioketals, acetals, thioacetals, aryl halides, aryl sulfonates, alkyl halides, alkyl sulfonates, aromatic compounds, heterocyclic compounds, anilines, alkenes, alkynes, diols, amino alcohols, oxazolidines, oxazolines, thiazolidines, thiazolines, enamines, sulfonamides, epoxides, aziridines, isocyanates, sulfonyl chlorides, diazo compounds, acid chlorides, or the like.

Nucleic Acid Analysis

[0288] As would be recognized by the skilled artisan, the level of a particular glycoprotein can also be determed by detecting the level of expression of the polynucleotide encoding the glycoprotein. Illustrative glycoproteins and glycosites of the invention are set forth in Table 1 and SEQ ID NOs:1-11,375; illustrative polynucleotides encoding these glycoproteins are set forth in Table 1 and SEQ ID NOs:11,376-14,917. Note that the sequences set forth in the sequence listing are identified by mapping the identified glycosite sequence to public sequence databases available as of the time of filing. As the skilled artisan would immediately recognize, the disclosed glycoprotein sequences and the corresponding polynucleotide sequences represent the mapped sequences available in the public databases at the time of mapping and these sequences may change slightly over time as sequences in the databases are corrected/updated. Accordingly, as would be recognized by the skilled artisan, updated/corrected sequences are also contemplated for use herein. Further, isoforms and variants of the disclosed sequences are also contemplated for use in the diagnostic/prognostic panels and methods of the present invention.

[0289] Accordingly, in one embodiment of the present invention, the invention provides an isolated nucleic acid molecule having a nucleotide sequence that encodes a tissue-derived target glycopolypeptide or fragment thereof.

[0290] In certain aspects, the isolated nucleic acid molecule comprises a nucleotide sequence having at least about 80% nucleic acid sequence identity, alternatively at least about 81%, 82%, 83%, 84%, 85%, 86%, 87%, 88%, 89%, 90%, 91%, 92%, 93%, 94%, 95%, 96%, 97%, 98%, 99% or 100% nucleic acid sequence identity, to (a) a polynucleotide molecule encoding a full-length tissue-derived glycopolypeptide having an amino acid sequence as disclosed herein, a tissue-derived glycopolypeptide amino acid sequence lacking the signal peptide as disclosed herein, an extracellular domain of a transmembrane tissue-derived polypeptide, with or without the signal peptide, as disclosed herein or any other specifically defined fragment of a full-length tissue-derived glycoprotein amino acid sequence as disclosed herein, or (b) the complement of the polynucleotide molecule of (a).

[0291] In other aspects, the isolated nucleic acid molecule comprises a nucleotide sequence having at least about 80% nucleic acid sequence identity, alternatively at least about 81%, 82%, 83%, 84%, 85%, 86%, 87%, 88%, 89%, 90%, 91%, 92%, 93%, 94%, 95%, 96%, 97%, 98%, 99% or 100% nucleic acid sequence identity, to (a) a polynucleotide molecule comprising the coding sequence of a full-length tissue-derived glycoprotein cDNA as disclosed herein, the coding sequence of a tissue-derived glycoprotein lacking the signal peptide as disclosed herein, the coding sequence of an extracellular domain of a transmembrane tissue-derived glycoprotein, with or without the signal peptide, as disclosed herein or the coding sequence of any other specifically defined fragment of the full-length tissue-derived glycoprotein amino acid sequence as disclosed herein, or (b) the complement of the polynucleotide molecule of (a).

[0292] In further aspects, the invention concerns an isolated nucleic acid molecule comprising a nucleotide sequence having at least about 80% nucleic acid sequence identity, alternatively at least about 81%, 82%, 83%, 84%, 85%, 86%, 87%, 88%, 89%, 90%, 91%, 92%, 93%, 94%, 95%, 96%, 97%, 98%, 99% or 100% nucleic acid sequence identity, to (a) a nucleic acid molecule that encodes the same mature polypeptide encoded by the full-length coding region of any of the human protein cDNAs as disclosed herein, or (b) the complement of the nucleic acid molecule of (a).

[0293] In other aspects, the present invention is directed to isolated nucleic acid molecules which hybridize to (a) a nucleotide sequence encoding a tissue-derived glycoprotein having a full-length amino acid sequence as disclosed herein or any other specifically defined fragment of a full-length tissue-derived glycoprotein amino acid sequence as disclosed herein, or (b) the complement of the nucleotide sequence of (a). In this regard, an embodiment of the present invention is directed to fragments of a full-length tissue-derived glycoprotein coding sequence, or the complement thereof, as disclosed herein, that may find use as, for example, hybridization probes useful as, for example, diagnostic probes, antisense oligonucleotide probes, or for encoding fragments of a full-length tissue-derived glycoprotein that may optionally encode a polypeptide comprising a binding site for an anti-tissue-derived glycoprotein antibody, a tissue-derived glycoprotein binding oligopeptide or other small organic molecule that binds to a tissue-derived glycoprotein. Illustrative fragments include the glycosites as listed in Table 1. Such nucleic acid fragments are usually at least about 5 nucleotides in length, alternatively at least about 6, 7, 8, 9, 10, 11, 12, 13, 14, 15, 16, 17, 18, 19, 20, 21, 22, 23, 24, 25, 26, 27, 28, 29, 30, 35, 40, 45, 50, 55, 60, 65, 70, 75, 80, 85, 90, 95, 100, 105, 110, 115, 120, 125, 130, 135, 140, 145, 150, 155, 160, 165, 170, 175, 180, 185, 190, 195, 200, 210, 220, 230, 240, 250, 260, 270, 280, 290, 300, 310, 320, 330, 340, 350, 360, 370, 380, 390, 400, 410, 420, 430, 440, 450, 460, 470, 480, 490, 500, 510, 520, 530, 540, 550, 560, 570, 580, 590, 600, 610, 620, 630, 640, 650, 660, 670, 680, 690, 700, 710, 720, 730, 740, 750, 760, 770, 780, 790, 800, 810, 820, 830, 840, 850, 860, 870, 880, 890, 900, 910, 920, 930, 940, 950, 960, 970, 980, 990, or 1000 nucleotides in length, wherein in this context the term “about” means the referenced nucleotide sequence length plus or minus 10% of that referenced length. It is noted that novel fragments of a tissue-derived glycoprotein-encoding nucleotide sequence may be determined in a routine manner by aligning the tissue-derived glycoprotein-encoding nucleotide sequence with other known nucleotide sequences using any of a number of well known sequence alignment programs and determining which tissue-derived glycoprotein-encoding nucleotide sequence fragment(s) are novel. All of such novel fragments of tissue-derived glycoprotein-encoding nucleotide sequences are contemplated herein. Also contemplated are the tissue-derived glycoprotein fragments encoded by these nucleotide molecule fragments, preferably those tissue-derived glycoprotein fragments that comprise a binding site for an anti-tissue-derived antibody, a tissue-derived binding oligopeptide or other small organic molecule that binds to a tissue-derived glycoprotein or glycosite.

[0294] Thus, in addition to detection of glycoproteins that are tissue-derived either in blood, tissue sample or biological fluid, nucleic acid detection techniques offer additional advantages due to sensitivity of detection. RNA can be collected and/or generated from blood, biological fluids, tissues, organs, cell lines, or other relevant sample using techniques known in the art, such as those described in Kingston. (2002 Current Protocols in Molecular Biology, Greene Publ. Assoc. Inc. & John Wiley & Sons, Inc., NY, N.Y. (see, e.g., as described by Nelson et al. Proc Natl Acad Sci USA, 99:11890-11895, 2002) and elsewhere. Further, a variety of commercially available kits for constructing RNA are useful for making the RNA to be used in the present invention. RNA is constructed from organs/tissues/cells procured from normal healthy subjects; however, this invention contemplates construction of RNA from diseased subjects. This invention contemplates using any type of tissue from any type of subject or animal. For test samples RNA may be procured from an individual (e.g., any animal, including mammals) with or without visible disease and from tissue samples, biological fluids (e.g., whole blood) or the like. In some embodiments amplification or construction of cDNA sequences may be helpful to increase detection capabilities. The present invention, as well as the art, provides the requisite level of detail to perform such tasks. In one aspect of the present invention, whole blood is used as the source of RNA and accordingly, RNA stabilizing regeants are optionally used, such as PAX tubes, as described in Thach et al., J. Immunol. Methods. December 283(1-2):269-279, 2003 and Chai et al., J. Clin. Lab Anal. 19(5):182-188, 2005 (both of which are incorporated herein by reference in their entirety).

[0295] Complementary DNA (cDNA) libraries can be generated using techniques known in the art, such as those described in Ausubel et al. (2001 Current Protocols in Molecular Biology, Greene Publ. Assoc. Inc. & John Wiley & Sons, Inc., NY, N.Y.); Sambrook et al. (1989 Molecular Cloning, Second Ed., Cold Spring Harbor Laboratory, Plainview, N.Y.); Maniatis et al. (1982 Molecular Cloning, Cold Spring Harbor Laboratory, Plainview, N.Y.) and elsewhere. Further, a variety of commercially available kits for constructing cDNA libraries are useful for making the cDNA libraries of the present invention. Libraries are constructed from organs/tissues/cells procured from normal, healthy subjects.

Amplification or Nucleic Acid Amplification

[0296] By “amplification” or “nucleic acid amplification” is meant production of multiple copies of a target nucleic acid that contains at least a portion of the intended specific target nucleic acid sequence. The multiple copies may be referred to as amplicons or amplification products. In certain embodiments, the amplified target contains less than the complete target gene sequence (introns and exons) or an expressed target gene sequence (spliced transcript of exons and flanking untranslated sequences). For example, specific amplicons may be produced by amplifying a portion of the target polynucleotide by using amplification primers that hybridize to, and initiate polymerization from, internal positions of the target polynucleotide. Preferably, the amplified portion contains a detectable target sequence that may be detected using any of a variety of well-known methods.

[0297] Many well-known methods of nucleic acid amplification require thermocycling to alternately denature double-stranded nucleic acids and hybridize primers; however, other well-known methods of nucleic acid amplification are isothermal. The polymerase chain reaction (U.S. Pat. Nos. 4,683,195; 4,683,202; 4,800,159; 4,965,188), commonly referred to as PCR, uses multiple cycles of denaturation, annealing of primer pairs to opposite strands, and primer extension to exponentially increase copy numbers of the target sequence. In a variation called RT-PCR, reverse transcriptase (RT) is used to make a complementary DNA (cDNA) from mRNA, and the cDNA is then amplified by PCR to produce multiple copies of DNA. The ligase chain reaction (Weiss, R. 1991, Science 254: 1292), commonly referred to as LCR, uses two sets of complementary DNA oligonucleotides that hybridize to adjacent regions of the target nucleic acid. The DNA oligonucleotides are covalently linked by a DNA ligase in repeated cycles of thermal denaturation, hybridization and ligation to produce a detectable double-stranded ligated oligonucleotide product. Another method is strand displacement amplification (Walker, G. et al., 1992, Proc. Natl. Acad. Sci. USA 89:392-396; U.S. Pat. Nos. 5,270,184 and 5,455,166), commonly referred to as SDA, which uses cycles of annealing pairs of primer sequences to opposite strands of a target sequence, primer extension in the presence of a dNTPαS to produce a duplex hemiphosphorothioated primer extension product, endonuclease-mediated nicking of a hemimodified restriction endonuclease recognition site, and polymerase-mediated primer extension from the 3′ end of the nick to displace an existing strand and produce a strand for the next round of primer annealing, nicking and strand displacement, resulting in geometric amplification of product. Thermophilic SDA (tSDA) uses thermophilic endonucleases and polymerases at higher temperatures in essentially the same method (European Pat. No. 0 684 315). Other amplification methods include: nucleic acid sequence based amplification (U.S. Pat. No. 5,130,238), commonly referred to as NASBA; one that uses an RNA replicase to amplify the probe molecule itself (Lizardi, P. et al., 1988, BioTechnol. 6: 1197-1202), commonly referred to as Qβ replicase; a transcription based amplification method (Kwoh, D. et al., 1989, Proc. Natl. Acad. Sci. USA 86:1173-1177); self-sustained sequence replication (Guatelli, J. et al., 1990, Proc. Natl. Acad. Sci. USA 87: 1874-1878); and, transcription mediated amplification (U.S. Pat. Nos. 5,480,784 and 5,399,491), commonly referred to as TMA. For further discussion of known amplification methods see Persing, David H., 1993, “In Vitro Nucleic Acid Amplification Techniques” in Diagnostic Medical Microbiology: Principles and Applications (Persing et al., Eds.), pp. 51-87 (American Society for Microbiology, Washington, D.C.).

[0298] Other suitable amplification methods include transcription amplification (Kwoh et al., Proc. Natl. Acad. Sci. USA 86, 1173 (1989) and WO88/10315), self-sustained sequence replication (Guatelli et al., Proc. Nat. Acad. Sci. USA, 87, 1874 (1990) and WO90/06995), selective amplification of target polynucleotide sequences (U.S. Pat. No. 6,410,276), consensus sequence primed polymerase chain reaction (CP-PCR) (U.S. Pat. No. 4,437,975), arbitrarily primed polymerase chain reaction (AP-PCR) (U.S. Pat. Nos. 5,413,909, 5,861,245) nucleic acid based sequence amplification (NABSA), rolling circle amplification (RCA), multiple displacement amplification (MDA) (U.S. Pat. Nos. 6,124,120 and 6,323,009) and circle-to-circle amplification (C2CA) (Dahl et al. Proc. Natl. Acad. Sci 101:4548-4553 (2004). (See, U.S. Pat. Nos. 5,409,818, 5,554,517, and 6,063,603, each of which is incorporated herein by reference). Other amplification methods that may be used are described in, U.S. Pat. Nos. 5,242,794, 5,494,810, 5,409,818, 4,988,617, 6,063,603 and 5,554,517 and in U.S. Ser. No. 09/854,317, each of which is incorporated herein by reference.

[0299] Additional methods of sample preparation and techniques for reducing the complexity of a nucleic sample are described in Dong et al., Genome Research 11, 1418 (2001), in U.S. Pat. Nos. 6,361,947, 6,391,592 and U.S. Ser. Nos. 09/916,135, 09/920,491 (U.S. Patent Application Publication 20030096235), Ser. No. 09/910,292 (U.S. Patent Application Publication 20030082543), and Ser. No. 10/013,598.

[0300] In more particular embodiments, the amplification technique used in the methods of the present invention is a transcription-based amplification technique, such as TMA and NASBA.

[0301] Illustrative transcription-based amplification systems of the present invention include TMA, which employs an RNA polymerase to produce multiple RNA transcripts of a target region (U.S. Pat. Nos. 5,480,784 and 5,399,491). TMA uses a “promoter-primer” that hybridizes to a target nucleic acid in the presence of a reverse transcriptase and an RNA polymerase to form a double-stranded promoter from which the RNA polymerase produces RNA transcripts. These transcripts can become templates for further rounds of TMA in the presence of a second primer capable of hybridizing to the RNA transcripts. Unlike PCR, LCR or other methods that require heat denaturation, TMA is an isothermal method that uses an RNase H activity to digest the RNA strand of an RNA:DNA hybrid, thereby making the DNA strand available for hybridization with a primer or promoter-primer. Generally, the RNase H activity associated with the reverse transcriptase provided for amplification is used.

[0302] In an illustrative TMA method, one amplification primer is an oligonucleotide promoter-primer that comprises a promoter sequence which becomes functional when double-stranded, located 5′ of a target-binding sequence, which is capable of hybridizing to a binding site of a target RNA at a location 3′ to the sequence to be amplified. A promoter-primer may be referred to as a “T7-primer” when it is specific for T7 RNA polymerase recognition. Under certain circumstances, the 3′ end of a promoter-primer, or a subpopulation of such promoter-primers, may be modified to block or reduce primer extension. From an unmodified promoter-primer, reverse transcriptase creates a cDNA copy of the target RNA, while RNase H activity degrades the target RNA. A second amplification primer then binds to the cDNA. This primer may be referred to as a “non-T7 primer” to distinguish it from a “T7-primer”. From this second amplification primer, reverse transcriptase creates another DNA strand, resulting in a double-stranded DNA with a functional promoter at one end. When double-stranded, the promoter sequence is capable of binding an RNA polymerase to begin transcription of the target sequence to which the promoter-primer is hybridized. An RNA polymerase uses this promoter sequence to produce multiple RNA transcripts (i.e., amplicons), generally about 100 to 1,000 copies. Each newly-synthesized amplicon can anneal with the second amplification primer. Reverse transcriptase can then create a DNA copy, while the RNase H activity degrades the RNA of this RNA:DNA duplex. The promoter-primer can then bind to the newly synthesized DNA, allowing the reverse transcriptase to create a double-stranded DNA, from which the RNA polymerase produces multiple amplicons. Thus, a billion-fold isothermic amplification can be achieved using two amplification primers.

[0303] “Selective amplification”, as used herein, refers to the amplification of a target nucleic acid sequence according to the present invention wherein detectable amplification of the target sequence is substantially limited to amplification of target sequence contributed by a nucleic acid sample of interest that is being tested and is not contributed by target nucleic acid sequence contributed by some other sample source, e.g., contamination present in reagents used during amplification reactions or in the environment in which amplification reactions are performed.

[0304] By “amplification conditions” is meant conditions permitting nucleic acid amplification according to the present invention. Amplification conditions may, in some embodiments, be less stringent than “stringent hybridization conditions” as described herein. Oligonucleotides used in the amplification reactions of the present invention hybridize to their intended targets under amplification conditions, but may or may not hybridize under stringent hybridization conditions. On the other hand, detection probes of the present invention hybridize under stringent hybridization conditions. While the Examples section infra provides preferred amplification conditions for amplifying target nucleic acid sequences according to the present invention, other acceptable conditions to carry out nucleic acid amplifications according to the present invention could be easily ascertained by someone having ordinary skill in the art depending on the particular method of amplification employed.

Oligonucleotides & Primers for Amplification

[0305] As used herein, the term “oligonucleotide” or “oligo” or “oligomer” is intended to encompass a singular “oligonucleotide” as well as plural “oligonucleotides,” and refers to any polymer of two or more of nucleotides, nucleosides, nucleobases or related compounds used as a reagent in the amplification methods of the present invention, as well as subsequent detection methods. The oligonucleotide may be DNA and/or RNA and/or analogs thereof. The term oligonucleotide does not denote any particular function to the reagent, rather, it is used generically to cover all such reagents described herein. An oligonucleotide may serve various different functions, e.g., it may function as a primer if it is capable of hybridizing to a complementary strand and can further be extended in the presence of a nucleic acid polymerase, it may provide a promoter if it contains a sequence recognized by an RNA polymerase and allows for transcription, and it may function to prevent hybridization or impede primer extension if appropriately situated and/or modified. Specific oligonucleotides of the present invention are described in more detail below, but are directed to binding the tissue-derived transcript or the tissue-derived transcript encoding the sequences listed in the attached Table 1 or the appended sequence listing. As used herein, an oligonucleotide can be virtually any length, limited only by its specific function in the amplification reaction or in detecting an amplification product of the amplification reaction.

[0306] Oligonucleotides of a defined sequence and chemical structure may be produced by techniques known to those of ordinary skill in the art, such as by chemical or biochemical synthesis, and by in vitro or in vivo expression from recombinant nucleic acid molecules, e.g., bacterial or viral vectors. As intended by this disclosure, an oligonucleotide does not consist solely of wild-type chromosomal DNA or the in vivo transcription products thereof.

[0307] Oligonucleotides may be modified in any way, as long as a given modification is compatible with the desired function of a given oligonucleotide. One of ordinary skill in the art can easily determine whether a given modification is suitable or desired for any given oligonucleotide of the present invention. Modifications include base modifications, sugar modifications or backbone modifications. Base modifications include, but are not limited to the use of the following bases in addition to adenine, cytidine, guanosine, thymine and uracil: C-5 propyne, 2-amino adenine, 5-methyl cytidine, inosine, and dP and dK bases. The sugar groups of the nucleoside subunits may be ribose, deoxyribose and analogs thereof, including, for example, ribonucleosides having a 2′-O-methyl substitution to the ribofuranosyl moiety. See Becker et al., U.S. Pat. No. 6,130,038. Other sugar modifications include, but are not limited to 2′-amino, 2′-fluoro, (L)-alpha-threofuranosyl, and pentopuranosyl modifications. The nucleoside subunits may by joined by linkages such as phosphodiester linkages, modified linkages or by non-nucleotide moieties which do not prevent hybridization of the oligonucleotide to its complementary target nucleic acid sequence. Modified linkages include those linkages in which a standard phosphodiester linkage is replaced with a different linkage, such as a phosphorothioate linkage or a methylphosphonate linkage. The nucleobase subunits may be joined, for example, by replacing the natural deoxyribose phosphate backbone of DNA with a pseudo peptide backbone, such as a 2-aminoethylglycine backbone which couples the nucleobase subunits by means of a carboxymethyl linker to the central secondary amine. (DNA analogs having a pseudo peptide backbone are commonly referred to as “peptide nucleic acids” or “PNA” and are disclosed by Nielsen et al., “Peptide Nucleic Acids,” U.S. Pat. No. 5,539,082.) Other linkage modifications include, but are not limited to, morpholino bonds.

[0308] Non-limiting examples of oligonucleotides or oligomers contemplated by the present invention include nucleic acid analogs containing bicyclic and tricyclic nucleoside and nucleotide analogs (LNAs). See Imanishi et al., U.S. Pat. No. 6,268,490; and Wengel et al., U.S. Pat. No. 6,670,461.) Any nucleic acid analog is contemplated by the present invention provided the modified oligonucleotide can perform its intended function, e.g., hybridize to a target nucleic acid under stringent hybridization conditions or amplification conditions, or interact with a DNA or RNA polymerase, thereby initiating extension or transcription. In the case of detection probes, the modified oligonucleotides must also be capable of preferentially hybridizing to the target nucleic acid under stringent hybridization conditions.

[0309] While design and sequence of oligonucleotides for the present invention depend on their function as described below, several variables must generally be taken into account. Among the most critical are: length, melting temperature (Tm), specificity, complementarity with other oligonucleotides in the system, G/C content, polypyrimidine (T, C) or polypurine (A, G) stretches, and the 3′-end sequence. Controlling for these and other variables is a standard and well known aspect of oligonucleotide design, and various computer programs are readily available to screen large numbers of potential oligonucleotides for optimal ones.

[0310] The 3′-terminus of an oligonucleotide (or other nucleic acid) can be blocked in a variety of ways using a blocking moiety, as described below. A “blocked” oligonucleotide is not efficiently extended by the addition of nucleotides to its 3′-terminus, by a DNA- or RNA-dependent DNA polymerase, to produce a complementary strand of DNA. As such, a “blocked” oligonucleotide cannot be a “primer.”

[0311] As used in this disclosure, the phrase “an oligonucleotide having a nucleic acid sequence ‘comprising,’ ‘consisting of,’ or ‘consisting essentially of’ a sequence selected from” a group of specific sequences means that the oligonucleotide, as a basic and novel characteristic, is capable of stably hybridizing to a nucleic acid having the exact complement of one of the listed nucleic acid sequences of the group under stringent hybridization conditions. An exact complement includes the corresponding DNA or RNA sequence.

[0312] The phrase “an oligonucleotide substantially corresponding to a nucleic acid sequence” means that the referred to oligonucleotide is sufficiently similar to the reference nucleic acid sequence such that the oligonucleotide has similar hybridization properties to the reference nucleic acid sequence in that it would hybridize with the same target nucleic acid sequence under stringent hybridization conditions.

[0313] One skilled in the art will understand that “substantially corresponding” oligonucleotides of the invention can vary from the referred to sequence and still hybridize to the same target nucleic acid sequence. This variation from the nucleic acid may be stated in terms of a percentage of identical bases within the sequence or the percentage of perfectly complementary bases between the probe or primer and its target sequence. Thus, an oligonucleotide of the present invention substantially corresponds to a reference nucleic acid sequence if these percentages of base identity or complementarity are from 100% to about 80%. In certain embodiments, the percentage is from 100% to about 85%. In other embodiments, this percentage can be from 100% to about 90%; in further embodiments, this percentage is from 100% to about 95%. One skilled in the art will understand the various modifications to the hybridization/annealing conditions that might be required at various percentages of complementarity to allow hybridization to a specific target sequence without causing an unacceptable level of non-specific hybridization.

[0314] The term “mRNA” or sometimes refer by “mRNA transcripts” as used herein, include, but not limited to pre-mRNA transcript(s), transcript processing intermediates, mature mRNA(s) ready for translation and transcripts of the gene or genes, or nucleic acids derived from the mRNA transcript(s). Transcript processing may include splicing, editing and degradation. As used herein, a nucleic acid derived from an mRNA transcript refers to a nucleic acid for whose synthesis the mRNA transcript or a subsequence thereof has ultimately served as a template. Thus, a cDNA reverse transcribed from an mRNA, an RNA transcribed from that cDNA, a DNA amplified from the cDNA, an RNA transcribed from the amplified DNA, etc., are all derived from the mRNA transcript and detection of such derived products is indicative of the presence and/or abundance of the original transcript in a sample. Thus, mRNA derived samples include, but are not limited to, mRNA transcripts of the gene or genes, cDNA reverse transcribed from the mRNA, cRNA transcribed from the cDNA, DNA amplified from the genes, RNA transcribed from amplified DNA, and the like.

[0315] The term “nucleic acid library” or sometimes refer by “array” as used herein refers to an intentionally created collection of nucleic acids which can be prepared either synthetically or biosynthetically and screened for biological activity in a variety of different formats (for example, libraries of soluble molecules; and libraries of oligos tethered to resin beads, silica chips, or other solid supports). Additionally, the term “array” is meant to include those libraries of nucleic acids which can be prepared by spotting nucleic acids of essentially any length (for example, from 1 to about 1000 nucleotide monomers in length) onto a substrate. The term “nucleic acid” as used herein refers to a polymeric form of nucleotides of any length, either ribonucleotides, deoxyribonucleotides or peptide nucleic acids (PNAs), that comprise purine and pyrimidine bases, or other natural, chemically or biochemically modified, non-natural, or derivatized nucleotide bases. The backbone of the polynucleotide can comprise sugars and phosphate groups, as may typically be found in RNA or DNA, or modified or substituted sugar or phosphate groups. A polynucleotide may comprise modified nucleotides, such as methylated nucleotides and nucleotide analogs. The sequence of nucleotides may be interrupted by non-nucleotide components. Thus the terms nucleoside, nucleotide, deoxynucleoside and deoxynucleotide generally include analogs such as those described herein. These analogs are those molecules having some structural features in common with a naturally occurring nucleoside or nucleotide such that when incorporated into a nucleic acid or oligonucleoside sequence, they allow hybridization with a naturally occurring nucleic acid sequence in solution. Typically, these analogs are derived from naturally occurring nucleosides and nucleotides by replacing and/or modifying the base, the ribose or the phosphodiester moiety. The changes can be tailor made to stabilize or destabilize hybrid formation or enhance the specificity of hybridization with a complementary nucleic acid sequence as desired.

[0316] The term “nucleic acids” as used herein may include any polymer or oligomer of pyrimidine and purine bases, preferably cytosine, thymine, and uracil, and adenine and guanine, respectively. See Albert L. Lehninger, PRINCIPLES OF BIOCHEMISTRY, at 793-800 (Worth Pub. 1982). Indeed, the present invention contemplates any deoxyribonucleotide, ribonucleotide or peptide nucleic acid component, and any chemical variants thereof, such as methylated, hydroxymethylated or glucosylated forms of these bases, and the like. The polymers or oligomers may be heterogeneous or homogeneous in composition, and may be isolated from naturally-occurring sources or may be artificially or synthetically produced. In addition, the nucleic acids may be DNA or RNA, or a mixture thereof, and may exist permanently or transitionally in single-stranded or double-stranded form, including homoduplex, heteroduplex, and hybrid states.

[0317] When referring to arrays and microarrays the term “oligonucleotide” or sometimes refer by “polynucleotide” as used herein refers to a nucleic acid ranging from at least 2, preferable at least 8, and more preferably at least 20 nucleotides in length or a compound that specifically hybridizes to a polynucleotide. Polynucleotides of the present invention include sequences of deoxyribonucleic acid (DNA) or ribonucleic acid (RNA) which may be isolated from natural sources, recombinantly produced or artificially synthesized and mimetics thereof. A further example of a polynucleotide of the present invention may be peptide nucleic acid (PNA). The invention also encompasses situations in which there is a nontraditional base pairing such as Hoogsteen base pairing which has been identified in certain tRNA molecules and postulated to exist in a triple helix. “Polynucleotide” and “oligonucleotide” are used interchangeably in this application.

[0318] The term “primer” as used herein refers to a single-stranded oligonucleotide capable of acting as a point of initiation for template-directed DNA synthesis under suitable conditions for example, buffer and temperature, in the presence of four different nucleoside triphosphates and an agent for polymerization, such as, for example, DNA or RNA polymerase or reverse transcriptase. The length of the primer, in any given case, depends on, for example, the intended use of the primer, and generally ranges from 15 to 30 nucleotides. Short primer molecules generally require cooler temperatures to form sufficiently stable hybrid complexes with the template. A primer need not reflect the exact sequence of the template but must be sufficiently complementary to hybridize with such template. The primer site is the area of the template to which a primer hybridizes. The primer pair is a set of primers including a 5′ upstream primer that hybridizes with the 5′ end of the sequence to be amplified and a 3′ downstream primer that hybridizes with the complement of the 3′ end of the sequence to be amplified.

[0319] The term “probe” as used herein refers to a surface-immobilized molecule that can be recognized by a particular target. See U.S. Pat. No. 6,582,908 for an example of arrays having all possible combinations of probes with 10, 12, and more bases. Examples of probes that can be investigated by this invention include, but are not restricted to, agonists and antagonists for cell membrane receptors, toxins and venoms, viral epitopes, hormones (for example, opioid peptides, steroids, etc.), hormone receptors, peptides, enzymes, enzyme substrates, cofactors, drugs, lectins, sugars, oligonucleotides, nucleic acids, oligosaccharides, proteins, and monoclonal antibodies.

[0320] The present invention provides a diverse population of uniquely labeled probes in which a target specific nucleic acid contains a nucleic acid bound to a unique label. In addition, the invention provides a diverse population of uniquely labeled probes containing two attached populations of nucleic acids, one population of nucleic acids containing thirty or more target specific nucleic acid probes, and a second population of nucleic acids containing a nucleic acid bound by a unique label.

[0321] A target specific probe is intended to mean an agent that binds to the target analyte selectively. This agent will bind with preferential affinity toward the target while showing little to no detectable cross-reactivity toward other molecules.

[0322] The target analyte can be any type of macromolecule, including a nucleic acid, a protein or even a small molecule drug. For example, a target can be a nucleic acid that is recognized and bound specifically by a complementary nucleic acid including for example, an oligonucleotide or a PCR product, or a non-natural nucleic acid such as a locked nucleic acid (LNA) or a peptide nucleic acid (PNA). In addition, a target can be a peptide that is bound by a nucleic acid. For example, a DNA binding domain of a transcription factor can bind specifically to a particular nucleic acid sequence. Another example of a peptide that can be bound by a nucleic acid is a peptide that can be bound by an aptamer. Aptamers are nucleic acid sequences that have three dimensional structures capable of binding small molecular targets including metal ions, organic dyes, drugs, amino acids, co-factors, aminoglycosides, antibiotics, nucleotide base analogs, nucleotides and peptides (Jayasena, S. D., Clinical Chemistry 45:9, 1628-1650, (1999)) incorporated herein by reference. Further, a target can be a peptide that is bound by another peptide or an antibody or antibody fragment. The binding peptide or antibody can be linked to a nucleic acid, for example, by the use of known chemistries including chemical and UV cross-linking agents. In addition, a peptide can be linked to a nucleic acid through the use of an aptamer that specifically binds the peptide. Other nucleic acids can be directly attached to the aptamer or attached through the use of hybridization. A target molecule can even be a small molecule that can be bound by an aptamer or a peptide ligand binding domain.

[0323] The invention further provides a method for detecting a nucleic acid analyte, by contacting a mixture of nucleic acid analytes with a population of target specific probes each attached to a unique label under conditions sufficient for hybridization of the probes to the target and measuring the resulting signal from one or more of the target specific probes hybridized to an analyte where the signal uniquely identifies the analyte.

[0324] The nucleic acid analyte can contain any type of nucleic acid, including for example, an RNA population or a population of cDNA copies. The invention provides for at least one target specific probe for each analyte in a mixture. The invention also provides for a target specific probe that contains a nucleic acid bound to a unique label. Furthermore, the invention provides two attached populations of nucleic acids, one population of nucleic acids containing a plurality of target specific nucleic acid probes, and a second population of nucleic acids containing a nucleic acid bound by a unique label. When the target specific probes are attached to unique labels, this allows for the unique identification of the target analytes.

[0325] Methods for conducting polynucleotide hybridization assays have been well developed in the art. Hybridization assay procedures and conditions will vary depending on the application and are selected in accordance with the general binding methods known including those referred to in: Maniatis et al. Molecular Cloning: A Laboratory Manual (2nd Ed. Cold Spring Harbor, N.Y., 1989); Berger and Kimmel Methods in Enzymology, Vol. 152, Guide to Molecular Cloning Techniques (Academic Press, Inc., San Diego, Calif., 1987); Young and Davism, P.N.A.S, 80: 1194 (1983). Methods and apparatus for carrying out repeated and controlled hybridization reactions have been described in U.S. Pat. Nos. 5,871,928, 5,874,219, 6,045,996 and 6,386,749, 6,391,623 each of which are incorporated herein by reference

[0326] The present invention also contemplates signal detection of hybridization between ligands in certain preferred embodiments. See U.S. Pat. Nos. 5,143,854, 5,578,832; 5,631,734; 5,834,758; 5,936,324; 5,981,956; 6,025,601; 6,141,096; 6,185,030; 6,201,639; 6,218,803; and 6,225,625, in U.S. Ser. No. 10/389,194 and in PCT Application PCT/US99/06097 (published as WO99/47964), each of which also is hereby incorporated by reference in its entirety for all purposes.

[0327] Methods and apparatus for signal detection and processing of intensity data are disclosed in, for example, U.S. Pat. Nos. 5,143,854, 5,547,839, 5,578,832, 5,631,734, 5,800,992, 5,834,758; 5,856,092, 5,902,723, 5,936,324, 5,981,956, 6,025,601, 6,090,555, 6,141,096, 6,185,030, 6,201,639; 6,218,803; and 6,225,625, in U.S. Ser. Nos. 10/389,194, 60/493,495 and in PCT Application PCT/US99/06097 (published as WO99/47964), each of which also is hereby incorporated by reference in its entirety for all purposes.

[0328] The practice of the present invention may also employ conventional biology methods, software and systems. Computer software products of the invention typically include computer readable medium having computer-executable instructions for performing the logic steps of the method of the invention. Suitable computer readable medium include floppy disk, CD-ROM/DVD/DVD-ROM, hard-disk drive, flash memory, ROM/RAM, magnetic tapes and etc. The computer executable instructions may be written in a suitable computer language or combination of several languages. Basic computational biology methods are described in, for example Setubal and Meidanis et al., Introduction to Computational Biology Methods (PWS Publishing Company, Boston, 1997); Salzberg, Searles, Kasif, (Ed.), Computational Methods in Molecular Biology, (Elsevier, Amsterdam, 1998); Rashidi and Buehler, Bioinformatics Basics: Application in Biological Science and Medicine (CRC Press, London, 2000) and Ouelette and Bzevanis Bioinformatics: A Practical Guide for Analysis of Gene and Proteins (Wiley & Sons, Inc., 2nd ed., 2001). See U.S. Pat. No. 6,420,108.

[0329] The present invention may also make use of various computer program products and software for a variety of purposes, such as probe design, management of data, analysis, and instrument operation. See, U.S. Pat. Nos. 5,593,839, 5,795,716, 5,733,729, 5,974,164, 6,066,454, 6,090,555, 6,185,561, 6,188,783, 6,223,127, 6,229,911 and 6,308,170.

[0330] The whole genome sampling assay (WGSA) is described, for example in Kennedy et al., Nat. Biotech. 21, 1233-1237 (2003), Matsuzaki et al., Gen. Res. 14:414-425, (2004), and Matsuzaki, et al. Nature Methods 1:109-111 (2004). Algorithms for use with mapping assays are described, for example, in Liu et al., Bioinformatics 19: 2397-2403 (2003) and Di et al. Bioinformatics 21:1958 (2005). Additional methods related to WGSA and arrays useful for WGSA and applications of WGSA are disclosed, for example, in U.S. Patent Application Nos. 60/676,058 filed Apr. 29, 2005, 60/616,273 filed Oct. 5, 2004, Ser. Nos. 10/912,445, 11/044,831, 10/442,021, 10/650,332 and 10/463,991. Genome wide association studies using mapping assays are described in, for example, Hu et al., Cancer Res.; 65(7):2542-6 (2005), Mitra et al., Cancer Res., 64(21):8116-25 (2004), Butcher et al., Hum Mol Genet., 14(10):1315-25 (2005), and Klein et al., Science, 308(5720):385-9 (2005). Each of these references is incorporated herein by reference in its entirety for all purposes.

[0331] Additionally, the present invention may have preferred embodiments that include methods for providing genetic information over networks such as the Internet as shown in U.S. Ser. Nos. 10/197,621, 10/063,559 (United States Publication Number 20020183936), Ser. Nos. 10/065,856, 10/065,868, 10/328,818, 10/328,872, 10/423,403, and 60/482,389.

[0332] The term “array” as used herein refers to an intentionally created collection of molecules that can be prepared either synthetically or biosynthetically. The molecules in the array can be identical or different from each other. The array can assume a variety of formats, for example, libraries of soluble molecules; libraries of compounds tethered to resin beads, silica chips, or other solid supports.

Methods of Use

[0333] The present invention provides tissue-derived glycoprotein, glycosite and transcript sets and normal serum tissue-derived glycoprotein, glycosite and transcript sets, panels thereof, detection reagents and probes directed thereto and methods for using and identifying the same. The present invention further provides panels, arrays, mixtures, and kits comprising detection reagents or probes for detecting such glycoproteins, glycosites, or polynucleotides that encode them in blood, other bodily fluid, and tissue samples such as biopsy samples from diseased organs.

[0334] It should also be understood that the blood glycoprotein and transcript fingerprints constitute assays for the normal tissue and all the diseases of the tissue. Thus all different diseases affecting such tissues either directly or indirectly may be detected or monitored because each different type of disease arises from distinct disease-perturbed networks that change the levels of different combinations of glycoproteins whose synthesis they control. The present invention is not claiming disease-specific glycoproteins, rather the fingerprints report the tissue status for all different normal and disease tissue conditions. Thus, the diagnostic panels and generally, methods used for detecting normal serum tissue-derived glycoproteins, can be used to define/identify disease-associated tissue-derived serum glycoprotein fingerprints.

[0335] The present invention provides methods for identifying tissue- and plasma-derived glycosites and the glycoproteins containing those glycosites and methods for identifying tissue-derived serum glycoprotein fingerprints. The present invention further provides panels/arrays of detection reagents for detecting tissue-derived glycoproteins and glycosites and tissue-derived serum glycoprotein or glycosite sets thereof. The present invention also provides defined tissue-derived glycoprotein blood fingerprints for normal and disease settings. As such, the present invention provides methods of detecting and diagnosing diseases. The invention further provides methods for stratifying disease types and for monitoring the progression of a disease. The present invention also provides for following responses to therapy in a variety of disease settings and methods for detecting the disease state in humans using the visualization of nanoparticles with appropriate reporter groups, antibodies or aptamers.

[0336] The present invention can be used as a standard screening test. In this regard, one or more of the diagnostic/prognostic panels described herein can be run on an individual and any statistically significant deviation from a normal tissue-derived glycoprotein blood fingerprint would indicate that disease-related perturbation was present. Thus, the present invention provides a standard or “normal” blood fingerprint for any given tissue. In certain embodiments, a normal blood fingerprint is determined by measuring the normal range of levels of the individual protein members of a fingerprint. Any deviation therefrom or perturbation of the normal fingerprint that is outside the standard deviation (normal range) has diagnostic utility (see also U.S. Patent Application No. 0020095259). As would be recognized by the skilled artisan, the significance of any deviation in the levels of (e.g., a significantly altered level of one or more of) the individual protein members of a fingerprint can be determined using statistical methods known in the art and described herein. As noted elsewhere herein, perturbation of the normal fingerprint can indicate primary disease of the tissue being tested or secondary, indirect affects on that tissue resulting from disease of another tissue.

[0337] In an additional embodiment, the present invention can be used to determine distinct normal tissue-derived glycoprotein blood fingerprints, such as in different populations of people. In this regard, distinct normal patterns of tissue-derived glycoprotein blood fingerprints may have differences in populations of patients that permit one to stratify patients into classes that would respond to a particular therapeutic regimen and those which would not.

[0338] In a further embodiment, the present invention can be used to determine the risk of developing a particular biological condition. A statistically significant alteration (e.g., increase or decrease) in the levels of one or more members of a particular tissue-derived glycoprotein blood fingerprint may signify a risk of developing a particular disease, such as a cancer, an autoimmune disease, or other biological condition.

[0339] To monitor the progression of a disease, or monitor responses to therapy, one or more tissue-derived glycoprotein blood fingerprints are detected/measured as described herein using any of the methods as described herein at one time point and detected/measured again at subsequent time points, thereby monitoring disease progression or responses to therapy.

[0340] The present invention further provides methods of identifying new drug targets for a disease or indication by detecting specific up-regulation of a transcript or polypeptide in a diseased state. In addition, the present invention contemplates using such targets for imaging or drug targeting such that a probe to a disease specific glycoprotein or transcript may be utilized alone as a targeting agent or coupled to another therapeutic or diagnostic imaging agent.

[0341] The normal tissue-derived glycoprotein blood fingerprints of the present invention can be used as a baseline for detecting any of a variety of diseases (or the lack thereof). In certain embodiments, the tissue-derived glycoprotein blood fingerprints of the present invention can be used to detect cancer. As such, the present invention can be used to detect, monitor progression of, or monitor therapeutic regimens for any cancer, including melanoma, non-Hodgkin's lymphoma, Hodgkin's disease, leukemias, plasmocytomas, sarcomas, adenomas, gliomas, thymomas, breast cancer, prostate cancer, colo-rectal cancer, kidney cancer, renal cell carcinoma, uterine cancer, pancreatic cancer, esophageal cancer, brain cancer, lung cancer, ovarian cancer, cervical cancer, testicular cancer, gastric cancer, multiple myeloma, hepatoma, acute lymphoblastic leukemia (ALL), acute myelogenous leukemia (AML), chronic myelogenous leukemia (CML), and chronic lymphocytic leukemia (CLL), or other cancers.

[0342] In certain embodiments, the tissue-derived glycoprotein blood fingerprints of the present invention can be used to detect, to monitor progression of, or monitor therapeutic regimens for diseases of the heart, kidney, ureter, bladder, urethra, liver, prostate, heart, blood vessels, bone marrow, skeletal muscle, smooth muscle, various specific regions of the brain (including, but not limited to the amygdala, caudatenucleus, cerebellum, corpuscallosum, fetal, hypothalamus, thalamus), spinal cord, peripheral nerves, retina, nose, trachea, lungs, mouth, salivary gland, esophagus, stomach, small intestines, large intestines, hypothalamus, pituitary, thyroid, pancreas, adrenal glands, ovaries, oviducts, uterus, placenta, vagina, mammary glands, testes, seminal vesicles, penis, lymph nodes, thymus, and spleen. The present invention can be used to detect, to monitor progression of, or monitor therapeutic regimens for cardiovascular diseases, neurological diseases, metabolic diseases, respiratory diseases, autoimmune diseases. As would be recognized by the skilled artisan, the present invention can be used to detect, monitor the progression of, or monitor treatment for, virtually any disease wherein the disease causes perturbation in tissue-derived serum glycoproteins.

[0343] In certain embodiments, the tissue-derived glycoprotein blood fingerprints of the present invention can be used to detect autoimmune disease. As such, the present invention can be used to detect, monitor progression of, or monitor therapeutic regimens for autoimmune diseases such as, but not limited to, rheumatoid arthritis, multiple sclerosis, insulin dependent diabetes, Addison's disease, celiac disease, chronic fatigue syndrome, inflammatory bowel disease, ulcerative colitis, Crohn's disease, Fibromyalgia, systemic lupus erythematosus, psoriasis, Sjogren's syndrome, hyperthyroidism/Graves disease, hypothyroidism/Hashimoto's disease, Insulin-dependent diabetes (type 1), Myasthenia Gravis, endometriosis, scleroderma, pernicious anemia, Goodpasture syndrome, Wegener's disease, glomerulonephritis, aplastic anemia, paroxysmal nocturnal hemoglobinuria, myelodysplastic syndrome, idiopathic thrombocytopenic purpura, autoimmune hemolytic anemia, Evan's syndrome, Factor VIII inhibitor syndrome, systemic vasculitis, dermatomyositis, polymyositis and rheumatic fever.

[0344] In certain embodiments, the tissue-derived glycoprotein blood fingerprints of the present invention can be used to detect diseases associated with infections with any of a variety of infectious organisms, such as viruses, bacteria, parasites and fungi. Infectious organisms may comprise viruses, (e.g., RNA viruses, DNA viruses, human immunodeficiency virus (HIV), hepatitis A, B, and C virus, herpes simplex virus (HSV), cytomegalovirus (CMV) Epstein-Barr virus (EBV), human papilloma virus (HPV)), parasites (e.g., protozoan and metazoan pathogens such as Plasmodia species, Leishmania species, Schistosoma species, Trypanosoma species), bacteria (e.g., Mycobacteria, in particular, M. tuberculosis, Salmonella, Streptococci, E. coli, Staphylococci), fungi (e.g., Candida species, Aspergillus species), Pneumocystis carinii, and prions.

[0345] One of ordinary skill in the art could readily conclude that the present invention is useful in defining the normal parameters for any number of tissues in the body. To that end, the present invention may also be used to define subclinical perturbations from normal during annual screenings that could be utilized to initiate therapy or more aggressive examinations at an earlier date. Further, defining normal for two, three, or more related tissues can be accomplished by the present invention. Such groupings would be clear to those of skill in the art and could be any of a variety, include those related to cardiovascular health, including the heart, lungs, liver, etc. as well as looking at groupings of liver and blood for infectious and parasitic diseases such as malaria, HIV, and the like.

[0346] Using the diagnostic panels and methods described herein, a vast array of disease-associated blood fingerprints can be defined for any of a variety of diseases as described further herein. As such, the present invention further provides information databases comprising data that make up blood fingerprints as described herein. As such, the databases may comprise the defined differential expression levels as determined using any of a variety of methods such as those described herein, of each of the plurality of tissue-derived glycoproteins or glycosites that make up a given fingerprint in any of a variety of settings (e.g., normal or disease fingerprints).

[0347] In a still further embodiment, the invention concerns a composition of matter comprising a glycoprotein or glycosite as described herein and listed in the Tables herein, a chimeric glycoprotein or glycosite as described herein, an anti-tissue-derived and/or serum-derived glycoprotein or glycosite antibody as described herein, an oligopeptide as described herein, or an organic molecule as described herein, in combination with a carrier. Optionally, the carrier is a pharmaceutically acceptable carrier.

[0348] In yet another embodiment, the invention concerns an article of manufacture comprising a container and a composition of matter contained within the container, wherein the composition of matter may comprise a glycoprotein or glycosite as described herein such as those listed in Table 1, a chimeric tissue- and/or serum-derived glycoprotein or glycosite as described herein, an anti-tissue- and/or serum-derived glycoprotein or glycosite antibody as described herein, a tissue- and/or serum-derived glycoprotein or glycosite oligopeptide as described herein, or a tissue-and/or serum derived glycoprotein or glycosite binding organic molecule as described herein. The article may further optionally comprise a label affixed to the container, or a package insert included with the container, that refers to the use of the composition of matter for the therapeutic treatment or diagnostic detection of a tumor.

[0349] Another embodiment of the present invention is directed to the use of glycoprotein or glycosite as described herein, a chimeric glycoprotein or glycosite as described herein, an anti-glycoprotein or glycosite antibody as described herein, a glycoprotein or glycosite binding oligopeptide as described herein, or a glycoprotein or glycosite binding organic molecule as described herein, for the preparation of a medicament useful in the treatment of a condition which is responsive to the glycoprotein or glycosite, chimeric glycoprotein or glycosite, anti-glycoprotein or glycosite antibody, glycoprotein or glycosite binding oligopeptide, or glycoprotein or glycosite binding organic molecule.

[0350] Another embodiment of the present invention is directed to a method for inhibiting the growth of a cell that expresses a tissue-derived serum glycoprotein, wherein the method comprises contacting the cell with an antibody, an oligopeptide or a small organic molecule that binds to the tissue-derived serum glycoprotein, and wherein the binding of the antibody, oligopeptide or organic molecule to the tissue-derived serum glycoprotein causes inhibition of the growth of the cell expressing the tissue-derived serum glycoprotein. In preferred embodiments, the cell is a cancer cell or disease harboring cell and binding of the antibody, oligopeptide or organic molecule to the tissue-derived serum glycoprotein causes death of the cell expressing the tissue-derived serum glycoprotein. Optionally, the antibody is a monoclonal antibody, antibody fragment, chimeric antibody, humanized antibody, or single-chain antibody. Antibodies, tissue-derived serum glycoprotein binding oligopeptides and tissue-derived serum glycoprotein binding organic molecules employed in the methods of the present invention may optionally be conjugated to a growth inhibitory agent or cytotoxic agent such as a toxin, including, for example, a maytansinoid or calicheamicin, an antibiotic, a radioactive isotope, a nucleolytic enzyme, or the like. The antibodies and binding oligopeptides employed in the methods of the present invention may optionally be produced in CHO cells or bacterial cells.

[0351] Yet another embodiment of the present invention is directed to a method of therapeutically treating a mammal having cancerous cells or disease containing cells or tissues comprising cells that express a tissue-derived serum glycoprotein, wherein the method comprises administering to the mammal a therapeutically effective amount of an antibody, an oligopeptide or a small organic molecule that binds to the tissue-derived serum glycoprotein, thereby resulting in the effective therapeutic treatment of the tumor. Optionally, the antibody is a monoclonal antibody, antibody fragment, chimeric antibody, humanized antibody, or single-chain antibody. Antibodies, binding oligopeptides and binding organic molecules employed in the methods of the present invention may optionally be conjugated to a growth inhibitory agent or cytotoxic agent such as a toxin, including, for example, a maytansinoid or calicheamicin, an antibiotic, a radioactive isotope, a nucleolytic enzyme, or the like. The antibodies and oligopeptides employed in the methods of the present invention may optionally be produced in CHO cells or bacterial cells.

[0352] Yet another embodiment of the present invention is directed to a method of determining the presence of any 1, 2, 3, 4, 5, 6, 7, 8, 9, 10, 11, 12, 13, 14, 15, 16, 17, 18, 19, 20, 21, 22, 23, 24, 25, 26, 27, 28, 29, 30, 40, 50, 60, 70, 80, 90, 100, 200, 300, or more of the glycoproteins or glycosites described herein, such as those listed in Table 1, in a sample suspected of containing the glycoproteins or glycosites, wherein the method comprises exposing the sample to an antibody, oligopeptide or small organic molecule that binds to the glycoprotein or glycosite and determining binding of the antibody, oligopeptide or organic molecule to the glycoprotein or glycosite in the sample, wherein the presence of such binding is indicative of the presence of the glycoprotein or glycosite in the sample. Optionally, the sample may contain cells (which may be cancer cells) suspected of expressing the glycoprotein. The antibody, binding oligopeptide or binding organic molecule employed in the method may optionally be detectably labeled, attached to a solid support, or the like. As such, the present invention provides for a method of determining the presence of any of the glycoproteins or glycosites described herein in a sample suspected of containing the glycoproteins or glycosites, wherein the method comprises exposing the sample to a diagnostic/prognostic panel as described herein and determining binding of the detection reagents of the panel to the glycoprotein or glycosite in the sample, wherein the presence of such binding is indicative of the presence of the glycoprotein or glycosite in the sample.

[0353] A further embodiment of the present invention is directed to a method of diagnosing the presence of a tumor in a mammal, wherein the method comprises detecting the level of expression of a gene encoding a glycoprotein or glycosite as described herein (see e.g., Table 1) (a) in a test sample of tissue or cells obtained from said mammal, and (b) in a control sample of known normal non-cancerous cells of the same tissue origin or type, wherein a statistically significant higher or lower level of expression of the gene encoding a glycoprotein or glycosite in the test sample, as compared to the control sample, is indicative of the presence of tumor in the mammal from which the test sample was obtained. The method can be carried out using the diagnostic/prognostic panels as described herein.

[0354] Another embodiment of the present invention is directed to a method of diagnosing the presence of a tumor in a mammal, wherein the method comprises (a) contacting a test sample comprising tissue cells obtained from the mammal with an antibody, oligopeptide or small organic molecule that binds to a glycoprotein or glycosite as described herein and (b) detecting the formation of a complex between the antibody, oligopeptide or small organic molecule and the glycoprotein or glycosite in the test sample, wherein the formation of a complex is indicative of the presence of a tumor in the mammal. Optionally, the antibody, binding oligopeptide or binding organic molecule employed is detectably labeled, attached to a solid support, or the like, and/or the test sample of tissue cells is obtained from an individual suspected of having a cancerous tumor. As such, in certain embodiments, the diagnostic/prognostic panels as described herein are used in the method of diagnosing the presence of a tumor in a mammal.

[0355] Yet another embodiment of the present invention is directed to a method for treating or preventing a cell proliferative disorder associated with altered, in certain embodiments, increased, expression or activity of a glycoprotein as described herein (see e.g., those listed in Table 1), the method comprising administering to a subject in need of such treatment an effective amount of an antagonist of the glycoprotein. Preferably, the cell proliferative disorder is cancer and the antagonist of the glycopolypeptide is an anti-glycopolypeptide antibody, binding oligopeptide, binding organic molecule or antisense oligonucleotide. Effective treatment or prevention of the cell proliferative disorder may be a result of direct killing or growth inhibition of cells that express a tissue-and/or serum derived glycoprotein or by antagonizing the cell growth potentiating activity of a glycoprotein as described herein.

[0356] Yet another embodiment of the present invention is directed to a method of binding an antibody, oligopeptide or small organic molecule to a cell that expresses a glycopolypeptide or glycosite as described herein, wherein the method comprises contacting a cell that expresses the glycoprotein with said antibody, oligopeptide or small organic molecule under conditions which are suitable for binding of the antibody, oligopeptide or small organic molecule to said glycopolypeptide and allowing binding therebetween.

[0357] In another embodiment of the present invention, there is a method of diagnosing or prognosing a disease in an individual, comprising the steps of: a) determining the level of one or more glycoprotein as described herein such as in Table 1, or gene transcripts encoding said one or more glycoprotein, in blood obtained from said individual suspected of having a disease, and b) comparing the level of each of said one or more transcripts or glycoproteins in said blood according to step a) with the level of each of said one or more transcripts or protein in blood from one or more individuals having a disease, wherein detecting the same levels of each of said one or more transcripts or proteins in the comparison of step b) is indicative of a disease in the individual of step a).

[0358] In another embodiment of the present invention, there is a method of determining a stage of disease progression or regression in an individual having a disease, comprising the steps of: a) determining the level of one or more glycoproteins as described herein such as in Table 1, or gene transcripts encoding said one or more glycoproteins, in blood obtained from said individual having a disease, and b) comparing the level of each of said one or more glycoproteins or gene transcripts in said blood according to step a) with the level of each of said glycoproteins or gene transcripts encoding said glycoproteins in blood obtained from one or more individuals who each have been diagnosed as being at the same progressive or regressive stage of a disease, wherein the comparison from step b) allows the determination of the stage of a disease progression or regression in an individual.

[0359] In another embodiment of the present invention, there is a method of diagnosing or determining the prognosis of a disease in an individual, comprising the steps of: a) determining the level of one or more glycoproteins as described herein, such as in Table 1, or gene transcripts encoding said one or more glycoproteins, in blood obtained from said individual suspected of having a disease, and b) comparing the level of each of said one or more transcripts or glycoproteins in said blood according to step a) with a predetermined normal level of each of said one or more transcripts or glycoproteins in blood; wherein detecting a statistically significant altered level (either an increase or a decrease) of each of said one or more transcripts or proteins in the comparison of step b) is indicative of a disease in the individual of step a).

[0360] When comparing two or more samples for differences, results are reported as statistically significant when there is only a small probability that similar results would have been observed if the tested hypothesis (i.e., the genes are not expressed at different levels) were true. A small probability can be defined as the accepted threshold level at which the results being compared are considered significantly different. The accepted lower threshold is set at, but not limited to, 0.05 (i.e., there is a 5% likelihood that the results would be observed between two or more identical populations) such that any values determined by statistical means at or below this threshold are considered significant.

[0361] When comparing two or more samples for similarities, results are reported as statistically significant when there is only a small probability that similar results would have been observed if the tested hypothesis (i.e., the genes are not expressed at different levels) were true. A small probability can be defined as the accepted threshold level at which the results being compared are considered significantly different. The accepted lower threshold is set at, but not limited to, 0.05 (i.e., there is a 5% likelihood that the results would be observed between two or more identical populations) such that any values determined by statistical means above this threshold are not considered significantly different and thus similar.

[0362] Identification of glycoproteins, glycosites, or transcripts encoding such glycoproteins or glycosites as described herein that are differentially expressed in blood samples from patients with disease as compared to healthy patients or as compared to patients without said disease is determined by statistical analysis of the gene or protein expression profiles from healthy patients or patients without disease compared to patients with disease using the Wilcox Mann Whitney rank sum test. Other statistical tests can also be used, see for example (Sokal and Rohlf (1987) Introduction to Biostatistics 2nd edition, W H Freeman, New York), which is incorporated herein in their entirety.

[0363] In order to facilitate ready access, e.g., for comparison, review, recovery and/or modification, the expression profiles of patients with disease and/or patients without disease or healthy patients can be recorded in a database, whether in a relational database accessible by a computational device or other format, or a manually accessible indexed file of profiles as photographs, analogue or digital imaging, readouts spreadsheets etc. Typically the database is compiled and maintained at a central facility, with access being available locally and/or remotely.

[0364] As would be understood by a person skilled in the art, comparison as between the expression profile of a test patient with expression profiles of patients with a disease, expression profiles of patients with a certain stage or degree of progression of said disease, without said disease, or a healthy patient so as to diagnose or determine the prognosis of said test patient can occur via expression profiles generated concurrently or non concurrently. It would be understood that expression profiles can be stored in a database to allow said comparison.

[0365] As additional test samples from test patients are obtained, through clinical trials, further investigation, or the like, additional data can be determined in accordance with the methods disclosed herein and can likewise be added to a database to provide better reference data for comparison of healthy and/or non-disease patients and/or certain stage or degree of progression of a disease as compared with the test patient sample. These and other methods, including those described in the art (e.g., U.S. Patent Application Pub No. 20060134637) can be used in the context of the sequences disclosed.

Business Methods

[0366] A further embodiment of the present invention comprises business methods for manufacturing one or more of the detection reagents, panels, arrays as described herein as well as providing diagnostic services for analyzing and/or comparing fingerprints or individual proteins (or nucleic acid molecules) from a subject with one, two or more glycoproteins or glycosites as described herein or nucleic acid molecules described herein, identifying disease-associated fingerprints or glycoproteins, glycosites or nucleic acid molecules that vary or become present with disease, identifying fingerprints or proteins or nucleic acid molecule levels perturbed from normal, providing manufacturers of genomics devices the use of the detection reagents, panels, arrays, tissue-derived serum glycoprotein fingerprints or specific glycoproteins or nucleic acid probes for nucleic acid molecules encoding the same described herein to develop diagnostic devices, where the genomics device includes any device that may be used to define differences in a sample between the normal and disturbed state resulting from one or more effects, providing manufacturers of proteomics devices the use of the detection reagents, panels, arrays, tissue-derived serum glycoproteins or glycosites described herein to develop diagnostic devices, where the proteomics device includes any device that may be used to define differences in a sample between the normal and disturbed state resulting a disease, disorder or therapy, providing manufacturers of imaging devices detection reagents, panels, arrays, lateral flow devices, glycoproteins, glycosites or nucleic acid molecules or probes thereto described herein to develop diagnostic devices, where the proteomics devices include any device that may be used to define differences in a blood sample between the normal and disturbed state resulting from disease, drug side-effects, or therapeutic interventions, providing manufacturers of molecular imaging devices the use of the detection reagents, panels, arrays, or blood fingerprints described herein to develop diagnostic devices, where the proteomics device includes any device that may be used to define differences in a blood sample between the normal and disturbed state and marketing to healthcare providers the benefits of using the detection reagents, panels, arrays, and diagnostic services of the present invention to enhance diagnostic capabilities and thus, to better treat patients.

[0367] Also provided is an aspect of the invention to utilize databases to store data and analysis of panels and glycoprotein or glycosite sets as described herein and individual components thereof for certain ethnic populations, genders, etc. and for analysis over a lifetime for individuals based upon the data from millions or more individuals. In addition, the present invention contemplates the storage an access to such information via an appropriate secured and private setting wherein HIPAA standards are followed.

[0368] Another aspect of the invention relates to a method for conducting a business, which includes: (a) manufacturing one or more of the detection reagents, panels, arrays, (b) providing services for analyzing tissue-derived serum glycoprotein molecular blood fingerprints and (c) marketing to healthcare providers the benefits of using the detection reagents, panels, arrays, and services of the present invention to enhance capabilities to detect disease or disease progression and thus, to better treat patients.

[0369] Another aspect of the invention relates to a method for conducting a business, comprising: (a) providing a distribution network for selling the detection reagents, panels, arrays, diagnostic services, and access to glycoprotein or glycosite molecular blood fingerprint databases (b) providing instruction material to physicians or other skilled artisans for using the detection reagents, panels, arrays, and blood fingerprint databases to improve the ability to detect disease, analyze disease progression, or stratify patients.

[0370] For instance, the subject business methods can include an additional step of providing a sales group for marketing the database, or panels, or arrays, to healthcare providers.

[0371] Another aspect of the invention relates to a method for conducting a business, comprising: (a) preparing one or more normal tissue- and/or serum-derived glycoprotein or glycosite fingerprints and (b) licensing, to a third party, the rights for further development and sale of panels, arrays, and information databases related to the fingerprints of (a).

[0372] The business methods of the present application relate to the commercial and other uses, of the methodologies, panels, arrays, glycoproteins or glycosites (e.g., including the glycoproteins and glycosited described in Table 1 and diagnostic/prognostic panels thereof), blood fingerprints, and databases comprising identified fingerprints of the present invention. In one aspect, the business method includes the marketing, sale, or licensing of the present invention in the context of providing consumers, i.e., patients, medical practitioners, medical service providers, and pharmaceutical distributors and manufacturers, with all aspects of the invention described herein, (e.g., the methods for identifying tissue-derived and/or serum-derived glycoproteins, detection reagents for such proteins, molecular blood fingerprints, etc., as provided by the present invention).

[0373] In a particular embodiment of the present invention, a business method or diagnostic method relating to providing expression information related to the glycoproteins and glycosites described herein, or transcripts encoding such glycoproteins or glycosites, a plurality thereof, or a fingerprint of a plurality (e.g., levels of the glycoproteins that make up a given fingerprint), method of determining same or levels thereof or fingerprints of the same and sale of panels comprising same. In a specific embodiment, that method may be implemented through the computer systems of the present invention. For example, a user (e.g. a health practitioner such as a physician or a diagnostic laboratory technician) may access the computer systems of the present invention via a computer terminal and through the Internet or other means. The connection between the user and the computer system is preferably secure.

[0374] In practice, the user may input, for example, information relating to a patient such as the patient“s disease state and/or drugs that the patient is taking, e.g., levels determined for the glycoproteins or glycosites of interest or that make up a given molecular blood fingerprint using a panel or array of the present invention. The computer system may then, through the use of the resident computer programs, provide a diagnosis, detect changes in disease states, stratify patients, or determination of drug side-effects that fits with the input information by matching the parameters of (e.g., expression levels of) particular glycoprotein, glycosite or panel thereof with a database of fingerprints.

[0375] A computer system in accordance with a preferred embodiment of the present invention may be, for example, an enhanced IBM AS/400 mid-range computer system. However, those skilled in the art will appreciate that the methods and apparatus of the present invention apply equally to any computer system, regardless of whether the computer system is a complicated multi-user computing apparatus or a single user device such as a personal computer or workstation. Computer systems suitably comprise a processor, main memory, a memory controller, an auxiliary storage interface, and a terminal interface, all of which are interconnected via a system bus. Note that various modifications, additions, or deletions may be made to the computer system within the scope of the present invention such as the addition of cache memory or other peripheral devices.

[0376] The processor performs computation and control functions of the computer system, and comprises a suitable central processing unit (CPU). The processor may comprise a single integrated circuit, such as a microprocessor, or may comprise any suitable number of integrated circuit devices and/or circuit boards working in cooperation to accomplish the functions of a processor.

[0377] In a preferred embodiment, the auxiliary storage interface allows the computer system to store and retrieve information from auxiliary storage devices, such as magnetic disk (e.g., hard disks or floppy diskettes) or optical storage devices (e.g., CD-ROM). One suitable storage device is a direct access storage device (DASD). A DASD may be a floppy disk drive that may read programs and data from a floppy disk. It is important to note that while the present invention has been (and will continue to be) described in the context of a fully functional computer system, those skilled in the art will appreciate that the mechanisms of the present invention are capable of being distributed as a program product in a variety of forms, and that the present invention applies equally regardless of the particular type of signal bearing media to actually carry out the distribution. Examples of signal bearing media include: recordable type media such as floppy disks and CD ROMS, and transmission type media such as digital and analog communication links, including wireless communication links.

[0378] The computer systems of the present invention may also comprise a memory controller, through use of a separate processor, which is responsible for moving requested information from the main memory and/or through the auxiliary storage interface to the main processor. While for the purposes of explanation, the memory controller is described as a separate entity, those skilled in the art understand that, in practice, portions of the function provided by the memory controller may actually reside in the circuitry associated with the main processor, main memory, and/or the auxiliary storage interface.

[0379] Furthermore, the computer systems of the present invention may comprise a terminal interface that allows system administrators and computer programmers to communicate with the computer system, normally through programmable workstations. It should be understood that the present invention applies equally to computer systems having multiple processors and multiple system buses. Similarly, although the system bus of the preferred embodiment is a typical hardwired, multidrop bus, any connection means that supports bidirectional communication in a computer-related environment could be used.

[0380] The main memory of the computer systems of the present invention suitably contains one or more computer programs relating to the molecular blood fingerprints and an operating system. Computer program is used in its broadest sense, and includes any and all forms of computer programs, including source code, intermediate code, machine code, and any other representation of a computer program. The term “memory” as used herein refers to any storage location in the virtual memory space of the system. It should be understood that portions of the computer program and operating system may be loaded into an instruction cache for the main processor to execute, while other files may well be stored on magnetic or optical disk storage devices. In addition, it is to be understood that the main memory may comprise disparate memory locations.

[0381] As should be clear to the skilled artisan from the above, the present invention provides databases, readable media with executable code, and computer systems containing information comprising predetermined normal serum levels of glycoprotein and glycosites sets as described herein. Further, the present invention provides databases of information comprising disease-associated fingerprints as well as panels and in some embodiments, levels thereof.

[0382] Throughout this disclosure, various aspects of this invention can be presented in a range format. It should be understood that the description in range format is merely for convenience and brevity and should not be construed as an inflexible limitation on the scope of the invention. Accordingly, the description of a range should be considered to have specifically disclosed all the possible subranges as well as individual numerical values within that range. For example, description of a range such as from 1 to 6 should be considered to have specifically disclosed subranges such as from 1 to 3, from 1 to 4, from 1 to 5, from 2 to 4, from 2 to 6, from 3 to 6 etc., as well as individual numbers within that range, for example, 1, 2, 3, 4, 5, and 6. This applies regardless of the breadth of the range. Further, the following examples are offered by way of illustration, and not by way of limitation.

### EXAMPLES

### Example 1

[0383] This Example demonstrates that tissue-derived proteins are both present and detectable in plasma via direct mass spectrometric analysis of captured glycopeptides, and thus provides a conceptual basis for plasma protein biomarker discovery and analysis. Further, this Example provides tissue-derived proteins detectable in plasma that have utility in a variety of diagnostic settings.

Materials and Reagents

[0384] For chromatography procedures, HPLC-grade reagents from Fisher Scientific (Pittsburgh, Pa.) were used. PNGase F was purchased from New England Biolabs (Beverly, Mass.) and hydrazide resin from Bio-Rad (Hercules, Calif.). All other chemicals used in this study were purchased from Sigma (St. Louis, Mo.). The SK-BR-3, Ramos, and Jurkat cells were obtained from ATCC (American Type Culture Collection, Manassas, Va.). Human tissue specimens were obtained from organs surgically removed because of cancer under a human subject approval for prostate and bladder cancer biomarker discovery project supported by the Early Detection Research Network from the National Cancer Institute.

Purification and Fractionation of N-Linked Glycopeptides from Plasma

[0385] The N-linked glycosites identified from plasma were generated from data from four separate resources of human serum or plasma. Two of the plasma samples were from a study performed as part of the HUPO plasma proteome project (Omenn G S, States D J, Adamski M, et al. (2005) Proteomics 5: 3226-3245). One of these HUPO plasma samples was an equal mix (v/v) of plasma from one male and one post-menopausal female Caucasian-American donors. These samples were collected with sodium citrate as anticoagulant (BD Diagnostics). The second HUPO plasma sample was from the UK National Institute of Biological Standards and Control (NIBSC) provided as a lyophilized citrated plasma standard from a pool of 25 donors (Omenn G S, States D J, Adamski M, et al. (2005) Proteomics 5: 3226-3245). The third sample source for this study was generated at the Institute for Systems Biology (ISB) from a pool of serum samples collected from 7 healthy male donors and 3 healthy female donors. Following approval by Human Subject Institutional Review Board of ISB, trained phlebotomists collected blood from each donor into evacuated blood collection tubes. Blood was allowed to clot for 1 hr at room temperature. Sera were collected by centrifugation at 3000 rpm. It should be noted that using these collection procedures for plasma and serum samples, contamination from breakage of platelet or other blood cells cannot be totally ruled out. Formerly N-linked glycosylated peptides were isolated using N-linked glycopeptide capture procedure as described previously (Zhang H, Li X J, Martin D B, Aebersold R. (2003) Identification and quantification of N-linked glycoproteins using hydrazide chemistry, stable isotope labeling and mass spectrometry. Nat Biotechnol 21: 660-666; Desiere F, Deutsch E W, Nesvizhskii A I, et al. (2005) Integration with the human genome of peptide sequences obtained by high-throughput mass spectrometry. Genome Biol 6: R9; Deutsch E W, Eng J K, Zhang H, et al. (2005) Human Plasma PeptideAtlas. Proteomics 5: 3497-3500). For these studies, 750 μl of serum or plasma was used for N-linked glycopeptide isolation. The fourth set of data used for this study was generated from a previously published study of N-linked plasma glycopeptides from Biological Systems Analysis and Mass Spectrometry group at Pacific Northwest National Laboratory (PNNL) in Richland, Wash. (Liu T, Qian W J, Gritsenko M A, et al. (2005) Human plasma N-glycoproteome analysis by immunoaffinity subtraction, hydrazide chemistry, and mass spectrometry. J Proteome Res 4: 2070-2080).

[0386] Purification and Fractionation of N-Linked Glycopeptides from Cells and Solid Tissues

[0387] Proteins from SK-BR-3 breast cancer cells were extracted via homogenization and fractionation of cell lysates. At confluence, SK-BR-3 cells were rinsed 5 times with serum-free medium, followed by incubation in serum-free McCoy's 5a for 24 h at 37° C. in a humidified incubator at 5% CO₂. Cells were homogenized in 0.32M sucrose, 100 mM sodium phosphate, pH7.5, and separated into three fractions by sequential centrifugations (1,000×g pellet, 17,000×g pellet, and 17,000×g supernatant) (Han D K, Eng J, Zhou H, Aebersold R. (2001) Quantitative profiling of differentiation-induced microsomal proteins using isotope-coded affinity tags and mass spectrometry. Nat Biotechnol 19: 946-951). Protein extraction from solid tissues was performed using cell-free supernatant after an initial digestion of the tissues with collagenase. The tissues was sliced into pieces in serum-free cell culture medium and collagenase was added at a final concentration of 1 mg/ml. Tissues were digested overnight at room temperature with stirring and a cell-free supernatant was obtained by centrifugation (Liu A Y, Zhang H, Sorensen C M, Diamond D L. (2005) Analysis of prostate cancer by proteomics using tissue specimens. J Urol 173: 73-78; Zhang H, Li X J, Martin D B, Aebersold R. (2003) Identification and quantification of N-linked glycoproteins using hydrazide chemistry, stable isotope labeling and mass spectrometry. Nat Biotechnol 21: 660-666). One mg aliquots of protein extracted from cultured breast cells and solid tissue samples was used for glycopeptide capture (Zhang H, Li X J, Martin D B, Aebersold R. (2003) Identification and quantification of N-linked glycoproteins using hydrazide chemistry, stable isotope labeling and mass spectrometry. Nat Biotechnol 21: 660-666).

[0388] Isolation of glycopeptides from the plasma membrane of lymphocytes was by a modification of the glycopeptide-capture method (Zhang H, Li X J, Martin D B, Aebersold R. (2003) Identification and quantification of N-linked glycoproteins using hydrazide chemistry, stable isotope labeling and mass spectrometry. Nat Biotechnol 21: 660-666) that allows for specific labeling/isolation of just plasma membrane glycoproteins (Wollscheid et al. manuscript in preparation). In brief, this was accomplished by the use of a biotinylated hydrazide instead of a solid-phase hydrazide to label only the cell surface glycoproteins on live B and T lymphocytes in culture. After labeling, total membrane proteins were again isolated from the cells (Han D K, Eng J, Zhou H, Aebersold R. (2001) Quantitative profiling of differentiation-induced microsomal proteins using isotope-coded affinity tags and mass spectrometry. Nat Biotechnol 19: 946-951) which were then proteolyzed with trypsin. Capture of plasma membrane-derived biotinylated glycopeptides was achieved via streptavidin-affinity isolation (Gygi S P, Rist B, Gerber S A, Turecek F, Gelb M H, Aebersold R. (1999) Quantitative analysis of complex protein mixtures using isotope-coded affinity tags. Nat Biotechnol 17: 994-999), and the N-linked glycopeptides once again recovered following cleavage with PNGase F.

Analysis of Peptides by Mass Spectrometry

[0389] Off-line fractionation of peptides isolated from human plasma samples by strong cation-exchange chromatography prior to analysis of each fraction via LC-MS/MS was performed as described previously (Han D K, Eng J, Zhou H, Aebersold R. (2001) Quantitative profiling of differentiation-induced microsomal proteins using isotope-coded affinity tags and mass spectrometry. Nat Biotechnol 19: 946-951). Peptides from other sources were analyzed by online reverse phase LC-MS/MS without further sample fractionation.

[0390] Fractionated peptides from plasma samples were analyzed using both an LCQ and LTQ ion-trap mass spectrometer (Thermo Finnigan, San Jose, Calif.) as well as with electrospray ionization quadrupole-time-of-flight (ESI-qTOF) mass spectrometer (Waters, Milford, Mass.) according to standard practices and manufacturers' instructions (Zhang H, Yi E C, Li X J, et al. (2005) High throughput quantitative analysis of serum proteins using glycopeptide capture and liquid chromatography mass spectrometry. Mol Cell Proteomics 4: 144-155).

[0391] Peptides isolated from solid tissues and breast cancer cells were identified using an LCQ or LTQ ion trap mass spectrometer. The peptides were injected in three aliquots into a homemade peptide cartridge packed with Magic C18 (Michrom Bioresources, Auburn, Calif.) using a FAMOS autosampler (DIONEX, Sunnyvale, Calif.), and then passed through a 10 cm×75 μm i.d. microcapillary HPLC column packed with Magic C18 resin. A linear gradient of acetonitrile from 5%-32% over 100 min at a flow rate of ˜300 nl/min was applied. MS/MS spectra were acquired in a data-dependent mode.

[0392] Peptides isolated from B and T lymphocyte plasma membranes were analyzed on an LCQ ion trap mass spectrometer as previously described (Gygi S P, Rist B, Gerber S A, Turecek F, Gelb M H, Aebersold R. (1999) Quantitative analysis of complex protein mixtures using isotope-coded affinity tags. Nat Biotechnol 17: 994-999).

[0393] Acquired MS/MS spectra were searched against the International Protein Index (IPI) human protein database (version 2.28, containing 40,110 entries) using SEQUEST software (Eng J, McCormack A L, Yates J R, 3rd. (1994) An approach to correlate tandem mass spectral data of peptides with amino acid sequences in a protein database. J. Am. Soc. Mass Spectrom. 5: 976-989). The database search parameters were set to the following modifications: carboxymethylated cysteines, oxidized methionines, and a (PNGase F-catalyzed) conversion of Asn to Asp that occurs at the original site of carbohydrate attachment to the peptide/protein (i.e the N-glycosite). No other constraints were included for database searches.

[0394] Database search results were then statistically analyzed using PeptideProphet, which effectively computes a probability for the likelihood of each identification being correct (on a scale of 0 to 1) in a data-dependent fashion (Keller A, Nesvizhskii A I, Kolker E, Aebersold R. (2002) Empirical statistical model to estimate the accuracy of peptide identifications made by MS/MS and database search. Anal Chem 74: 5383-5392). A PeptideProphet probability score of ≧0.9 was used as a filter to remove low probability peptides identifications. This filtering step represented an estimated peptide sequence assignment error rate of 2% or less for all datasets as calculated by PeptideProphet. Although the majority of N-linked glycosylation occurs at a consensus N—X—S/T sequon (where X is any amino acid except proline) (Bause E. (1983) Structural requirements of N-glycosylation of proteins. Studies with proline peptides as conformational probes. Biochem J 209: 331-336.), ˜20% of identified peptides did not contain such a sequon. These peptide identifications likely resulted from false positive identifications from the database search, non-specific isolation of N-linked glycosites, and from the isolation of atypical N-linked glycosites (i.e., not containing the N—X—S/T motif) of which we do not have sufficient understanding to predict. Thus, to reduce the false positive rate of the identified N-linked glycosites and to focus on those N-linked glycosites we could be most confident about, the peptide sequences were additionally filtered to remove non-motif-containing peptides. Finally, peptide sequences were analyzed with respect to individual unique N—X—S/T sequons such that overlapping sequences containing the same N—X—S/T sequon (i.e. redundant N-linked glycopeptides for the same N-linked glycosite) were resolved in favor of those peptide sequences that contained the greater number of tryptic cleavage termini.

Sub-Cellular Localization of Identified Proteins

[0395] In order to predict the likely sub-cellular localization of identified peptides/proteins, we utilized freely available prediction software for determination of (secretion) signal peptides and likely cell membrane-spanning sequences. Signal peptides were predicted using SignalP 2.0 (Nielsen H, Engelbrecht J, Brunak S, von Heijne G. (1997) A neural network method for identification of prokaryotic and eukaryotic signal peptides and prediction of their cleavage sites. Int J Neural Syst 8: 581-599) and transmembrane (TM) regions were predicted using TMHMM (version 2.0) (Krogh A, Larsson B, von Heijne G, Sonnhammer E L. (2001) Predicting transmembrane protein topology with a hidden Markov model: application to complete genomes. J Mol Biol 305: 567-580) for protein topology and the number of TM helices. Information from both SignalP and TMHMM were combined to allow for sorting of the identified N-glycosylated proteins into the following categories: i) cell surface—proteins that contained predicted non-cleavable signal peptides and no predicted TM segments; ii) secreted—proteins that contained predicted cleavable signal peptides and no predicted TM segments; iii) transmembrane—proteins that contained predicted TM segments and extracellular loops and intracellular loops; and iv) intracellular—proteins that contained neither predicted signal peptides nor predicted TM segments.

Results:

[0396] The goal of this study was to test whether bona fide peptides derived from a variety of cell or tissue types were also detectable in blood plasma and to identify tissue-derived serum glycoproteins for use in diagnostic panels. Since cell surface and secreted proteins are both likely to be deposited into the blood and most of them are also glycosylated, the glycoprotein sub-proteome that could be readily identified from both selected cultured cell lines and solid tumor samples was targeted. It was then determined whether a significant subset of these cell- and tissue-derived glycoproteins were indeed similarly detectable and thus present in blood plasma.

[0397] The general approach employed for these analyses is summarized in FIG. 1 and consists of four basic steps: 1) Protein extraction. Proteins were extracted from cells via homogenization and differential centrifugations (Han D K, Eng J, Zhou H, Aebersold R. (2001) Quantitative profiling of differentiation-induced microsomal proteins using isotope-coded affinity tags and mass spectrometry. Nat Biotechnol 19: 946-951). For protein extraction from solid tissues, tissues were digested with collagenase to obtain a cell-free supernatant (Liu A Y, Zhang H, Sorensen C M, Diamond D L. (2005) Analysis of prostate cancer by proteomics using tissue specimens. J Urol 173: 73-78.). 2) Glycopeptide capture. Proteins from tissues/cells and plasma were processed by the recently described solid-phase-based method for the isolation of N-linked glycopeptides (Zhang H, Li X J, Martin D B, Aebersold R. (2003) Identification and quantification of N-linked glycoproteins using hydrazide chemistry, stable isotope labeling and mass spectrometry. Nat Biotechnol 21: 660-666.). The end-product for this procedure is the isolation of de-glycosylated peptides that originally contain N-linked carbohydrates in the native protein (Zhang H, Li X J, Martin D B, Aebersold R. (2003) Identification and quantification of N-linked glycoproteins using hydrazide chemistry, stable isotope labeling and mass spectrometry. Nat Biotechnol 21: 660-666). This also results in the conversion of the formerly glycosylated Asn to an Asp side chain. 3) Peptide identification. Isolated peptides were analyzed by automated LC-MS/MS. SEQUEST database search was performed for peptide sequence identification (Eng J, McCormack A L, Yates J R, 3rd. (1994) An approach to correlate tandem mass spectral data of peptides with amino acid sequences in a protein database. J. Am. Soc. Mass Spectrom. 5: 976-989) followed by implementation of PeptideProphet (Keller A, Nesvizhskii A I, Kolker E, Aebersold R. (2002) Empirical statistical model to estimate the accuracy of peptide identifications made by MS/MS and database search. Anal Chem 74: 5383-5392) for statistical determination of the peptide identifications most likely to be correct. 4) Peptide comparison. Peptides identified from the different samples were compared against each other to determine the peptides in common between different cell- and tissue-types, as well as to peptides identified from plasma to determine which cell/tissue-derived proteins/peptides were also detectable in plasma (see Table 1).

[0398] Table 1 associated with this application is provided on CD-ROM in lieu of a paper copy, and is hereby incorporated by reference into the specification. Identified peptide sequences were first assigned to proteins in the IPI database (version 2.28). Assigned proteins were then mapped to RNA sequences in the RefSeq database (NCBI build number 36) using connections stored in the IPI database and in EntrezGene database (modified on Sep. 18, 2006).

[0399] The legend to Table 1 is outlined below:

TABLE 1A
Legend

| Column Header | Information contained in the column |
|---|---|
| PP | Peptide Prophet Score |
| BLCT | Bladder Cancer Tissue |
| BRCC | Breast Cancer Cell |
| BRCT | Breast Cancer Tissue |
| LCT | Liver Cancer Tissue |
| LY | Lymphocyte |
| OCC | Ovarian Cancer Cell |
| OCT | Ovarian Cancer Tissue |
| PCC | Prostate Cancer Cell |
| PCT | Prostate Cancer Tissue |
| PL | Plasma |
| GlyID | Identified Glycosite SEQ ID NO |
| Glycosite | Identified Glycosite amino acid sequence |

[0400] TABLE 1B
Legend

| Column Header | Information contained in the column |
|---|---|
| GlyID | Identified Glycosite SEQ ID NO |
| IPI Access | IPI Accession Number |
| PRSEQID | Protein Sequence SEQ ID NO |
| Prot Descr | Protein Description (from IPI) |
| Prot Loc | Protein Localization |
| REFSEQAcc | RefSeq Acession Number for the mapped |
| | nucleic acid sequence |
| PNSEQID | RefSeq Polynucleotide SEQ ID NO: |

[0401] Since the general isolation procedures used here specifically targeted N-linked glycosylation and since there is a known consensus sequence for this modification (N—X—S/T, X can be any amino acid except P), the comparisons were limited solely to the identified peptide sequences that contained at least one such N-linked glycosylation motif in order to simplify and to further reduce false positive rates.

[0402] Glycoproteins expressed on the surface of two human lymphocyte cell lines were characterized, one of B cell and one of T cell lineage (Ramos and Jurkat, respectively). Since lymphocytes naturally circulate in the blood, they come in contact with the blood plasma as much or more than any other cell type, thus maximizing the likelihood of their proteins being deposited into the plasma.

[0403] N-linked glycopeptides were isolated and identified from the plasma membranes of both Jurkat and Ramos cells for comparison to a previously compiled list of identified N-linked glycosites derived from plasma glycoproteins (Desiere F, Deutsch E W, Nesvizhskii A I, et al. (2005) Integration with the human genome of peptide sequences obtained by high-throughput mass spectrometry. Genome Biol 6: R9; Deutsch E W, Eng J K, Zhang H, et al. (2005) Human Plasma PeptideAtlas. Proteomics 5: 3497-3500; Liu T, Qian W J, Gritsenko M A, et al. (2005) Human plasma N-glycoproteome analysis by immunoaffinity subtraction, hydrazide chemistry, and mass spectrometry. J Proteome Res 4: 2070-2080). A total of 384 N-linked glycosites from B and T cell-surface glycoproteins were identified with a PeptideProphet score of ≧0.9. When compared with previously compiled data on 1105 identified N-linked glycosites from plasma proteins (similarly scoring ≧0.9 with PeptideProphet), 77 of the N-linked glycosites were in common with those already identified from plasma (FIG. 2 and Table 1). This represented a significant portion (20%) of the total identifications from the B and T lymphocyte cell plasma membranes, thus confirming that lymphocyte-derived glycoproteins are both present and readily detectable in plasma when using this fairly simple glycoprotein/glycopeptide enrichment protocol upstream of identification by LC-MS/MS.

[0404] Since these identifications were achieved using cells grown in culture media supplemented with bovine serum, there was no potential for human blood contamination for these samples. However, some identifications could be attributed to bovine proteins should there be sufficient sequence homologies with human. To investigate this possibility, the sequences of the 77 N-linked glycosites representing this lymphocyte/plasma overlap were submitted to a search of the bovine protein database (internet address: bovine dot nci dot 20051213). These results indicated that only 10 of the 77 N-linked glycosites were conserved between human and bovine. For these 10 N-linked glycosites, the source of origin could not be reliably assigned. However, for the remaining 67 N-linked glycosites that were not conserved, it can be concluded that they could only have originated from the human cells under study, thus indicating that most or all of the plasma membrane glycoproteins identified from the human lymphocytes originated from the cells themselves rather than the culture medium. Thus, these data combined clearly indicated that glycoproteins expressed on the surface of lymphocytes were indeed detectable in the blood via solid-phase based isolation and LC-MS analysis of N-linked glycopeptides.

[0405] Since blood cells such as B and T lymphocytes and platelets naturally circulate in the blood, it was also possible that proteins could have been artificially introduced from such cells into the plasma during the blood/plasma collection rather than by natural release into the blood in vivo. While this eventuality was difficult to experimentally exclude completely during the serum/plasma collection process, a clue as to whether this was generally a problem might be inferable from microarray data. To this end, proteins identified in both prostate and plasma in this study were compared with the transcriptional profiling data of these proteins in whole blood from available published microarray analyses (Nielsen H, Engelbrecht J, Brunak S, von Heijne G. (1997) A neural network method for identification of prokaryotic and eukaryotic signal peptides and prediction of their cleavage sites. Int J Neural Syst 8: 581-599.; Su A I, Cooke M P, Ching K A, et al. (2002) Large-scale analysis of the human and mouse transcriptomes. Proc Natl Acad Sci USA 99: 4465-4470). Transcription data was found for 162 out of 202 N-linked glycosites that were identified in both prostate tissue and plasma (FIG. 2 and Table 1), of which 78 were not detected in blood cells (an average difference value of 200 was used as threshold to make present/absent calls (Su A I, Cooke M P, Ching K A, et al. (2002) Large-scale analysis of the human and mouse transcriptomes. Proc Natl Acad Sci USA 99: 4465-4470). For 84 N-linked glycosites that were shown to be present in blood cells, genes for 20 N-linked glycosites were highly expressed in blood cells (expression in blood cells was 5-fold of the median value for 64 tissues or cells used). Therefore, the tissue origin of these 20 N-linked glycosites can not be determined. On the other hand, a number of N-linked glycosites identified in both prostate tissue and plasma were preferentially expressed in prostate tissue but not in blood cells shown by microarray analyses. These included CD26, lumican, MAC-2 binding protein, basement membrane-specific heparan sulfate proteoglycan core protein, and desmoglein (Table 1). These observations suggest that the majority of proteins that were detected in both tissues and plasma were likely deposited into the plasma from tissues in vivo.

[0406] Next, it was tested whether the observation of such an overlap between N-linked glycosites identified from both lymphocytes and blood plasma could be extended to other cell types and tissues whose cells do not circulate in the blood stream. For this, four different but representative cell/tissue types pertinent to cancer biomarker discovery were selected to determine whether the N-linked glycosites identifiable from these sources are also present in the larger plasma dataset. Specifically, we chose SK-BR-3 breast cancer cells, primary bladder and prostate cancer tissue, and a liver metastasis of prostate cancer.

[0407] N-linked glycopeptides from the cultured SK-BR-3 breast cancer cells were isolated from a whole-cell lysate via conventional solid-phase glycoprotein/glycopeptide enrichment method. Similarly, hydrazide-based isolation of N-linked glycopeptides from tissues was carried out with cell-free supernatants of collagenase-digested prostate, bladder, and liver metastasis tissue specimens (FIG. 1) (Zhang H, Li X J, Martin D B, Aebersold R. (2003) Identification and quantification of N-linked glycoproteins using hydrazide chemistry, stable isotope labeling and mass spectrometry. Nat Biotechnol 21: 660-666; Liu A Y, Zhang H, Sorensen C M, Diamond D L. (2005) Analysis of prostate cancer by proteomics using tissue specimens. J Urol 173: 73-78). The identification of isolated N-linked glycopeptides was via LC-MS/MS and the results similarly compared with the plasma dataset (Zhang H, Loriaux P, Eng J, et al. (2006) UniPep, a database for human N-linked glycosites: A Resource for Biomarker Discovery. Genome Bio 7: R73). When combined with the lymphocyte data, these data showed that of the total 1,257 N-linked glycosites identified in the two cell and three tissue types, 832 of these were identified in only one of the sample types (Table 1). FIG. 2 summarizes the total number of N-linked glycosites identified in each cell/tissue type, the number of these that were unique to each specific cell or tissue type, as well as the subsets of these that additionally overlapped with the plasma-derived N-liked glycosite dataset.

[0408] Similar to the comparison between lymphocytes and plasma, all four of these additional datasets showed a significant overlap with the plasma dataset. As can be seen from FIG. 2, some of the N-linked glycosites identified in both a particular cell/tissue and plasma were unique to that cell/tissue type. For example, of the 286 N-linked glycosites in common between plasma and breast cancer cells, 123 were not identified in any of the other cell/tissue samples evaluated. These results again support the contention that glycoproteins originating from cells or tissues are detectable in plasma using the relatively simple methodological approach of LC-MS analysis of enriched N-linked glycoproteins. Furthermore, they indicate that glycoproteins from all or most cell and tissue types are likely to be found in the blood and be present at detectable levels for such an analytic approach.

[0409] In the above studies, proteins were identified by LC-MS/MS. In this method, not all proteins from cells, tissues or plasma are identified due to the random sampling of peptide precursor ions during the analytical process. Therefore, we focused this study on the proteins commonly detected in both cell/tissue and plasma, and put less value on the proteins only detected in specific tissues (tissue specificity). In addition, tumor cells and tissues were used to isolate the cell/tissue N-linked glycopeptides whereas the dataset for plasma proteins was derived from samples obtained from non-cancer patient donors. Therefore, without quantitative comparison of protein concentration in normal and cancer plasma, we cannot confirm that the N-linked glycosites identified in common between tissues/cells and plasma shown here are associated with cancer. Conversely, N-linked glycosites identified from cancer cells/tissues but not detected in the current plasma dataset could be potential cancer biomarkers for detection in plasma of cancer patients. For example, two prostate cancer tissue proteins, prostatic acid phosphatase (PAP) and prostate-specific antigen (PSA) were not found in the plasma dataset. The levels of these proteins have been shown to be elevated in the plasma of prostate cancer patients and are unlikely to be detected in plasma of normal donors (Ludwig J A, Weinstein J N. (2005) Biomarkers in cancer staging, prognosis and treatment selection. Nat Rev Cancer 5: 845-856).

[0410] Unlike cultured cells, tissues are vascularized. One would thus expect that some contamination of the tissue glycoproteins by common circulating blood glycoproteins would inevitably occur. To investigate this possibility, the cell/tissue-derived data was examined to see if the overlap of N-linked glycosites detected in both plasma and the respective tissue sources could be explained by simple contamination from blood proteins. If this were the case, then it would be expected that such contaminating plasma-derived glycoproteins would be a general effect and thus be detected in multiple tissues.

[0411] When this comparison was made, it was found that a significant number identified N-linked glycosites were indeed common to multiple tissues (FIG. 3 and Table 1). For example, 202 unique N-linked glycosites were identified in both prostate tissue and plasma. By referencing available database annotations for these proteins, it was determined that 94 of these N-linked glycosites likely originated from proteins made by prostatic cells, with another 96 to originate from blood. The remaining 12 N-linked glycosites were annotated as hypothetical proteins whose origin could not be determined. Furthermore, when the N-linked glycosites identified were compared from both prostate cancer tissue and plasma with the N-linked glycosites identified from the other two tissues (bladder cancer and liver metastasis) and plasma, it was found that 81 of the N-linked glycosites identified were shared among all 3 tissues. Of these, 57 (70%) were annotated as classical plasma proteins (FIG. 3, Table 1). In contrast, it would be expected that the peptides identified from only one of these tissues would be far more likely to represent bona fide tissue-derived proteins. Indeed, for the 129 N-linked glycosites that were uniquely identified in prostate cancer tissue, it was found that only 7 N-linked glycosites (5%) were annotated as classical plasma proteins. These observations again suggested that this technique enabled the identification of significant numbers of genuine tissue-derived glycoproteins in both tissue and plasma samples, without being overwhelmed by high abundance plasma proteins.

[0412] The initial premise for specifically targeting N-linked glycosites in this study was two-fold. First, the reduction in sample complexity achieved by selectively focusing on the sub-proteome of N-linked glycopeptides was expected to improve the detection sensitivity in mass spectrometric analysis of the resulting sample mixtures. Second, the vast majority of intracellular proteins are non-glycosylated, whereas a significant proportion of plasma membrane-bound, extracellular and secreted proteins, including plasma proteins, are glycosylated. Thus glycoproteins should represent an ideal class of proteins to target for the discovery of new markers of disease that are detectable and quantifiable in the blood.

[0413] To test whether sampling did indeed include these expected categories of proteins in our analyses, an informatics approach was applied for the prediction of likely sub-cellular localization for the glycoproteins identified in the various tissues and cells studied, classifying them into four general groups: 1) cell surface proteins, 2) secreted proteins, 3) transmembrane proteins and 4) intracellular proteins. Glycoproteins would be expected to fall into one of the first 3 of these groups and, not surprisingly, this analyses confirmed that 1168 out of a total of 1257 (93%) N-linked glycosites identified from tissues, cells, or plasma were classified as such (see Table 1). Indeed, the true percentage of such proteins in this dataset was likely even higher than 93% since some of the N-linked glycosites predicted as intracellular proteins were in fact immunoglobulin isoforms, proteins known to be secreted in actuality. In contrast, applying the same informatic methodology to all 40,110 entries in the human protein sequence database that was used for searching the MS/MS data showed that about a third of proteins in the database could be similarly classified (data not shown). These observations thus confirmed the initial premise that the targeted isolation and identification of N-linked glycoproteins and glycopeptides significantly enriched for the desired secreted, extracellular and cell membrane proteins, i.e., proteins that likely represent good candidates for both markers of disease and their quantification in the blood. To further reduce the false positive identification of N-linked glycosites, the protein subcellular location for the identified N-linked glycosites can be further used as a filter to remove the N-linked glycosites from intracellular proteins.

[0414] Another largely unanswered question relating to blood biomarker discovery was whether the simple, robust and affordable methodologies required for the necessary high throughput screens were able to access the lower abundance proteins that are generally assumed to be of greater significance for predictive or diagnostic purposes. The data presented here also indicated that by targeting the identification of N-linked glycosites, enabled access to lower-abundance plasma proteins that also might have originated from specific tissues. A representative list of such proteins is shown in FIG. 4 (see also Table 1), including 217 N-linked glycosites from cluster designation (CD) cell surface antigens. Of these, 56 N-linked glycosites from CD antigens were also identified from plasma samples, and 140 of the N-linked glycosites from CD antigens were identified from lymphocyte membranes (Table 1). This high proportion of detection in lymphocytes was to be expected since CD antigens were originally characterized as white blood cell surface proteins (True L D, Liu A Y. (2003) A challenge for the diagnostic immunohistopathologist. Adding the CD phenotypes to our diagnostic toolbox. Am J Clin Pathol 120: 13-15), many of which are now used routinely for typing lymphocytes. However, the expression of many CD antigens is not restricted only to lymphocytes, or cells of the hematopoietic system. In this study, 77 N-linked glycosites from CD antigens were also identified in tissues or cells other than lymphocytes (Table 1). Since the expression of some CD antigens on cancer cells has been shown to differ from their normal counterparts, cancer-specific CD antigens found in plasma might also serve as markers for the detection of cancer of specific tissues (Liu A Y, Roudier M P, True L D. (2004) Heterogeneity in primary and metastatic prostate cancer as defined by cell surface CD profile. Am J Pathol 165: 1543-1556). To confirm that these N-linked glycosites from CD antigens identified from tissues were in fact derived from the tissues themselves rather than via contamination from infiltrating lymphocyte proteins present in the tissues, the available immunohistochemistry (IHC) data for some of these CD molecules were examined, and it was found that in cases where MS identification had been made from a tissue sample, the IHC data were supportive of those findings (FIG. 4).

[0415] As an additional test of the sensitivity of this approach towards the identification of lower abundance proteins from cells, tissues, and plasma, the N-linked glycosite dataset was compared to recently published literature-derived lists of proteins that have been linked to both cardiac disease and cancer and could thus also represent candidate biomarkers; datasets that also included reported blood concentrations for some of the proteins where also published (Anderson L. (2005) Candidate-based proteomics in the search for biomarkers of cardiovascular disease. J Physiol 563: 23-60; Anderson L, Polanski M. (2006) A list of candidate cancer biomarkers for targeted proteomics. Biomarker Insights In press). When these two published datasets were compared with the N-linked glycosite dataset presented here, it was found that 314 N-linked glycosites were from 141 candidate biomarkers (Table 1). Of these, normal plasma concentrations were also reported for 56 of these proteins. Several of these proteins detected in both cell/tissue and plasma in this study were known to be present in normal plasma at concentrations in the ng/ml to low μg/ml range. Such proteins included prothrombin, tissue inhibitor of metalloproteinase 1, von Willebrand factor, tenascin, L-selectin, CD54 and others (Table 1). FIG. 5 shows a histogram for these known protein concentrations in normal plasma for the proteins we had also detected in both cells/tissues and plasma or cells/tissues alone. As expected, the proteins identified for which normal blood concentrations were also reported were indeed biased towards the more abundant proteins present in the blood. However, these data also showed that despite this, we were nevertheless still able to sample N-glycosylated plasma proteins spanning a wide concentration range spanning at least the top 8 orders of magnitude of the full plasma protein concentration range. From these results, it was concluded that through targeting N-linked glycopeptide enrichment identification via LC-MS/MS, we were able to access the lower abundance tissue- and cell-derived proteins that many believe constitute the richest source of potentially new disease markers.

[0416] Thus, through the application of solid-phase glycopeptide enrichment and LC-MS, this method clearly enables detection of cell-surface CD antigens in plasma as well as other molecules known to reflect important physiological information about the state of a particular tissue or cell type. In fact, expression patterns of some CD molecules have already been correlated to disease states of certain tissues, including cancer of the colon, thyroid and prostate (Weichert W, Knosel T, Bellach J, Dietel M, Kristiansen G. (2004) ALCAM/CD166 is overexpressed in colorectal carcinoma and correlates with shortened patient survival. J Clin Pathol 57: 1160-1164; Kholova I, Ryska A, Ludvikova M, Pecen L, Cap J. (2003) [Dipeptidyl peptidase IV (DPP IV, CD 26): a tumor marker in cytologic and histopathologic diagnosis of lesions of the thyroid gland]. Cas Lek Cesk 142: 167-171; Kristiansen G, Pilarsky C, Wissmann C, et al. (2003) ALCAM/CD166 is up-regulated in low-grade prostate cancer and progressively lost in high-grade lesions. Prostate 54: 34-43). Two other proteins identified in this study, the MAC-2 binding protein and metalloproteinase inhibitor 1, have also been identified as potential cancer markers from multiple tissue types, with their quantification in blood being of use in monitoring cancer progression (Marchetti A, Tinari N, Buttitta F, et al. (2002) Expression of 90K (Mac-2 BP) correlates with distant metastasis and predicts survival in stage I non-small cell lung cancer patients. Cancer Res 62: 2535-2539; Liu A Y, Zhang H, Sorensen C M, Diamond D L. (2005) Analysis of prostate cancer by proteomics using tissue specimens. J Urol 173: 73-78).

[0417] In a related study, the prostate marker CD90 was further investigated using IHC. The data showed that CD90 is a marker for stromal cells in the prostate. The stromal cells of tumors were stained more intensely than those of benign tissue. This increased CD90 staining appeared to be a common feature for nearly every tumor specimen analyzed. The pronounced CD90 staining could serve to delineate tumor foci, as this staining difference did not appear to extend beyond the tumor area.

[0418] While not all the proteins identified from certain tissue/cell are specific to that tissue/cell, this does not preclude them as candidate tissue-specific disease markers, either on their own, or more so as part of a marker panel. In fact, any protein that changes in response to a disease or alteration in physiological state could have value as part of a panel of biomarkers for a specific disease or state, regardless of its ubiquity. Thus taken together, these data suggest that: 1) analyses of glycoproteins from tissue/cell can determine both common and tissue-specific protein profiles for cell surface and secreted proteins from disease tissues; 2) specific cell surface or secreted glycoproteins from tissue/cell are released into circulation at levels detectable by glycopeptide enrichment and MS; 3) certain disease-related changes in the expression patterns of cell surface and secreted proteins from tissue/cell should similarly be detectable in blood.

[0419] In conclusion, in this present study, N-linked glycopeptides were isolated from tissues, cells and plasma, and the peptide sequences and proteins that they represent were identified via MS-based proteomics. Glycoproteins identified from the individual tissue and cell types were compared with those identified from plasma. In each case, a significant overlap was observed between the tissue/cell glycoproteins and those observed in plasma. Taken together, these data demonstrate that extracellular glycoproteins originating from tissues and cells are released into the blood at levels that are detectable by MS. They also demonstrate that the use of a single, simple solid-phase based enrichment of glycoproteins/glycopeptides from blood plasma, upstream of LC-MS analysis, is sufficient to allow for measurement and profiling of such tissue-derived and cellular proteins in plasma. Thus this example demonstrated that the largely untested assumption that MS-based proteomic screens are able to detect tissue/cell-derived proteins in the blood is indeed correct, identifed tissue-derived serum glycoproteins useful in a variety of diagnostic settings, and described a methodology capable of accessing such proteins and potential biological and physiological insights they promise.

### Example 2

### Database to Display Identified and Predicted N-Linked Glycopeptides

[0420] The large number of N-linked glycopeptides identified in plasma from our study were mapped to all of the theoretical tryptic N-linked glycosylation sequons from the human IPI database (version 2.28). A web interface, UniPep (www dot unipep dot org) was developed to display these theoretical N—X—S/T sequon-containing peptides in the human IPI database along with their corresponding experimentally identified N-linked glycopeptides. This is of particular relevance with respect to those genes or proteins that have been shown to change their abundance in disease tissues compared to normal tissues using either genomic or proteomic approaches. The detection of these proteins in plasma, especially ones that are secreted or expressed on cell surfaces and are therefore most likely to make their way into blood plasma, is a critical step in the development of these proteins as potential disease biomarkers. Gene differential expression analysis has shown that many of the genes up-regulated in ovarian cancer represent surface or secreted proteins such as claudin-3 and -4, HE4, mucin-1, epithelial cellular adhesion molecule, and mesothelin, making surface or secreted proteins from these genes attractive candidate biomarkers that are likely detectable in body fluids (35, 68). In this case, the potential N-linked glycopeptides are selected via UniPep, and heavy isotopic labeled peptides can then be synthesized as standards to determine their presence and to further quantify their abundance in blood.

[0421] For each protein in the UniPep database, the database displays three different types of information to allow selection of potential N-linked glycopeptides when scanning the IPI protein database. First, the subcellular location of the protein is predicted. Since N-linked glycosylation is likely to occur in extracellular surface or secreted proteins, we predicted the subcellular localization of each one using a commercial version of the TMHMM algorithm (69), a combination of hidden Markov model (HMM) algorithms (70) and transmembrane (TM) region predictions. By so doing, we were able to categorize each protein as being either extracellular, secreted, transmembrane, or intracellular. The predicted protein subcellular localization is displayed in UniPep along with other protein information from database annotations, and the signal peptides and transmembrane sequences are highlighted in the protein sequence to give a general indication of protein topology. Second, the sequences of all potential N-linked glycopeptides within each protein are displayed as predicted N-linked glycopeptides. For the predicted peptides that have also been experimentally identified in our dataset, the probability score of the peptide identification is indicated. This allows one to select a potential glycopeptide based on its experimental identification or its predicted glycosylation site. Third, we determined the uniqueness of each predicted N-linked glycopeptide by searching for each sequence within the entire IPI protein database. Peptides present in multiple proteins are indicated by multiple database hits (FIG. 5, number of other proteins with the peptide). Uniqueness of a peptide sequence mapping to a particular protein within the human IPI database is taken to be a necessary condition for assigning a peptide to a protein identification and subsequent quantification (63).

### Example 3

### Quantitative Analysis of Proteins Secreted into the Extracellular Space of Prostate Cancer Tissues using SPEG and LC-MS/MS

[0422] Proteins present in the extracellular matrix contain proteins secreted from cells that are likely deposited into the blood. To identify proteins in the cell-free extracellular matrix of prostate cancer, samples (0.1 g) from patient-matched prostate cancer and adjacent control prostate tissues were processed by collagenase digestion into single cell suspensions, and the cell-free digestion media, containing secreted proteins in extracellular matrix, was analyzed. The samples were run on an SDS-PAGE gel. Silver staining showed minimal protein degradation, and a PSA Western blot showed a prominent reacting band at the expected molecular weight for PSA. To eliminate the analysis of abundant cytoplasmic proteins released from dead cells, the glycoproteins were isolated from the cell-free digestion media using SPEG. The isotopic labeled glycopeptides isolated from control and cancer tissues were then identified by LC-MS/MS. The MS/MS spectra were searched against the human database using SEQUEST. The identified proteins were quantified using the stable isotope quantification software, ASAPRatio (Li, X. J., Zhang, H., Ranish, J. A., and Aebersold, R. (2003) Anal Chem 75, 6648-6657). The results showed that all identified proteins were known to be secreted, thus validating the capture approach, and that the more abundant prostatic proteins of PAP and PSA were readily found. Other identified proteins included Igγ-2C, lumican, serum amyloid A-4, α-1-antitrypsin, plasma protease C1 inhibitor, complement C3, α-2-macroglobulin, haptoglobins, AMBP, α-1-antichymotrypsin, carboxypeptidase N chain, α-1-acid glycoprotein, TIMP1, complement C4, apolipoprotein B-100, kininogen, inter-α-trypsin inhibitor H4, complement C1q subcomponent, peptidoglycan recognition protein L, membrane copper amine oxidase, microfibril-associated glycoprotein 4, collagen α1, laminin γ1, acid ceramidiase, and zinc-α2-glycoprotein (ZAG). The protein with the best statistical score for differential expression in this experiment was TIMP1. The level of the identified glycopeptide from TIMP1 in cancer tissue was only 0.255 fold of that in control tissue.

[0423] Differential TIMP1 expression was next verified by Western blotting of cell-free media from cancer and normal prostate tissues using an anti-TIMP1 monoclonal antibody (clone 7-6C1, Chemicon). Equal amounts of protein (100 μg) from cell-free media of cancer and control tissues were separated on a 4-15% SDS-polyacrylamide gel (Bio-Rad), and transferred to Hybond-P membranes (Amersham Biosciences). The membranes were probed with anti-TIMP1. Anti-ZAG, (shown to be present in the same amount in cancer and control prostate samples by isotopic labeling and MS/MS analysis) (clone H-21, Santa Cruz Biotechnology) and anti-PSA (clone A67-B/E3, Santa Cruz Biotechnology) were also used to ensure equal loading of samples.

[0424] The amount of detectable TIMP1 in cancer tissue was several fold less than that in control tissue. A control blot using an antibody to ZAG showed that this protein was not differentially expressed between cancer and control tissue. Next, immunohistochemistry was carried out with this antibody. The staining result showed that TIMP1 was localized to luminal cells of benign glands (99-022H); tumor tissue had patchy or no staining of the cancer cells in the two cases with cancer (99-044A and 99-066C). The biological function of TIMP1 and other members of this class of inhibitors is to modulate the metalloproteinases (MMP) (Visse, R., and Nagase, H. (2003) Circ Res 92, 827-839). This finding correlates well with a published report on an increased ratio of MMP/TIMP1 in extracts of cancer vs. non-cancer prostate tissues (Jung, K., Lein, M., Ulbrich, N., Rudolph, B., Henke, W., Schnorr, D., and Loening, S. A. (1998) Prostate 34, 130-136). The imbalance is therefore due primarily to lowered TIMP-1 expression in cancer. As a consequence, the increased MMP activity may promote a number of processes that favor a cancerous state. These include degradation of extracellular matrix, tissue remodeling, release of factors beneficial to tumor establishment and growth, and neovascularization of the tumor tissue (McCawley, L. J., and Matrisian, L. M. (2000) Mol Med Today 6, 149-15). Not surprisingly, it has been shown that induced expression of TIMP1 in prostate cancer cells could suppress their invasive activity (Tachibana, K., Shimizu, T., Tonami, K., and Takeda, K. (2002) Biochem Biophys Res Commun 295, 489-494).

### Example 4

### Quantitative Analysis of Plasma Proteins with SPEG and LC-MS—Reducing the Complexity of Plasma-Derived Peptide Mixture and Increasing Sensitivity and Throughput

[0425] The selective isolation of the N-linked glycosylated peptides using SPEG results in a substantial improvement in the number of proteins detected and the concentration limit of detection since the complexity of the analyzed sample is significantly reduced. This is because the number of peptides per protein isolated by SPEG is significantly reduced. At constant detection sensitivity for the mass spectrometer used, the concentration limit for detection is directly dependent on the amount of sample applied to the capillary column of the LC-MS system. To estimate the extent of sample complexity reduction achieved by SPEG compared to the total unfractionated tryptic peptides, we analyzed plasma tryptic peptide samples generated with and without glycopeptide selection. The peptides were detected by a liquid chromatography electrospray ionization quadrupole-time-of-flight (LC-ESI-QTOF), in which the tryptic peptides from 50 nl of serum was applied. Fifty nl of plasma contains approximately 4 μg of protein, which represents the upper limit of loading capacity for the 75 μm i.d. capillary column used here. Indeed, the considerable streaking of highly abundant peptides in the horizontal axis indicated that the column capacity has already been reached or exceeded (Li, X. J., Pedrioli, P. G., Eng, J., Martin, D., Yi, E. C., Lee, H., and Aebersold, R. (2004) Anal Chem 76, 3856-3860), even at this low sample load. On the other hand, an equivalent display of a LC-MS run in which peptides recovered by SPEG from 5 μl of plasma sample were analyzed. From these data, it was immediately apparent that the pattern was much cleaner with better resolved peptides. Since 5 μl of plasma contains approximately 400 μg of protein, the glycopeptide capture strategy therefore allows for the analysis of 100 times more plasma in a single LC-MS analysis and thus the detection of lower abundance species compared to whole plasma analysis.

### Example 5

### Detection of Tumor-Specific P53 Sequences in Blood of Women with Ovarian Cancer

[0426] Investigators have been searching for molecular signatures from patients' blood to detect cancer early to improve patient's survival rate for ovarian cancer. Gene analyses of cancer have shown that alterations of several genes have been identified in a significant fraction of cancer patients, and tumor-specific DNA can be detected in cancer patients' blood samples for several cancer types (Nawroz, H., Koch, W., Anker, P., Stroun, M., and Sidransky, D. (1996) Nat Med 2, 1035-1037; Esteller, M., Sanchez-Cespedes, M., Rosell, R., Sidransky, D., Baylin, S. B., and Herman, J. G. (1999) Cancer Res 59, 67-70; Mulcahy, H. E., Lyautey, J., Lederrey, C., qi Chen, X., Anker, P., Alstead, E. M., Ballinger, A., Farthing, M. J., and Stroun, M. (1998) Clin Cancer Res 4, 271-275). p53 mutations are the most common single somatic alteration in ovarian cancer and occur in early as well as advanced staged disease (Okamoto, A., Sameshima, Y., Yokoyama, S., Terashima, Y., Sugimura, T., Terada, M., and Yokota, J. (1991) Cancer Res 51, 5171-5176; Kohler, M. F., Kerns, B. J., Humphrey, P. A., Marks, J. R., Bast, R. C., Jr., and Berchuck, A. (1993) Obstet Gynecol 81, 643-650). Mutations in p53 may be a sensitive indicator of the presence of circulating tumor DNA (Hibi, K., Robinson, C. R., Booker, S., Wu, L., Hamilton, S. R., Sidransky, D., and Jen, J. (1998) Cancer Res 58, 1405-1407; Silva, J. M., Dominguez, G., Garcia, J. M., Gonzalez, R., Villanueva, M. J., Navarro, F., Provencio, M., San Martin, S., Espana, P., and Bonilla, F. (1999) Cancer Res 59, 3251-3256). Using the tumor tissues and patient-matched blood samples collected by the University of Washington Gynecologic Oncology Tissue Bank, it has been found that somatic p53 mutations were detected in 69 of 137 tumors (50%). Forty-eight (70%) mutations were missense, occurring exclusively in exons 5-8. Twenty-one (30%) mutations were null mutations, consisting of 10 nonsense (14%), nine deletion (13%), and two splice site (3%) mutations. Twelve (17%) mutations occurred in exons 4 (N=7), 9 (N=2) or 10 (N=3).

[0427] Using ligase detection reaction for the 69 cases with somatic p53 mutations, the tumor-specific p53 sequences were detected in 21 plasma or serum samples (30%) from women with epithelial ovarian cancer. The results showed that the tumor DNA in plasma or serum was associated with patient prognosis and found that overall survival was significantly reduced in cases with tumor DNA in plasma (87). This indicated that free tumor DNA in plasma or serum was present in one-third of women with advanced ovarian cancer and was a strong independent predictor of decreased survival. The quantity of total DNA among women with ovarian cancer did not predict the presence of tumor-derived DNA sequences in plasma. Thus, simply quantifying DNA in plasma does not predict survival nor substitute for specific assays that identify tumor-derived sequences. Free tumor DNA in blood may represent a new biomarker in ovarian cancer. However, the poor sensitivity of circulating tumor DNA for identifying women with even advanced ovarian cancer points out the necessity of developing new protein-based biomarkers to create a blood-based test for ovarian cancer screening.

### Example 6

### High-Throughput Validation of Target Peptides in Plasma by Mass Spectrometry using Stable Isotope Labeled Synthetic Peptides

[0428] Once glycopeptides and proteins are identified from disease tissues, they will be detected and quantified in blood. Traditionally, antibodies recognizing these candidate proteins need to be used to detect the proteins. A mass spectrometry-based screening technology was developed that allows specific targeting of certain peptides/proteins with biological significance in a complex sample for identification and quantification. For each potential peptide identified from tissues, the identified formerly N-linked glycopeptide was chemically synthesized, labeled with at least one heavy isotope amino acid, and spiked in peptides isolated from plasma using SPEG. During MS analysis, this representative stable isotope labeled peptide standard distinguishes itself from the corresponding native peptide by a mass difference corresponding to the stable isotope label. Knowing the exact mass, sequence and quantity of the standard peptide, the peptide standard and its isotopic pair isolated from plasma can be located and selectively sequenced for identification, the quantification being achieved by the abundance ratio of spiked peptide to native peptide. Using specific mass matching to search the MS spectra, the spot (or spots) containing the peptide pairs was located. By examining the MS spectrum, the paired peaks (spiked and native) were determined. The identification of the peptides was further confirmed by MS/MS and SEQUEST database searching. The concentration of the native peptide was estimated from the abundance ratio of the peptide pair. Since this approach directly focuses on interesting peptides/proteins for identification and quantification, and the separation of peptide mixture for MALDI-TOF/TOF is done offline of a mass spectrometer, it technically increases the sample loading capacity, avoids some difficult issues associated with sample complexity, and thus significantly improves the throughput and sensitivity.

### Example 7

### Specific Enrichment of Target Peptides from Complex Samples to Increase Sensitivity using VICAT

[0429] VICAT reagents are a set of three related reagents, each with its own purpose (Bottari, P., Aebersold, R., Turecek, F., and Gelb, M. H. (2004) Bioconjug Chem 15, 380-388; Lu, Y., Bottari, P., Turecek, F., Aebersold, R., and Gelb, M. H. (2004) Anal Chem 76, 4104-4111). Each reagent contains an iodoacetamido group for selective attachment to the Cys sulfhydryl groups of peptides, and a biotinyl moiety for selective capture of tagged peptides using solid-phase streptavidin. One of the VICAT reagents, ¹⁴C-VICAT_{SH} (−28) is made “visible” by the fact that it contains a ¹⁴C-labeled methyl group. This facilitates our ability to track peptides or proteins tagged with these reagents using scintillation counting or autoradiography. Additionally, the ¹⁴C reagent is 28 mass units lighter than the non-radiolabeled VICAT_{SH} reagent, owing to the fact that the latter contains a diaminobutane linker rather than the ethylenediamine linker of the former. The third reagent VICAT_{SH} (+6) is chemically identical to VICAT_{SH} but is 6 mass units heavier due to the presence of 4 carbon-13 and 2 nitrogen-15 atoms in the diaminobutane linker. These mass differences are such that for a mixture of a single peptide labeled with all three, when run on an HPLC system, the VICAT_{SH}(+6) and VICAT_{SH} labeled peptides will co-migrate, but the ¹⁴C-VICAT_{SH}(−28) will resolve away from them by virtue of a shorter carbon chain. Finally, these reagents contain a photocleavable linker for release of tagged peptides from solid-phase streptavidin. After photocleavage, only a small fragment of the tag (including the isotope tag but not the radiolabel) is left attached to the cysteine SH group of the peptide (CH₂CONHCH₂CH₂CH₂CH₂NH₂ in the case of peptides tagged with VICAT_{SH}), and this group has 3 different masses so that the same peptide tagged with the 3 different VICAT_{SH} reagents are distinguishable in the mass spectrometer.

[0430] Preliminary data have proven this approach successful and superior to immunoblotting for absolute protein quantification, such as determining the absolute abundance of human group V phospholipase A2 (hGV) in human lung macrophages (Lu, Y., Bottari, P., Turecek, F., Aebersold, R., and Gelb, M. H. (2004) Anal Chem 76, 4104-4111). While immunoblot analyses were inconclusive, the application of VICAT allowed for isolation of hGV from whole cell lysate by following ¹⁴C-VICAT-labeled hGV peptides, and subsequent MS determination of an hGV concentration of 50 fmol per 100 μg of cell protein. By identification of potential cancer markers using large scale analysis of cancer tissues and plasma, the VICAT strategy can be used to enrich the target peptides from plasma and verify their association with cancer progression and with disease and control states, and for those of sufficient informational quality, provide invaluable absolute quantitative information (both concentration and range) to enable more rapid development of ELISA-based assays.

### Example 8

### Software Tools for Proteomic Data Analysis

[0431] Software tools for the analysis of the data generated by mass spectrometry have been generated. They include the following:

[0432] Peptide ProPhet: A tool that calculates accurate probabilities that a peptide has been correctly identified (Keller, A., Nesvizhskii, A. I., Kolker, E., and Aebersold, R. (2002) Anal Chem 74, 5383-5392).

[0433] Protein ProPhet: A tool that calculates accurate probabilities that a protein has been correctly identified based on the peptides matching to that protein (Nesvizhskii, A. I., Keller, A., Kolker, E., and Aebersold, R. (2003) Anal Chem 75, 4646-4658).

[0434] ASAPRatio: A tool for accurate quantification of peptides and proteins based on stable isotope ratios (Li, X. J., Zhang, H., Ranish, J. A., and Aebersold, R. (2003) Anal Chem 75, 6648-6657).

[0435] SpecArray: A tool to deconvolute the features detected by LC-MS into unique peptides and record each peak in three-dimensions (retention time, m/z, and intensity), to match peptides obtained from multiple analyses of different samples using LC-MS, and to quantify the matched peptides (Li, X. J., Yi, E. C., Kemp, C. J., Zhang, H., and Aebersold, R. (2005) Mol Cell Proteomics 4, 1328-1340).

[0436] PeptideAtlas and Plasma PeptideAtlas: A database mapping peptides derived from diverse proteomic experiments using tandem mass spectrometry (MS) data to eukaryotic genomes (PeptideAtlas) (Desiere, F., Deutsch, E. W., Nesvizhskii, A. I., Mallick, P., King, N. L., Eng, J. K., Aderem, A., Boyle, R., Brunner, E., Donohoe, S., Fausto, N., Hafen, E., Hood, L., Katze, M. G., Kennedy, K. A., Kregenow, F., Lee, H., Lin, B., Martin, D., Ranish, J. A., Rawlings, D. J., Samelson, L. E., Shiio, Y., Watts, J. D., Wollscheid, B., Wright, M. E., Yan, W., Yang, L., Yi, E. C., Zhang, H., and Aebersold, R. (2005) Genome Biol 6, R9), and a database mapping peptides identified from human plasma using tandem mass spectrometry data (Plasma PeptideAtlas) (Deutsch, E. W., Eng, J. K., Zhang, H., King, N. L., Nesvizhskii, A. I., Lin, B., Lee, H., Yi, E. C., Ossola, R., and Aebersold, R. (2005) Proteomics 5, 3497-3500).

### Example 9

### Determination of Peptides that are Ovary Tissue-Derived and Detectable from Blood using Glycopeptide Capture and Mass Spectrometry

[0437] Cancer cells differ from normal cells by the molecular and structural signatures that contribute to the cancer syndrome. The circulation of these molecular signatures may aid in monitoring cancer progression (as surrogate markers through their detection in body fluids). Secreted proteins and cell surface proteins from cancer cells are likely released into systemic circulation at low abundance and can be detected in blood. However, blood samples from individuals are expected to be more heterogeneous than cancer tissues since blood content can be affected by different physiological conditions such as age, sex, diet, and the time of the day at which the samples were collected. Due to these factors, identifying ovarian cancer biomarkers in plasma requires more targeted analyses of tissue-derived proteins in the background of other variations in the plasma proteome using a platform with high reproducibility and sensitivity.

[0438] General outline of the method: The reduced complexity and increased sensitivity (100-fold compared to unfractionated tryptic peptides of plasma proteins), throughput (96 sample preparations per week using the robotic system, and 30 sample analyses per week per mass spectrometer using LC-MS) and reproducibility (median CV <25% ((47)) using the robotic system for glycopeptide capture and automatic LC-MS analysis can be used to detect ovarian cancer-specific proteins in blood (47). Twenty pairs of ovarian cancer tissues and patient-matched blood samples collected prior to surgical therapy are analyzed. N-linked glycopeptides are analyzed from tissues and plasma samples, peptide patterns are generated by LC-MS or a list of identified peptides by LC-MS/MS, align and analyze the pattern for each patient, determine the common peptides from both tissue and plasma, and identify the peptide sequences. A list of peptides from each ovarian cancer tissue is generated with peptide characteristics such as mass, retention time, intensity, detectability in plasma, the stages at the surgery, and the clinical outcomes and other patient's information as related to the cancer case of each cancer tissue. A database will be established to store and query this information. This database provides the candidate proteins that can be further followed in a larger scale study using cancer tissues and blood samples collected longitudinally following primary surgical treatment. Since the same SPEG will be used in both tissue and plasma, the peptides and proteins can be compared in order to identify the maximum number of overlapping proteins present in the blood and the cancer tissue from the same patient.

[0439] Clinical samples: Twenty tissue-plasma pairs will be selected representing each stage of ovarian cancer (stage I to IV) and all of the common epithelial histologies (serous, mucinous, endometrioid, clear cell and undifferentiated). Tumors were surgically staged according to the International Federation of Obstetrics and Gynecology (FIGO) criteria (92). Blood was drawn pre-operatively and plasma frozen at −80C., All tissues will be from primary ovarian cancers without previous chemotherapy exposure.

[0440] Sample Preparation:

[0441] Purification of formerly N-linked glycosylated peptides from plasma using SPEG as described herein. Briefly, proteins from 200 μl of plasma samples in coupling buffer (100 mM NaAc and 150 mM NaCl, pH 5.5) are oxidized in 10 mM of sodium periodate at room temperature for 1 hour. After removal of sodium periodate by desalting column, the sample is conjugated to the hydrazide resin at room temperature for 10-24 hours. Non-glycoproteins are then removed by washing the resin 6 times with an equal volume of urea solution (8M urea/0.4M NH₄HCO₃, pH 8.3). After the last wash and removal of the urea solution, the resin is diluted with 3 bed volumes of water. Trypsin is added at a concentration of 1 μg of trypsin/200 μg of protein and digested at 37° C. overnight. The peptides are reduced by adding 8 mM TCEP (PIERCE, Rockford, Ill.) at room temperature for 30 min, and alkylated by adding 10 mM iodoacetamide at room temperature for 30 min. The trypsin-released peptides are removed by washing the resin three times with 1.5 M NaCl, 80% Acetonitrile, 100% methanol, and six times with 0.1 M NH₄HCO₃. N-linked glycopeptides are then released from the resin by addition of PNGase F (at a concentration of 1 μl of PNGase F/40 mg of protein) overnight. The released peptides are dried and resuspended in 0.4% acetic acid for MS analysis.

[0442] Cell surface and secreted proteins from tissues: The tissue is homogenized in 100 mM phosphate buffer (pH7.5) with 150 mM NaCl and 1% Triton X-100 on ice. The protein amounts will be measured using a BCA protein analysis kit (Pierce, Rockford, Ill.). Membrane proteins and secreted extracellular proteins will be specifically enriched from the total tissue lysate using SPEG described above to avoid the analysis of cytoplasmic proteins since surface proteins and secreted proteins are mostly glycosylated but cysoplasmic proteins are not. The same amounts of crude extracellular proteins will be used to isolate N-linked glycopeptides from each tissue sample.

[0443] Identify glycopeptides by LC-MS and LC-MS/MS from tissues and plasma samples and determine whether tissue-derived peptides can be detected in patient matched plasma sample

[0444] The isolated formerly N-linked glycopeptides (20 samples from tissues and 20 from patient-matched plasma) will be analyzed in three repeated analyses by LC-MS/MS using a linear ion trap mass spectrometer (LTQ, ThemoFinnigan, 120 runs) to achieve the highest sensitivity for sequencing of peptides present in tissues and plasma samples. MS/MS spectra obtained for these peptides will be used to identify the peptides by searching sequence databases using the SEQUEST software (48). The peptides identified only in tissue or plasma, and in both tissue and plasma can be determined by comparing the identified peptide lists and mass/retention time of peptide ions.

[0445] The glycopeptides isolated from plasma and tissues will also be analyzed by MALDI-TOF/TOF (ABI 4700 Proteomics Analyzer, Applied Biosystems) after front-end separation of peptides using reversed phase chromatography. The advantage of this platform is its high mass accuracy, resolution, throughput, sensitivity, and the ability to do targeted MS/MS analysis on peptides of interest. Since the separation is performed off-line, more peptide samples can be loaded onto the separation columns in order to increase the sensitivity. Multiple plates can also be spotted and analyzed by MALDI-TOF/TOF to increase the throughput. This platform will also be used in the direct follow up analysis of potential peptides during the cancer treatment using heavy isotope labeled synthetic peptide standards. Nano scale HPLC pumps will be used in both instruments for reproducible peptide elution patterns using reversed phase separation. The mass, retention time, and intensity of each identified peptide is determined using our recently developed SpecArray program (62). After pattern analysis, all the peptides from tissue and the common features in patient-matched plasma samples will be identified. The same MALDI plate will be reanalyzed and MS/MS spectra will be acquired at spots where the common peptides have been located from plasma sample for targeted MS/MS analysis using MALDI-TOF/TOF instrument.

[0446] Database for Identified Ovarian Cancer Tissue-Derived Peptides

[0447] A database will be established to allow exploration of each glycopeptide identified from ovarian cancer tissues. The database will display the identified peptide sequences and their proteins, their characteristics such as mass, retention time, intensity, their detectability in patient plasma, the stages of cancer in which the peptides are identified, and the cancer progression and clinical outcome for each cancer case. This database can be developed from our existing UniPep database, which displays all the potential and identified N-linked glycosylaltion sites for all proteins in protein database with additional fields for ovarian related information. The database will be linked to other protein and gene databases such as SwissProt, GeneCard, and EST database (dbEST) to allow users to explore the function of the protein, tissue specific expression, and any known relevant studies related to the disease.

### Example 10

### Mass Spectrometry-Independent Tests to Detect Ovarian Cancer Associated Proteins with Blood Samples and Improved Ability for Early Detection of Ovarian Cancer in the Relapsed Patient Population

[0448] In order to validate the candidate markers from ovarian tissues in large population of patients and determine the specificity and sensitivity of the candidate markers for ovarian cancer diagnosis prognosis, an assay for clinical use is developed. The results can be compared with the CA125 test in the same population of patients.

[0449] General outline of the method: Antibody-based detection methods are widely used in the clinical lab for CA125 test. A similar platform will be developed to detect the candidate cancer proteins using patients' blood samples longitudinally collected before and after therapy. Antibodies against the candidate proteins will be developed and used to test the protein in parallel with CA125 with blood samples. The capability to detect cancer at an earlier time of recurrence for better prognosis will be used to assess the value of the new test. If the protein of the candidate peptide can not be detected by an immunodetection method, the protein glycosylation changes (not total protein abundance) may be responsible for the detected difference. If this is the case, detection of the identified formerly N-linked peptides will be developed. We will assemble a test kit that includes the necessary reagents, plates with immobilized antibodies or peptides for clinical use.

[0450] ELISA test for proteins: Most serum tests are based on ELISA tests. The assay system utilizes two antibodies directed against different antigenic regions of the candidate protein. When the antibodies to the candidate protein are available, we will test whether the total protein amount is associated with cancer by developing an assay using ELISA. For example, a monoclonal antibody directed against a distinct antigenic determinant on the intact candidate protein is used for solid phase immobilization on the microtiter wells. A detection antibody conjugated to horseradish peroxidase (HRP) or fluorescence tag recognizes the candidate protein with different region of the same protein. The candidate protein reacts simultaneously with the two antibodies, resulting in the protein being sandwiched between the solid phase and detection antibody. The detection antibody can be visualized by color metric fluorescence analysis.

[0451] Test for peptides: In the case that 1) the formerly N-linked glycopeptide, but not the protein, is associated with ovarian cancer progression, or 2) two antibodies against the same proteins are not available or difficult to generate, we plan to develop tests for the cancer-specific candidate peptides identified and validated as described herein. In certain cases, the common sandwich ELISA test for proteins may not be applied to peptide antigens due to the small size of peptides to generate two antibodies against to the same short peptide sequence. In these cases, we plan to develop tests for the formerly N-linked glycopepetides as shown in FIG. 5.

[0452] The procedure has the following steps: 1) immobilize a certain amount of antibody against the specific peptide on the microtiter plate through immunoglobulin's carbohydrate groups leaving the antigen binding sites exposed to the surface, 2) dispense isolated peptides (from plasma of patients or controls), peptide antigen standards (with different concentrations) into appropriate wells and incubate, 3) add fluorescence labeled peptide antigen into each well and incubate, 4) wash the wells and read the plate with fluorescence plate reader. Optionally, the isolated peptides or peptide antigen standards can be labeled with different fluorescence tags before dispensing to the plate in step 2. Two different fluorescent colors can then be detected simultaneously for sensitive and accurate measurement (FIG. 5).

[0453] Test the candidate proteins/peptides with the plasma samples collected during the cancer therapy of ovarian cancer patients to determine their ability to detect cancer recurrence early: Once the test is developed, the complete reagents as a testing kit are made that can be used in clinical labs. The tests will be applied to plasma samples from retrospectively collected plasma samples, and the prospective plasma samples collected during the project. The sensitivity of detecting recurrent cancer at earlier timepoints compared to CA125 and the ability of the new marker to complement CA125 will be used to assess the value of the new tests. In samples obtained at diagnosis, the candidate markers can also be tested for prognostic value taking into account other prognostic factors (stage, age, adequacy of surgical cytoreduction).

### Example 11

### Direct Follow-Up Analysis of Overlapping Peptides in Blood to Determine Response to Primary Cancer Therapy and Association with Cancer Recurrence using Synthetic Heavy Isotope Labeled Peptides

[0454] A list of formerly N-linked glycopeptides detected in both ovarian cancer tissues and their patient-matched plasma samples from different clinical stages and outcome of cancer progression will be identified as described herein. These peptides have the potential to be blood biomarkers to detect ovarian cancer. They can be derived from normal ovary cells, early curable stage and chemo-sensitive ovarian tumor cells, or late stage and chemo-resistant ovarian cancer cells. They will be further investigated in blood samples from normal and ovarian cancer patients along the following lines: 1) the identified peptides and proteins are verified using different platforms than the original LC-MS-based discovery approach. 2) The relationship of each peptide in blood with ovarian cancer progression after primary surgical therapy is established. 3) The specificity and sensitivity of candidate markers is determined by screening suitable populations of human plasma samples from patients with ovarian cancer and appropriate controls. These require a high throughput analysis of a large number of proteins identified from tissue and blood. Immuno assays using specific antibodies are commonly used in validation studies of proteins. However, in certain embodiments, it may be desirable to use synthetic peptides with heavy isotope labeling for the following reasons 1) the abundance of glycopeptides identified from tissues and blood samples reflects the abundance of the a glycoprotein and the occupancy of a specific glycosylation site of the peptide, therefore total protein analysis using antibody against the protein may not detect the relevance of the specific glycopeptides identified; 2) Antibodies may not available to all proteins; 3) The synthetic peptide maintains the same characteristics of the native peptide; the chromatographic retention time and the MS/MS spectrum of the synthetic peptide can be used to identify a specific peptide while the heavy isotope labeling allows the quantification of the peptide using mass spectrometry.

[0455] General Outline of the Method:

[0456] The peptides identified from ovarian cancer tissues are tested to determine if the the peptides are biomarkers in blood. Longitudinally collected blood samples from 50 patients are analyzed and compared to the performance of the potential proteins with serum CA125, which is measured from the same patients

[0457] We will quantify and identify every selected glycopeptide identified in both ovarian cancer tissues and patient-matched plasma using plasma samples before and after primary surgical therapy. The heavy isotope-labeled version of the selected peptides will be synthesized and spiked into glycopeptides isolated from plasma samples. The peptides then can be separated and analyzed by LC-MS and LC-MS/MS as shown previously (61)

[0458] Prospective collection of clinical samples: We will enroll 50 cases with advanced ovarian cancer (stage III or IV). Approximately 60% of women with advanced ovarian cancers will be optimally debulked (residual tumor <1 cm in greatest diameter) at the time of initial surgery. Thus, we expect to enroll 30 women with optimally debulked disease and 20 women with suboptimally debulked (residual tumor >1 cm in diameter) disease. Blood will be collected pre-operatively, three months after surgery and then every six months after surgery until clinical diagnosis of recurrence. Patient clinical follow-up will be obtained until death. We will send subjects blood collection and shipping kits prior to each blood draw. The blood samples of greatest utility for testing potential diagnostic markers are those obtained during clinical remission at defined intervals prior to recurrence. The most useful samples are from women who have a complete response to chemotherapy and then to have a recurrence. Rate of chemotherapy response (CR) and recurrence varies based on the adequacy of surgical cytoreduction from optimal and suboptimal disease (94, 95). Of those 50 enrolled cases, we would expect 39 women to have complete chemotherapy response (13 from suboptimal disease and 26 from optimal disease) and 27 of these women with recur within 36 months of the study interval (FIG. 18). If 10% of women drop off the study we should have approximately 25 women who recur during the study interval and approximately 200 blood samples collected from these women. Blood from 100 age-matched normal individuals without history of previous cancer will also be collected as normal controls.

[0459] Synthesis and Labeling of Peptide Standards:

[0460] Candidate peptides to be synthesized and validated are selected using the following criteria: 1) the peptide presents in most tissue and plasma pairs at a specific stage; 2) the peptides are ovarian cancer cell derived rather than from classic plasma proteins from blood circulation; 3) peptides from proteins that have shown to be ovary-specific from literature or database will be given priority. During the chemical synthesis, the peptide is labeled with heavy ¹³C-and ¹⁵N-labeled D in the position where the deglycosylated D is generated from formerly N-linked glycosylated N. Since all the formerly N-linked glycopeptides contain D in the previous N—X—T/S motif, all the heavy isotope-labeled synthetic peptides will obtain a mass differential of 5 mass units from the normal peptides in plasma.

[0461] Quantitative analysis of the ovarian cancer tissue-derived peptides in plasma samples using heavy isotope labeled peptides and mass spectrometry: The synthetic peptides will be used as standards to quantify the candidate peptides from plasma samples (96). A mixture of 100 synthetic peptides with 10 fmole of each peptide is spiked into the peptides isolated from plasma samples. The peptides are spotted on MALDI plate from reversed phase separation. In this case, the mass spectrometer (MALDI-TOF/TOF) will be used to acquire a MS scan of the peptides. The known peptide mass of spiked standard heavy peptides and their light isotopic pairs isolated from plasma samples will be included in the inclusion list to acquire MS/MS spectra. The specific peptides are identified using SEQUEST search (96). Since multiple isotopically labeled synthetic peptides with known sequences, amount of peptide, retention time, and MS/MS spectrum can be used in each LC-MS and LC-MS/MS analysis to identify and quantify the peptides isolated from plasma, this method increases the throughput by allowing multiplexing.

[0462] A representative peptide corresponding to plasma membrane-associated protein was spiked into glycopeptides isolated from ovarian tissue where this peptide was originally identified and analyzed the sample by LC-MS and LC-MS/MS to validate the identification and quantification of the peptide. The synthetic peptide maintained the same characteristics as the normal peptide including the same chromatographic retention time and MS/MS spectra. The fragmentation of the synthetic peptide matched with the MS/MS spectrum derived from a normal peptide isolated from ovarian cancer tissue (97), save for the mass difference required for accurate quantification. Thus such heavy isotope labeled standard peptides could be used to verify and quantify many plasma proteins via MS using a high-throughput platform as recently demonstrated (61) on account of 1) the co-elution of the heavy isotope synthetic peptide and its light native form, 2) the similarity of the MS/MS spectra, and 3) and abundance ratio of light and heavy peptides. For this purpose, we have synthesized heavy isotope-labeled peptides that represent over 300 glycosylation sites, and they were listed with the corresponding proteins in UniPep database (63)). This is a gel-free and antibody-free approach for high-throughput peptide detection and quantification of previously identified peptides from tissues in plasma using synthetic peptides and mass spectrometry.

[0463] Data Analysis

[0464] We will analyze the relative abundance of each potential peptide identified in both ovarian tissue and plasma and quantitatively determine the response of each peptide in terms of clinical outcome during the disease development after primary surgical therapy and during chemotherapy. It is expected that ovarian tissue-derived peptides can have different responses during cancer progression: 1) Ubiquitously expressed proteins-the relative abundance of their peptides stays relatively unchanged after surgery (3 month after surgery and treatment vs 0 month before surgery) and no significant differences in case (0 month) vs control groups; 2) Ovary-specific but not cancer-associated -the relative abundance of their peptides decreases after surgical removal of ovary (3 month after surgery and treatment vs 0 month), but there is no significant difference in case (0 month) vs control groups; 3) Ovary-specific proteins associated with treatable disease-the relative abundance of their peptides decreases after surgical removal of ovarian cancer and stay low during chemotherapy; The level of proteins is higher in case vs control. These proteins may also be detected in patients with early stage cancer and the group of patients without cancer recurrence; 4) Ovary-specific proteins associated with resistant disease: the relative abundance of the peptide decreases after surgical removal of ovarian cancer and come back during chemotherapy after initial decrease due to the surgery. The level of the peptides is higher in case vs control.

### Example 12

### Improved Detection Limit of Low Abundance Tissue-Derived Peptides that are Undetectable in Blood via Direct Mass Spectrometry Analysis

[0465] The glycopeptides identified from ovarian cancer tissue but not detected in plasma using direct MS analysis may represent low abundant proteins released in small amounts from cancer tissues (see Table 1). Detecting these low abundance proteins in blood may increase the capability of detecting a cancer marker in an early stage of cancer, which is critical for cancer screening. To detect these ovarian cancer tissue-derived peptides that are not detectable in plasma by direct LC-MS analysis, a more sensitive method or targeted enrichment is used to increase the sensitivity of detecting these peptides in plasma.

[0466] General outline of the method: Immunoassays combined with fluorescence detection can be a sensitive method to detect proteins, if the antibodies are available. In this case, an enzyme-linked immunosorbent assay (ELISA) can be developed. In the case of peptides identified from cancer tissue need to be detected in blood, the specific peptide can be further enriched from peptide mixture isolated from plasma using the physico-chemical properties of the peptide or affinity reagents developed for the peptide.

[0467] The enzyme-linked immunosorbent assay (ELISA) system represents a reliable and sensitive method for detection and monitoring of a protein in blood and can be developed into a standard clinical laboratory assay. It requires pair-wise, well-characterized, high-affinity antibodies directed against a distinct antigenic determinant on the protein or peptide.

[0468] Immunoaffinity capture of glycopeptides can be used to increase the sensitivity and specificity of detecting candidate peptides in plasma samples, if further simplification beyond the SPEG method is required for detecting candidate peptides in plasma samples. This method has been shown to provide enrichment of specific peptides (97, 98, 99). Antibodies are generated against formerly N-linked glycopeptides from each candidate peptide. The antibody will be used to capture specific (glyco)peptides from a peptide mixture isolated from plasma using SPEG as well as the heavy isotopic labeled synthetic peptide standard spiked in the peptide mixture. The detection and quantification process can be described as the following steps: 1) The identified formerly N-linked glycopeptides are synthesized; 2) The synthetic peptides are used to produce antibodies; 3) The antibodies are immobilized on solid support; 4) Peptides from plasma are purified using SPEG; 5) Known amounts of heavy isotope tag-labeled peptides are spiked to the light isotope tag-labeled peptides isolated from plasma; 6) The immobilized antibodies for each glycopeptide are incubated with a binding solution containing peptides from step 5, and the resin is washed to remove peptides with nonspecific binding; 7) The affinity-captured peptides are detected by mass spectrometry; 8) The presence of light isotopic peptides and the ratio of biological light and in vitro-added heavy isotope tagged peptides are determined. Alternatively, the standard peptide can be labeled with fluorescence and spiked into the glycopeptides isolated from plasma. After affinity isolation, the peptide present in plasma can be quantified using a fluorometer (see e.g., FIG. 5).

[0469] Many protein biomarkers in the early stage of cancer development are present at exceedingly low concentrations. The detection of these proteins is generally difficult because of the “top down” operation mode of most current proteomics techniques. The antibody to a potential peptide marker can specifically capture the peptide of interest and remove other peptides from the analysis. This increases the sensitivity of the analysis. In addition, because the mass of the peptide from each enrichment is known, the mass spectrometer can focus on only scanning for the known mass, and therefore increase the sensitivity 10- to 100-fold. The detection of a known peptide mass from each affinity capture eliminates the detection of other peptides that bind to the antibody non-specifically, increasing the specificity and accuracy of quantification. The introduction of the heavy isotope-tagged peptides in the analysis also increases the accuracy of quantification, and serves as a positive control for the detection of the light isotopic form of a peptide in the biological sample. This differentiates real biological variation from experimental variation, and increases the confidence of the results.

[0470] Enrichment and verification of candidate markers using VICAT. The complexity of peptides isolated by SPEG can be further simplified by using VICAT reagents as described in preliminary results. VICAT will be employed in the following way. The amino groups of (glyco)peptides isolated by SPEG will be thioacetylated to 2-sulfhydryl-acetamido group, which then can be tagged by VICAT reagents (88). This step is necessary, since most formerly N-linked glycopeptides isolated by SPEG do not contain Cys, which are required for VICAT tagging. After thioacetylation of amino groups of synthetic peptides and of peptides isolated from plasma samples, the peptides isolated from plasma samples will be tagged with the VICAT_{SH} reagent. A known amount of a synthetic peptide standard, with the sequence of the target candidate peptide, will be tagged with VICAT_{SH}(+6). The same synthetic peptide will also be tagged with ¹⁴C-VICAT_{SH} (−28). A sufficient quantity of the latter standard, referred to as the chromatographic marker, is added to ensure that it can be tracked during chromatographic or electrophoretic separation. After peptide tagging with VICAT reagents, peptides isolated from plasma samples, the standard peptide, and the chromatographic marker are mixed and separated by isoelectric focusing (IEF) or other separation methods. The peptide fraction containing the target peptides visualized via the radioactively labeled chromatographic marker will be collected and peptides will be analyzed by mass spectrometry. Only the fraction that contains the targeted peptide is collected and further analyzed, it will significantly simplify the peptide complexity and make it possible to detect lower abundance specifically tagged peptides in highly complex plasma protein mixtures.

### Example 13

### Detection of Low Abundant Peptides in Blood and Early Detection of Disease by their Association with Primary Cancer Therapy and Cancer Recurrence

[0471] The low abundance tissue-derived peptides present in plasma may come from proteins released in small amount from cancer tissues. The increased sensitivity using the method developed herein will allow us to detect these peptides and determine whether they are associated with primary cancer therapy and can be used as markers to diagnose cancer at early stage or as indicator of progressive disease.

[0472] Once a specific enrichment method is developed for each peptide and the peptide can be detected in plasma using the improved method, we will determine the association of the these peptides with therapy and disease recurrence. These can be achieved using the same glycopeptides isolated from plasma samples longitudinally collected from cancer patients before and after primary cancer surgery. The only difference in this case is that a specific enrichment method for the target peptide or protein will be used to analyze the samples from plasma. Once a candidate marker is identified, a specific assay to detect the marker in plasma is developed as described elsewhere herein.

### Example 14

### Improvements to the Glycocapture Method: Glycoprotein Capture Versus Glycopeptide Capture

[0473] This Example describes the comparison of the glycocapture method essentially as described in US Patent Application Publication 20040023306 and a glycopeptide capture method. The results indicate that the glycopeptide capture method provides significant improvements in overall yield as well as specificity of capture.

[0474] Solid phase capture of glycosylated peptides can be achieved either from intact glycoproteins or glycopeptides. It is thought that glycopeptide capture is better, since there is no steric hinderance preventing binding of multiple glycosylation sites (as with intact glycoproteins). Another advantage to glycopeptide capture is that hydrophobic membrane proteins generally are not very soluble during glycoprotein capture. However, glycopeptides derived from the same membrane proteins will more likely exhibit favorable solubility thereby enabling enhanced capture.

[0475] The comparison between glycoprotein capture and glycopeptide capture was carried out as follows:

[0476] Reagents:

[0477] 10× coupling buffer: 50 mM EDTA, 400 mM Tris pH 8.0.

[0478] Sixty uL multiple affinity removal system (MARS) depleted serum (600 ugs) was diluted with 20 uL 10× coupling buffer, 6 uL fetuin and 110 uL water. Four uL 500 mM TCEP (10 mM final concentration) was added and the mixture incubated at room temperature (RT) for 30 minutes. 96 mg urea was added and the mixture incubated for 30 minutes at RT. 4 uL of 250 mM iodoacetamide was added and the mixture incubated for an additional 30 min at RT. 0.5 uL 1M DTT was added and the mixture incubated for 20 min at RT. The urea in the sample was diluted by adding 1 mL 40 mM Tris pH 8.0. 10 ug of sequencing grade trypsin was added and the sample incubated with constant mixing overnight at 37° C. The sample was then acidified by adding 25 uL 10% TFA. The pH was checked using paper strips.

[0479] The sample was then cleaned up by reverse phase as follows: C-18 spin columns (Macrospin column from Harvard Apparatus, Holliston, Mass.) were hydrated with 500 uL 60% ACN 0.1% TFA. Columns are then washed three times with 500 uL 2% ACN 0.1% TFA. The sample was loaded and spun. The sample was passaged twice to collect all the protein. The columns were then washed three times with 200 uL 0.1% TFA. The proteins were eluted from the column with 3×75 uL of 60% ACN, 0.1% TFA. The eluate was collected and dried using a speedvac. The dried peptides were resuspended in 160 uL 1× coupling buffer.

[0480] Forty uL 10 mg/mL sodium periodate was added for 30 minutes at RT. The oxidized sample was added to 500 uL of pre-equilibrated hydrazide beads (50% slurry in coupling buffer) and incubated at RT overnight with constant mixing. The unbound fractions were collected and stored. The bound proteins (resin) were washed twice with 1 mL of water, 1.5 M NaCl, methanol, 80% ACN, 100 mM ammonium bicarbonate (AMBIC).

[0481] After the final wash, the beads were resuspended in 300 uL of 100 mM AMBIC containing 1 uL PNGaseF ((peptide: N-glycosidase F [EC 3.5.15.2, N-linked-glycopeptide-(N-acetyl-beta-D-glucosaminyl)-L-asparagine amidohydrolase]) is an amidase which cleaves between the innermost GlcNAc and asparagine residues of high mannose, hybrid and complex oligosaccharides from N-linked glycoproteins). The beads are then incubated overnight at 37° C. with constant agitation.

[0482] Following the overnight incubation, the supernatant fraction is collected and transfered to fresh tubes. The resin was washed twice with 100 uL 80% CAN. The washes were collected each time and transferred to eluted fraction. The sample was then dried down in a speed-vac.

[0483] The samples were resuspended in water and desalted using a reverse phase column prior to cation exchange and MS analyses.

[0484] The comparison experiment was designed as follows: The commonly used glycoprotein control, Fetuin, was spiked into two background protein mixtures (CL1 cell lysate and serum) such that fetuin was 5% by weight. Each sample (CL1 and serum) was split into two fractions where one was subjected to the usual glycoprotein capture as described in US Patent Application Publication No. 20040023306 and the other was subjected to the glycopeptide capture method described above. Ninety-six pmol of a stable isotope labelled fetuin peptide (LCPDCPLLAPLDDSR (SEQ ID NO:14,918), with carbamidomethylated cysteine and ¹³C and ¹⁵N labelling of the C-terminal R) containing the N-linked site (but with the N converted to D) was spiked into the samples that contained 1092 pmol of fetuin. The samples containing the internal standard were subjected to solid phase extraction prior to Maldi-Tof analysis. Comparing the ratios of ion abundances of the internal standard versus fetuin peptide for glycopeptide and glycoprotein capture showed that the glycopeptide capture had a 20-30 fold higher yield (same results for serum or CL1 background). Similar results were obtained when analyzed by LC-Maldi.

[0485] The serum glycoprotein and glycopeptide captures were also analyzed by LCMSMS using the 4800 Maldi TofTof, and the resulting MSMS spectra obtained by data dependent analysis. The MSMS spectra were identified using Mascot.

[0486] The results showed that there are a large number of non-glycosylated peptides in the serum glycoprotein capture, but very few in the glycopeptide capture (ie, the selectivity of the glycopeptdie capture is higher). Also, the probability scores in the glycopeptide capture are much higher than for the same peptides in the glycoprotein capture, which is most likely due to higher intensity precursor ions resulting from higher capture yields. It should be noted that although glycopeptides containing N-terminal Ser or Thr are present in the glycoprotein capture list, they are absent from the glycopeptide list. This is most likely due to oxidation of the vicinal amino and hydroxyl groups. This reaction could be eliminated by first derivatizing amino groups.

[0487] In summary, these experiments indicate that glycopeptide capture is superior to glycoprotein capture with respect to yield and specificity of capture. Indeed, a direct comparison of the two procedures indicates a 20-30 fold higher yield than the glycoprotein method. The absolute yield for each of the procedures remains to be determined.

[0488] With respect to the specificity of glycopeptide identification, the peptides derived from the top twenty identified proteins from each procedure from a serum sample were examined. Glycoprotein capture resulted in the identification of 40 peptides with high confidence, of these 13 contained the N—X—S glycosylation motif, a specificity of 33%. Glycopeptide capture identified 50 peptides containing a consensus glycosylation site from 45 identified peptides (90% specificity). A more pronounced difference was observed for CL1 whole cell lysates, where none of the peptides from a glycoprotein capture experiment contained N-linked consensus sites, whereas nearly the opposite was true for glycopeptide capture (only 2 out of 27 were not glycopeptides). Both of these findings (higher yield and specificity) are a significant advancement to the technology of glycocapture. As noted above, glycopeptides containing N-terminal Ser or Thr cannot be identified by the glycopeptide capture approach, since periodate converts the Ser or Thr to an aldehyde that either is dispersed via reactions with side chains from other peptides, or is permanently attached to the hydrazide bead. As such, no N-terminal Ser nor Thr containing peptides were identified by this method. Furthermore, data exists showing the presence of the oxidized Ser on specific peptides (both MS and MSMS).

### REFERENCES

[0489] 1. R. Etzioni et al., Nat Rev Cancer 3, 243 (April 2003).

[0490] 2. E. E. Schadt et al., Nat Genet 37, 710 (July 2005).

[0491] 3. H. Dai et al., Cancer Res 65, 4059 (May 15, 2005).

[0492] 4. N. L. Anderson, N. G. Anderson, Mol Cell Proteomics 1, 845 (November 2002).

[0493] 5. R. S. Tirumalai et al., Mol Cell Proteomics 2, 1096 (October 2003).

[0494] 6. D. Nedelkov, U. A. Kiernan, E. E. Niederkofler, K. A. Tubbs, R. W. Nelson, Proc Natl Acad Sci USA 102, 10852 (Aug. 2, 2005).

[0495] 7. E. P. Diamandis, Mol Cell Proteomics 3, 367 (April 2004).

[0496] 8. H. Zhang, X. J. Li, D. B. Martin, R. Aebersold, Nat Biotechnol 21, 660 (June 2003).

[0497] 9. C. D. Hough et al., Cancer Res 60, 6281 (Nov. 15, 2000).

[0498] 10. C. D. Hough, K. R. Cho, A. B. Zonderman, D. R. Schwartz, P. J. Morin, Cancer Res 61, 3869 (May 15, 2001).

[0499] 11. J. Eng, A. L. McCormack, J. R. Yates, 3rd, J. Am. Soc. Mass Spectrom. 5, 976 (1994).

[0500] 12. X. J. Li, E. C. Yi, C. J. Kemp, H. Zhang, R. Aebersold, Mol Cell Proteomics 4, 1328 (September 2005).

[0501] 13. A. Krogh, B. Larsson, G. von Heijne, E. L. Sonnhammer, J Mol Biol 305, 567 (Jan. 19, 2001).

[0502] 14. L. D. True, A. Y. Liu, Am J Clin Pathol 120, 13 (July 2003).

[0503] 15. W. Weichert, T. Knosel, J. Bellach, M. Dietel, G. Kristiansen, J Clin Pathol 57, 1160 (November 2004).

[0504] 16. I. Kholova, A. Ryska, M. Ludvikova, L. Pecen, J. Cap, Cas Lek Cesk 142, 167 (March 2003).

[0505] 17. G. Kristiansen et al., Prostate 54, 34 (Jan. 1, 2003).

[0506] 18. G. P. Murphy et al., Cancer 78, 809 (Aug. 15, 1996).

[0507] 19. G. Murphy et al., Anticancer Res 15, 1473 (July-August 1995).

[0508] 20. K. Leitzel et al., J Clin Oncol 10, 1436 (September 1992).

[0509] 21. A. Marchetti et al., Cancer Res 62, 2535 (May 1, 2002).

[0510] 22. A. Y. Liu, H. Zhang, C. M. Sorensen, D. L. Diamond, J Urol 173, 73 (January 2005).

[0511] 23. H. Zhang et al., Mol Cell Proteomics 4, 144 (February 2005).

[0512] 24. Xu, Y., Shen, Z., Wiper, D. W., Wu, M., Morton, R. E., Elson, P., Kennedy, A. W., Belinson, J., Markman, M., and Casey, G. (1998) Jama 280, 719-723

[0513] 25. Anderson, N. L., and Anderson, N. G. (2002) Mol Cell Proteomics 1, 845-867

[0514] 26. Jemal, A., Murray, T., Ward, E., Samuels, A., Tiwari, R. C., Ghafoor, A., Feuer, E. J., and Thun, M. J. (2005) CA Cancer J Clin 55, 10-30

[0515] 27. Kennedy, A. W., and Hart, W. R. (1996) Cancer 78, 278-286

[0516] 28. Jones, M. B., Krutzsch, H., Shu, H., Zhao, Y., Liotta, L. A., Kohn, E. C., and Petricoin, E. F., 3rd. (2002) Proteomics 2, 76-84

[0517] 29. Niloff, J. M., Klug, T. L., Schaetzl, E., Zurawski, V. R., Jr., Knapp, R. C., and Bast, R. C., Jr. (1984) Am J Obstet Gynecol 148, 1057-1058

[0518] 30. Meyer, T., and Rustin, G. J. (2000) Br J Cancer 82, 1535-1538

[0519] 31. Welsh, J. B., Zarrinkar, P. P., Sapinoso, L. M., Kern, S. G., Behling, C. A., Monk, B. J., Lockhart, D. J., Burger, R. A., and Hampton, G. M. (2001) Proc Natl Acad Sci USA 98, 1176-1181

[0520] 32. Schadt, E. E., Lamb, J., Yang, X., Zhu, J., Edwards, S., Guhathakurta, D., Sieberts, S. K., Monks, S., Reitman, M., Zhang, C., Lum, P. Y., Leonardson, A., Thieringer, R., Metzger, J. M., Yang, L., Castle, J., Zhu, H., Kash, S. F., Drake, T. A., Sachs, A., and Lusis, A. J. (2005) Nat Genet 37, 710-717

[0521] 33. Dai, H., van't Veer, L., Lamb, J., He, Y. D., Mao, M., Fine, B. M., Bernards, R., van de Vijver, M., Deutsch, P., Sachs, A., Stoughton, R., and Friend, S. (2005) Cancer Res 65, 4059-4066

[0522] 34. Warrenfeltz, S., Pavlik, S., Datta, S., Kraemer, E. T., Benigno, B., and McDonald, J. F. (2004) Mol Cancer 3, 27

[0523] 35. Hough, C. D., Sherman-Baust, C. A., Pizer, E. S., Montz, F. J., Im, D. D., Rosenshein, N. B., Cho, K. R., Riggins, G. J., and Morin, P. J. (2000) Cancer Res 60, 6281-6287

[0524] 36. Aebersold, R., and Mann, M. (2003) Nature 422, 198-207

[0525] 37. Wulfkuhle, J. D., Liotta, L. A., and Petricoin, E. F. (2003) Nat Rev Cancer 3, 267-275

[0526] 38. Diamandis, E. P. (2004) Mol Cell Proteomics 3, 367-378

[0527] 39. Petricoin, E. F., Ardekani, A. M., Hitt, B. A., Levine, P. J., Fusaro, V. A., Steinberg, S. M., Mills, G. B., Simone, C., Fishman, D. A., Kohn, E. C., and Liotta, L. A. (2002) Lancet 359, 572-577

[0528] 40. Adkins, J. N., Varnum, S. M., Auberry, K. J., Moore, R. J., Angell, N. H., Smith, R. D., Springer, D. L., and Pounds, J. G. (2002) Mol Cell Proteomics 1, 947-955

[0529] 41. Tirumalai, R. S., Chan, K. C., Prieto, D. A., Issaq, H. J., Conrads, T. P., and Veenstra, T. D. (2003) Mol Cell Proteomics 2, 1096-1103

[0530] 42. Shen, Y., Jacobs, J. M., Camp, D. G., 2nd, Fang, R., Moore, R. J., Smith, R. D., Xiao, W., Davis, R. W., and Tompkins, R. G. (2004) Anal Chem 76, 1134-1144

[0531] 43. Wang, H., and Hanash, S. (2003) J Chromatogr B Analyt Technol Biomed Life Sci 787, 11-18

[0532] 44. Shin, B. K., Wang, H., and Hanash, S. (2002) J Mammary Gland Biol Neoplasia 7, 407-413

[0533] 45. Villanueva, J., Philip, J., Entenberg, D., Chaparro, C. A., Tanwar, M. K., Holland, E. C., and Tempst, P. (2004) Anal Chem 76, 1560-1570

[0534] 46. Zhang, H., Li, X. J., Martin, D. B., and Aebersold, R. (2003) Nat Biotechnol 21, 660-666

[0535] 47. Zhang, H., Yi, E. C., Li, X. J., Mallick, P., Kelly-Spratt, K. S., Masselon, C. D., Camp, D. G., 2nd, Smith, R. D., Kemp, C. J., and Aebersold, R. (2005) Mol Cell Proteomics 4, 144-155

[0536] 48. Eng, J., McCormack, A. L., and Yates, J. R., 3rd. (1994) J. Am. Soc. Mass Spectrom. 5, 976-989

[0537] 49. Han, D. K., Eng, J., Zhou, H., and Aebersold, R. (2001) Nat Biotechnol 19, 946-951

[0538] 50. Keller, A., Nesvizhskii, A. I., Kolker, E., and Aebersold, R. (2002) Anal Chem 74, 5383-5392

[0539] 51. Li, X. J., Zhang, H., Ranish, J. A., and Aebersold, R. (2003) Anal Chem 75, 6648-6657

[0540] 52. Nesvizhskii, A. I., Keller, A., Kolker, E., and Aebersold, R. (2003) Anal Chem 75, 4646-4658

[0541] 53. Zhang, H., Yan, W., and Aebersold, R. (2004) Curr Opin Chem Biol 8, 66-75

[0542] 54. Casey, R. C., Oegema, T. R., Jr., Skubitz, K. M., Pambuccian, S. E., Grindle, S. M., and Skubitz, A. P. (2003) Clin Exp Metastasis 20, 143-152

[0543] 55. Catterall, J. B., Jones, L. M., and Turner, G. A. (1999) Clin Exp Metastasis 17, 583-591

[0544] 56. Walker, B. K., Lei, H., and Krag, S. S. (1998) Biochem Biophys Res Commun 250, 264-270

[0545] 57. Couldrey, C., and Green, J. E. (2000) Breast Cancer Res 2, 321-323

[0546] 58. Pieper, R., Su, Q., Gatlin, C. L., Huang, S. T., Anderson, N. L., and Steiner, S. (2003) Proteomics 3, 422-432

[0547] 59. Putnam, F. (1975) The plasma proteins: Structure, Function, and Genetic Control, 2nd ed., Academic Press, New York, N.Y.

[0548] 60. Nedelkov, D., Kiernan, U. A., Niederkofler, E. E., Tubbs, K. A., and Nelson, R. W. (2005) Proc Natl Acad Sci USA 102, 10852-10857

[0549] 61. Pan, S., Zhang, H., Rush, J., Eng, J., Zhang, N., Patterson, D., Comb, M. J., and Aebersold, R. (2005) Mol Cell Proteomics 4, 182-190

[0550] 62. Li, X. J., Yi, E. C., Kemp, C. J., Zhang, H., and Aebersold, R. (2005) Mol Cell Proteomics 4, 1328-1340

[0551] 63. Zhang, H., Loriaux, P., Eng, J., Keller, A., Moss, P., Bonneau, R., Yi, E. C., Lee, H., Cooke, K., and Aebersold, R. (2005) submitted

[0552] 64. Zhang, H., Liu, A. Y., Loriaux, P., Wollscheid, B., Zhou, Y., Watts, J., and Aebersold, R. (2005) submitted

[0553] 65. Liu, A. Y., Zhang, H., Sorensen, C. M., and Diamond, D. L. (2005) J Urol 173, 73-78

[0554] 66. Roth, J. (2002) Chem Rev 102, 285-303

[0555] 67. Petrescu, A. J., Milac, A. L., Petrescu, S. M., Dwek, R. A., and Wormald, M. R. (2004) Glycobiology 14, 103-114

[0556] 68. Hough, C. D., Cho, K. R., Zonderman, A. B., Schwartz, D. R., and Morin, P. J. (2001) Cancer Res 61, 3869-3876

[0557] 69. Krogh, A., Larsson, B., von Heijne, G., and Sonnhammer, E. L. (2001) J Mol Biol 305, 567-580

[0558] 70. Nielsen, H., Engelbrecht, J., Brunak, S., and von Heijne, G. (1997) Protein Eng 10, 1-6

[0559] 71. True, L. D., and Liu, A. Y. (2003) Am J Clin Pathol 120, 13-15

[0560] 72. Weichert, W., Knosel, T., Bellach, J., Dietel, M., and Kristiansen, G. (2004) J Clin Pathol 57, 1160-1164

[0561] 73. Kholova, I., Ryska, A., Ludvikova, M., Pecen, L., and Cap, J. (2003) Cas Lek Cesk 142, 167-171

[0562] 74. Kristiansen, G., Pilarsky, C., Wissmann, C., Stephan, C., Weissbach, L., Loy, V., Loening, S., Dietel, M., and Rosenthal, A. (2003) Prostate 54, 34-43

[0563] 75. Visse, R., and Nagase, H. (2003) Circ Res 92, 827-839

[0564] 76. Jung, K., Lein, M., Ulbrich, N., Rudolph, B., Henke, W., Schnorr, D., and Loening, S. A. (1998) Prostate 34, 130-136

[0565] 77. McCawley, L. J., and Matrisian, L. M. (2000) Mol Med Today 6, 149-156

[0566] 78. Tachibana, K., Shimizu, T., Tonami, K., and Takeda, K. (2002) Biochem Biophys Res Commun 295, 489-494

[0567] 79. Li, X. J., Pedrioli, P. G., Eng, J., Martin, D., Yi, E. C., Lee, H., and Aebersold, R. (2004) Anal Chem 76, 3856-3860

[0568] 80. Nawroz, H., Koch, W., Anker, P., Stroun, M., and Sidransky, D. (1996) Nat Med 2, 1035-1037

[0569] 81. Esteller, M., Sanchez-Cespedes, M., Rosell, R., Sidransky, D., Baylin, S. B., and Herman, J. G. (1999) Cancer Res 59, 67-70

[0570] 82. Mulcahy, H. E., Lyautey, J., Lederrey, C., qi Chen, X., Anker, P., Alstead, E. M., Ballinger, A., Farthing, M. J., and Stroun, M. (1998) Clin Cancer Res 4, 271-275

[0571] 83. Okamoto, A., Sameshima, Y., Yokoyama, S., Terashima, Y., Sugimura, T., Terada, M., and Yokota, J. (1991) Cancer Res 51, 5171-5176

[0572] 84. Kohler, M. F., Kerns, B. J., Humphrey, P. A., Marks, J. R., Bast, R. C., Jr., and Berchuck, A. (1993) Obstet Gynecol 81, 643-650

[0573] 85. Hibi, K., Robinson, C. R., Booker, S., Wu, L., Hamilton, S. R., Sidransky, D., and Jen, J. (1998) Cancer Res 58, 1405-1407

[0574] 86. Silva, J. M., Dominguez, G., Garcia, J. M., Gonzalez, R., Villanueva, M. J., Navarro, F., Provencio, M., San Martin, S., Espana, P., and Bonilla, F. (1999) Cancer Res 59, 3251-3256

[0575] 87. Swisher, E. M., Wollan, M., Mahtani, S. M., Willner, J. B., Garcia, R., Goff, B. A., and King, M. C. (2005) Am J Obstet Gynecol 193, 662-667

[0576] 88. Bottari, P., Aebersold, R., Turecek, F., and Gelb, M. H. (2004) Bioconjug Chem 15, 380-388

[0577] 89. Lu, Y., Bottari, P., Turecek, F., Aebersold, R., and Gelb, M. H. (2004) Anal Chem 76, 4104-4111

[0578] 90. Desiere, F., Deutsch, E. W., Nesvizhskii, A. I., Mallick, P., King, N. L., Eng, J. K., Aderem, A., Boyle, R., Brunner, E., Donohoe, S., Fausto, N., Hafen, E., Hood, L., Katze, M. G., Kennedy, K. A., Kregenow, F., Lee, H., Lin, B., Martin, D., Ranish, J. A., Rawlings, D. J., Samelson, L. E., Shiio, Y., Watts, J. D., Wollscheid, B., Wright, M. E., Yan, W., Yang, L., Yi, E. C., Zhang, H., and Aebersold, R. (2005) Genome Biol 6, R9

[0579] 91. Deutsch, E. W., Eng, J. K., Zhang, H., King, N. L., Nesvizhskii, A. I., Lin, B., Lee, H., Yi, E. C., Ossola, R., and Aebersold, R. (2005) Proteomics 5, 3497-3500

[0580] 92. Pecorelli, S., Benedet, J. L., Creasman, W. T., and Shepherd, J. H. (1999) Int J Gynaecol Obstet 65, 243-249

[0581] 93. Gygi, S. P., Rist, B., Gerber, S. A., Turecek, F., Gelb, M. H., and Aebersold, R. (1999) Nat Biotechnol 17, 994-999

[0582] 94. McGuire, W. P., Hoskins, W. J., Brady, M. F., Kucera, P. R., Partridge, E. E., Look, K. Y., Clarke-Pearson, D. L., and Davidson, M. (1996) N Engl J Med 334, 1-6

[0583] 95. Ozols, R. F., Bundy, B. N., Greer, B. E., Fowler, J. M., Clarke-Pearson, D., Burger, R. A., Mannel, R. S., DeGeest, K., Hartenbach, E. M., and Baergen, R. (2003) J Clin Oncol 21, 3194-3200

[0584] 96. Gerber, S. A., Rush, J., Stemman, O., Kirschner, M. W., and Gygi, S. P. (2003) Proc Natl Acad Sci USA 100, 6940-6945

[0585] 97. Rush, J., Moritz, A., Lee, K. A., Guo, A., Goss, V. L., Spek, E. J., Zhang, H., Zha, X. M., Polakiewicz, R. D., and Comb, M. J. (2005) Nat Biotechnol 23, 94-101

[0586] 98. Zhang, H., Zha, X., Tan, Y., Hornbeck, P. V., Mastrangelo, A. J., Alessi, D. R., Polakiewicz, R. D., and Comb, M. J. (2002) J Biol Chem 277, 39379-39387

[0587] 99. Anderson, N. L., Anderson, N. G., Haines, L. R., Hardie, D. B., Olafson, R. W., and Pearson, T. W. (2004) J Proteome Res 3, 235-244

[0588] All of the U.S. patents, U.S. patent application publications, U.S. patent applications, foreign patents, foreign patent applications and non-patent publications referred to in this specification and/or listed in the Application Data Sheet, are incorporated herein by reference, in their entirety.

[0589] From the foregoing it will be appreciated that, although specific embodiments of the invention have been described herein for purposes of illustration, various modifications may be made without deviating from the spirit and scope of the invention. Accordingly, the invention is not limited except as by the appended claims.

The application's sequence listing, which the Patent Office published only in electronic form, follows.

SEQUENCE LISTING (14918 sequences)

SEQ ID NO: 1 - protein, 26 aa, Homo sapiens
KMVSHHNLTTGATLINEQWLLTTAKN

SEQ ID NO: 2 - protein, 15 aa, Homo sapiens
KNLFLNHSENATAKD

SEQ ID NO: 3 - protein, 34 aa, Homo sapiens
KADTHDEILEGLNFNLTEIPEAQIHEGFQELLRT

SEQ ID NO: 4 - protein, 18 aa, Homo sapiens
KYLGNATAIFFLPDEGKL

SEQ ID NO: 5 - protein, 23 aa, Homo sapiens
RLAGKPTHVNVSVVMAEVDGTCY

SEQ ID NO: 6 - protein, 18 aa, Homo sapiens
KVVLHPNYSQVDIGLIKL

SEQ ID NO: 7 - protein, 23 aa, Homo sapiens
RQQQHLFGSNVTDCSGNFCLFRS

SEQ ID NO: 8 - protein, 23 aa, Homo sapiens
KTVLTPATNHMGNVTFTIPANRE

SEQ ID NO: 9 - protein, 29 aa, Homo sapiens
RLSLHRPALEDLLLGSEANLTCTLTGLRD

SEQ ID NO: 10 - protein, 24 aa, Homo sapiens
KGCVLLSYLNETVTVSASLESVRG

SEQ ID NO: 11 - protein, 27 aa, Homo sapiens
RGNRSLFTDLEAENDVLHCVAFAVPKS

SEQ ID NO: 12 - protein, 9 aa, Homo sapiens
RENGTISRY

SEQ ID NO: 13 - protein, 37 aa, Homo sapiens
RGNEANYYSNATTDEHGLVQFSINTTNVMGTSLTVRV

SEQ ID NO: 14 - protein, 11 aa, Homo sapiens
REEQFNSTFRV

SEQ ID NO: 15 - protein, 34 aa, Homo sapiens
KSLGNVNFTVSAEALESQELCGTEVPSVPEHGRK

SEQ ID NO: 16 - protein, 22 aa, Homo sapiens
KFNLTETSEAEIHQSFQHLLRT

SEQ ID NO: 17 - protein, 24 aa, Homo sapiens
KAALAAFNAQNNGSNFQLEEISRA

SEQ ID NO: 18 - protein, 18 aa, Homo sapiens
KSVQEIQATFFYFTPNKT

SEQ ID NO: 19 - protein, 23 aa, Homo sapiens
RSPYYNVSDEISFHCYDGYTLRG

SEQ ID NO: 20 - protein, 8 aa, Homo sapiens
RNEEYNKS

SEQ ID NO: 21 - protein, 19 aa, Homo sapiens
KELHHLQEQNVSNAFLDKG

SEQ ID NO: 22 - protein, 32 aa, Homo sapiens
RQLAHQSNSTNIFFSPVSIATAFAMLSLGTKA

SEQ ID NO: 23 - protein, 14 aa, Homo sapiens
KLNAENNATFYFKI

SEQ ID NO: 24 - protein, 23 aa, Homo sapiens
KVGQLQLSHNLSLVILVPQNLKH

SEQ ID NO: 25 - protein, 18 aa, Homo sapiens
RFSDGLESNSSTQFEVKK

SEQ ID NO: 26 - protein, 21 aa, Homo sapiens
KSLTFNETYQDISELVYGAKL

SEQ ID NO: 27 - protein, 18 aa, Homo sapiens
KYTGNASALFILPDQDKM

SEQ ID NO: 28 - protein, 22 aa, Homo sapiens
RTLNQSSDELQLSMGNAMFVKE

SEQ ID NO: 29 - protein, 18 aa, Homo sapiens
KEHEGAIYPDNTTDFQRA

SEQ ID NO: 30 - protein, 11 aa, Homo sapiens
REEQYNSTYRV

SEQ ID NO: 31 - protein, 24 aa, Homo sapiens
RADGTVNQIEGEATPVNLTEPAKL

SEQ ID NO: 32 - protein, 21 aa, Homo sapiens
RVLSNNSDANLELINTWVAKN

SEQ ID NO: 33 - protein, 14 aa, Homo sapiens
RITYSIVQTNCSKE

SEQ ID NO: 34 - protein, 32 aa, Homo sapiens
KIVLDPSGSMNIYLVLDGSDSIGASNFTGAKK

SEQ ID NO: 35 - protein, 21 aa, Homo sapiens
KVSNQTLSLFFTVLQDVPVRD

SEQ ID NO: 36 - protein, 17 aa, Homo sapiens
KALPQPQNVTSLLGCTH

SEQ ID NO: 37 - protein, 17 aa, Homo sapiens
KVCQDCPLLAPLNDTRV

SEQ ID NO: 38 - protein, 22 aa, Homo sapiens
KAFITNFSMNIDGMTYPGIIKE

SEQ ID NO: 39 - protein, 27 aa, Homo sapiens
KLPTQNITFQTESSVAEQEAEFQSPKY

SEQ ID NO: 40 - protein, 12 aa, Homo sapiens
TNATLDQITGKW

SEQ ID NO: 41 - protein, 24 aa, Homo sapiens
RHGIQYFNNNTQHSSLFMLNEVKR

SEQ ID NO: 42 - protein, 15 aa, Homo sapiens
RSWPAVGNCSSALRW

SEQ ID NO: 43 - protein, 20 aa, Homo sapiens
KIPCSQPPQIEHGTINSSRS

SEQ ID NO: 44 - protein, 25 aa, Homo sapiens
KGLKFNLTETSEAEIHQSFQHLLRT

SEQ ID NO: 45 - protein, 16 aa, Homo sapiens
KGAFISNFSMTVDGKT

SEQ ID NO: 46 - protein, 35 aa, Homo sapiens
REGDHEFLEVPEAQEDVEATFPVHQPGNYSCSYRT

SEQ ID NO: 47 - protein, 18 aa, Homo sapiens
KLGACNDTLQQLMEVFKF

SEQ ID NO: 48 - protein, 11 aa, Homo sapiens
RFGCEIENNRS

SEQ ID NO: 49 - protein, 31 aa, Homo sapiens
RDTAVFECLPQHAMFGNDTITCTTHGNWTKL

SEQ ID NO: 50 - protein, 20 aa, Homo sapiens
KDIVEYYNDSNGSHVLQGRF

SEQ ID NO: 51 - protein, 16 aa, Homo sapiens
RLANLTQGEDQYYLRV

SEQ ID NO: 52 - protein, 10 aa, Homo sapiens
RDTFVNASRT

SEQ ID NO: 53 - protein, 13 aa, Homo sapiens
RENISDPTSPLRT

SEQ ID NO: 54 - protein, 15 aa, Homo sapiens
RVYKPSAGNNSLYRD

SEQ ID NO: 55 - protein, 29 aa, Homo sapiens
RNISDGFDGIPDNVDAALALPAHSYSGRE

SEQ ID NO: 56 - protein, 30 aa, Homo sapiens
RNPPMGGNVVIFDTVITNQEEPYQNHSGRF

SEQ ID NO: 57 - protein, 25 aa, Homo sapiens
KNNATVHEQVGGPSLTSDLQAQSKG

SEQ ID NO: 58 - protein, 15 aa, Homo sapiens
KLPPGLLANFTLLRT

SEQ ID NO: 59 - protein, 15 aa, Homo sapiens
KCGLVPVLAENYNKS

SEQ ID NO: 60 - protein, 13 aa, Homo sapiens
RGLNVTLSSTGRN

SEQ ID NO: 61 - protein, 19 aa, Homo sapiens
KLHINHNNLTESVGPLPKS

SEQ ID NO: 62 - protein, 23 aa, Homo sapiens
RASSNPNATSSSSQDPESLQDRG

SEQ ID NO: 63 - protein, 35 aa, Homo sapiens
KIITILEEEMNVSVCGLYTYGKPVPGHVTVSICRK

SEQ ID NO: 64 - protein, 22 aa, Homo sapiens
KMLNTSSLLEQLNEQFNWVSRL

SEQ ID NO: 65 - protein, 34 aa, Homo sapiens
KTHTNISESHPNATFSAVGEASICEDDWNSGERF

SEQ ID NO: 66 - protein, 34 aa, Homo sapiens
KTHTNISESHPNATFSAVGEASICEDDWDSGERF

SEQ ID NO: 67 - protein, 25 aa, Homo sapiens
RVENTTVYYLVLDVQESDCSVLSRK

SEQ ID NO: 68 - protein, 24 aa, Homo sapiens
KVTQVYAENGTVLQGSTVASVYKG

SEQ ID NO: 69 - protein, 27 aa, Homo sapiens
KICDLLVANNHFAHFFAPQNLTNMNKN

SEQ ID NO: 70 - protein, 22 aa, Homo sapiens
KENLTAPGSDSAVFFEQGTTRI

SEQ ID NO: 71 - protein, 23 aa, Homo sapiens
RSQILEGLGFNLTELSESDVHRG

SEQ ID NO: 72 - protein, 22 aa, Homo sapiens
KLDAPTNLQFVNETDSTVLVRW

SEQ ID NO: 73 - protein, 24 aa, Homo sapiens
RCSDGWSFDATTLDDNGTMLFFKG

SEQ ID NO: 74 - protein, 16 aa, Homo sapiens
RAQLLQGLGFNLTERS

SEQ ID NO: 75 - protein, 11 aa, Homo sapiens
REEQFNSTYRV

SEQ ID NO: 76 - protein, 24 aa, Homo sapiens
KAFENVTDLQWLILDHNLLENSKI

SEQ ID NO: 77 - protein, 15 aa, Homo sapiens
RCIQANYSLMENGKI

SEQ ID NO: 78 - protein, 12 aa, Homo sapiens
LANVTLTCQARL

SEQ ID NO: 79 - protein, 17 aa, Homo sapiens
KYNSQNQSNNQFVLYRI

SEQ ID NO: 80 - protein, 11 aa, Homo sapiens
KNNSDISSTRG

SEQ ID NO: 81 - protein, 24 aa, Homo sapiens
KVTQNLTLIEESLTSEFIHDIDRE

SEQ ID NO: 82 - protein, 23 aa, Homo sapiens
KNPVGLIGAENATGETDPSHSKF

SEQ ID NO: 83 - protein, 23 aa, Homo sapiens
RVYIHPFHLVIHNESTCEQLAKA

SEQ ID NO: 84 - protein, 21 aa, Homo sapiens
KLGSFEGLVNLTFIHLQHNRL

SEQ ID NO: 85 - protein, 23 aa, Homo sapiens
RGLTFQQNASSMCVPDQDTAIRV

SEQ ID NO: 86 - protein, 15 aa, Homo sapiens
KMDGASNVTCINSRW

SEQ ID NO: 87 - protein, 23 aa, Homo sapiens
KSTGKPTLYNVSLVMSDTAGTCY

SEQ ID NO: 88 - protein, 12 aa, Homo sapiens
KHANWTLTPLKS

SEQ ID NO: 89 - protein, 31 aa, Homo sapiens
RYFYNGTSMACETFQYGGCMGNGNNFVTEKE

SEQ ID NO: 90 - protein, 27 aa, Homo sapiens
RLEPVHLQLQCMSQEQLAQVAANATKE

SEQ ID NO: 91 - protein, 11 aa, Homo sapiens
KTPLTANITKS

SEQ ID NO: 92 - protein, 21 aa, Homo sapiens
RVIDFNCTTSSVSSALANTKD

SEQ ID NO: 93 - protein, 14 aa, Homo sapiens
RYAEDKFNETTEKS

SEQ ID NO: 94 - protein, 19 aa, Homo sapiens
RFEVDSPVYNATWSASLKN

SEQ ID NO: 95 - protein, 20 aa, Homo sapiens
RDQCIVDDITYNVNDTFHKR

SEQ ID NO: 96 - protein, 11 aa, Homo sapiens
VPITNATLDRI

SEQ ID NO: 97 - protein, 12 aa, Homo sapiens
RDIENFNSTQKF

SEQ ID NO: 98 - protein, 14 aa, Homo sapiens
KFLNNGTCTAEGKF

SEQ ID NO: 99 - protein, 15 aa, Homo sapiens
RIYSGILNLSDITKD

SEQ ID NO: 100 - protein, 10 aa, Homo sapiens
KEDALNETRE

SEQ ID NO: 101 - protein, 20 aa, Homo sapiens
RAVNITSENLIDDVVSLIRG

SEQ ID NO: 102 - protein, 15 aa, Homo sapiens
RISEENETTCYMGKW

SEQ ID NO: 103 - protein, 36 aa, Homo sapiens
RWDPEVNCSMAQIQLCPPPPQIPNSHNMTTTLNYRD

SEQ ID NO: 104 - protein, 23 aa, Homo sapiens
RGFGVAIVGNYTAALPTEAALRT

SEQ ID NO: 105 - protein, 27 aa, Homo sapiens
RSPYEMFGDEEVMCLNGNWTEPPQCKD

SEQ ID NO: 106 - protein, 17 aa, Homo sapiens
KFVEGSHNSTVSLTTKN

SEQ ID NO: 107 - protein, 20 aa, Homo sapiens
KIYPGVDFGGEELNVTFVKG

SEQ ID NO: 108 - protein, 25 aa, Homo sapiens
RYPHKPEINSTTHPGADLQENFCRN

SEQ ID NO: 109 - protein, 11 aa, Homo sapiens
REEQYNSTFRV

SEQ ID NO: 110 - protein, 21 aa, Homo sapiens
KEGYSNISYIVVNHQGISSRL

SEQ ID NO: 111 - protein, 13 aa, Homo sapiens
KLGNWSAMPSCKA

SEQ ID NO: 112 - protein, 14 aa, Homo sapiens
KFLNDTMAVYEAKL

SEQ ID NO: 113 - protein, 29 aa, Homo sapiens
RLEDLEVTGSSFLNLSTNIFSNLTSLGKL

SEQ ID NO: 114 - protein, 19 aa, Homo sapiens
KLSDLSINSTECLHVHCRG

SEQ ID NO: 115 - protein, 32 aa, Homo sapiens
RFSLLGHASISCTVENETIGVWRPSPPTCEKI

SEQ ID NO: 116 - protein, 21 aa, Homo sapiens
KTLYETEVFSTDFSNISAAKQ

SEQ ID NO: 117 - protein, 17 aa, Homo sapiens
RFNSSYLQGTNQITGRY

SEQ ID NO: 118 - protein, 15 aa, Homo sapiens
RLQNNENNISCVERG

SEQ ID NO: 119 - protein, 11 aa, Homo sapiens
REQQFNSTFRV

SEQ ID NO: 120 - protein, 21 aa, Homo sapiens
KDVQIIVFPEDGIHGFNFTRT

SEQ ID NO: 121 - protein, 17 aa, Homo sapiens
KDLQSLEDILHQVENKT

SEQ ID NO: 122 - protein, 32 aa, Homo sapiens
KVTISGVYDLGDVLEEMGIADLFTNQANFSRI

SEQ ID NO: 123 - protein, 25 aa, Homo sapiens
KTELFSSSCPGGIMLNETGQGYQRF

SEQ ID NO: 124 - protein, 17 aa, Homo sapiens
KVTACHSSQPNATLYKM

SEQ ID NO: 125 - protein, 27 aa, Homo sapiens
RESVTDHVNLITPLEKPLQNFTLCFRA

SEQ ID NO: 126 - protein, 23 aa, Homo sapiens
KLYLGSNNLTALHPALFQNLSKL

SEQ ID NO: 127 - protein, 24 aa, Homo sapiens
KELPGVCNETMMALWEECKPCLKQ

SEQ ID NO: 128 - protein, 15 aa, Homo sapiens
KYDFNSSMLYSTAKG

SEQ ID NO: 129 - protein, 19 aa, Homo sapiens
KLGTSLSSGHVLMNGTLKQ

SEQ ID NO: 130 - protein, 16 aa, Homo sapiens
SPLDEENLTQENQDRG

SEQ ID NO: 131 - protein, 22 aa, Homo sapiens
RQLEEFLNQSSPFYFWMNGDRI

SEQ ID NO: 132 - protein, 23 aa, Homo sapiens
KHGVIISSTVDTYENGSSVEYRC

SEQ ID NO: 133 - protein, 17 aa, Homo sapiens
KEYESYSDFERNVTEKM

SEQ ID NO: 134 - protein, 32 aa, Homo sapiens
KAVLQLNEEGVDTAGSTGVTLNLTSKPIILRF

SEQ ID NO: 135 - protein, 32 aa, Homo sapiens
RLSHNELADSGIPGNSFNVSSLVELDLSYNKL

SEQ ID NO: 136 - protein, 12 aa, Homo sapiens
WSESGQNVTARN

SEQ ID NO: 137 - protein, 15 aa, Homo sapiens
KNLSMPLLPADFHKE

SEQ ID NO: 138 - protein, 10 aa, Homo sapiens
KDFVNASSKY

SEQ ID NO: 139 - protein, 12 aa, Homo sapiens
KNFTENDLLVRI

SEQ ID NO: 140 - protein, 16 aa, Homo sapiens
RGGSSGWSGGLAQNRS

SEQ ID NO: 141 - protein, 21 aa, Homo sapiens
KLQAPLNYTEFQKPICLPSKG

SEQ ID NO: 142 - protein, 22 aa, Homo sapiens
KEHETCLAPELYNGNYSTTQKT

SEQ ID NO: 143 - protein, 27 aa, Homo sapiens
RLGHCPDPVLVNGEFSSSGPVNVSDKI

SEQ ID NO: 144 - protein, 13 aa, Homo sapiens
KLINDYVKNGTRG

SEQ ID NO: 145 - protein, 28 aa, Homo sapiens
RANLSSQALQMSLDYGFVTPLTSMSIRG

SEQ ID NO: 146 - protein, 22 aa, Homo sapiens
RMAWPEDHVFISTPSFNYTGRD

SEQ ID NO: 147 - protein, 27 aa, Homo sapiens
KVSEHIPVYQQEENQTDVWTLLNGSKD

SEQ ID NO: 148 - protein, 18 aa, Homo sapiens
RVLYLAAYNCTLRPVSKK

SEQ ID NO: 149 - protein, 17 aa, Homo sapiens
KQVHFFVNASDVDNVKA

SEQ ID NO: 150 - protein, 32 aa, Homo sapiens
RLYHFLLGAWSLNATELDPCPLSPELLGLTKE

SEQ ID NO: 151 - protein, 10 aa, Homo sapiens
KNGSLFAFRG

SEQ ID NO: 152 - protein, 26 aa, Homo sapiens
KEHEAQSNASLDVFLGHTNVEELMKL

SEQ ID NO: 153 - protein, 16 aa, Homo sapiens
KNTTCQDLQIEVTVKG

SEQ ID NO: 154 - protein, 15 aa, Homo sapiens
RALGFENATQALGRA

SEQ ID NO: 155 - protein, 34 aa, Homo sapiens
KNCGVNCSGDVFTALIGEIASPNYPKPYPENSRC

SEQ ID NO: 156 - protein, 12 aa, Homo sapiens
KTMFPNLTDVRE

SEQ ID NO: 157 - protein, 25 aa, Homo sapiens
KWNITMESYVVHTNYDEYAIFLTKK

SEQ ID NO: 158 - protein, 23 aa, Homo sapiens
RIYSNHSALESLALIPLQAPLKT

SEQ ID NO: 159 - protein, 20 aa, Homo sapiens
KVDYESQSTDTQNFSSESKR

SEQ ID NO: 160 - protein, 33 aa, Homo sapiens
RQDGEEVLQCMPVCGRPVTPIAQNQTTLGSSRA

SEQ ID NO: 161 - protein, 13 aa, Homo sapiens
LALGAQNHTLQRL

SEQ ID NO: 162 - protein, 21 aa, Homo sapiens
KQVLFLDTVYGNCSTHFTVKT

SEQ ID NO: 163 - protein, 12 aa, Homo sapiens
KEWDNTTTECRL

SEQ ID NO: 164 - protein, 18 aa, Homo sapiens
RHEEGHMLNCTCFGQGRG

SEQ ID NO: 165 - protein, 14 aa, Homo sapiens
KIDSTGNVTNELRV

SEQ ID NO: 166 - protein, 20 aa, Homo sapiens
RFSYSKNETYQLFLSYSSKK

SEQ ID NO: 167 - protein, 17 aa, Homo sapiens
FNLTHLPANLLQGASKL

SEQ ID NO: 168 - protein, 23 aa, Homo sapiens
KMLLTFHTDFSNEENGTIMFYKG

SEQ ID NO: 169 - protein, 25 aa, Homo sapiens
RVYLQGLIDYYLFGNSSTVLEDSKS

SEQ ID NO: 170 - protein, 23 aa, Homo sapiens
RVVGVPYQGNATALFILPSEGKM

SEQ ID NO: 171 - protein, 13 aa, Homo sapiens
KDFYVDENTTVRV

SEQ ID NO: 172 - protein, 21 aa, Homo sapiens
RGTAGNALMDGASQLMGENRT

SEQ ID NO: 173 - protein, 16 aa, Homo sapiens
RDSVSVVLGQHFFNRT

SEQ ID NO: 174 - protein, 16 aa, Homo sapiens
KAGLQAFFQVQECNKS

SEQ ID NO: 175 - protein, 14 aa, Homo sapiens
KEGHFYYNISEVKV

SEQ ID NO: 176 - protein, 20 aa, Homo sapiens
KINNDFNYEFYNSTWSYVKH

SEQ ID NO: 177 - protein, 10 aa, Homo sapiens
KTLFCNASKE

SEQ ID NO: 178 - protein, 23 aa, Homo sapiens
RIVGGTNSSWGEWPWQVSLQVKL

SEQ ID NO: 179 - protein, 10 aa, Homo sapiens
KMFSQNDTRC

SEQ ID NO: 180 - protein, 20 aa, Homo sapiens
RYQFNTNVVFSNNGTLVDRY

SEQ ID NO: 181 - protein, 19 aa, Homo sapiens
RNGTGHGNSTHHGPEYMRC

SEQ ID NO: 182 - protein, 28 aa, Homo sapiens
RSIPACVPWSPYLFQPNDTCIVSGWGRE

SEQ ID NO: 183 - protein, 11 aa, Homo sapiens
KWVSNKTEGRI

SEQ ID NO: 184 - protein, 21 aa, Homo sapiens
KSVVAPATDGGLNLTSTFLRK

SEQ ID NO: 185 - protein, 25 aa, Homo sapiens
KLEFALLFLVFDENESWYLDDNIKT

SEQ ID NO: 186 - protein, 19 aa, Homo sapiens
RFQSPAGTEALFELHNISV

SEQ ID NO: 187 - protein, 25 aa, Homo sapiens
DSANYSCVYVDLKPPFGGSAPSERL

SEQ ID NO: 188 - protein, 13 aa, Homo sapiens
NAAYVNMSNHHRG

SEQ ID NO: 189 - protein, 15 aa, Homo sapiens
KNAHGEEKENLTARA

SEQ ID NO: 190 - protein, 16 aa, Homo sapiens
LDYLNETQQLTPEVKS

SEQ ID NO: 191 - protein, 18 aa, Homo sapiens
RGCNDSDVLAVAGFALRD

SEQ ID NO: 192 - protein, 13 aa, Homo sapiens
RGLCVNASAVSRL

SEQ ID NO: 193 - protein, 18 aa, Homo sapiens
KFNPGAESVVLSNSTLKF

SEQ ID NO: 194 - protein, 10 aa, Homo sapiens
RGVNFNVSKV

SEQ ID NO: 195 - protein, 14 aa, Homo sapiens
KVSNVSCQASVSRM

SEQ ID NO: 196 - protein, 12 aa, Homo sapiens
RAFGSNPNLTKV

SEQ ID NO: 197 - protein, 14 aa, Homo sapiens
KGLNLTEDTYKPRI

SEQ ID NO: 198 - protein, 14 aa, Homo sapiens
RDNYTDLVAIQNKA

SEQ ID NO: 199 - protein, 33 aa, Homo sapiens
KDQYVEPENVTIQCDSGYGVVGPQSITCSGNRT

SEQ ID NO: 200 - protein, 34 aa, Homo sapiens
KNSVLNSSTAEHSSPYSEDPIEDPLQPDVTGIRL

SEQ ID NO: 201 - protein, 13 aa, Homo sapiens
KLNVEAANWTVRG

SEQ ID NO: 202 - protein, 23 aa, Homo sapiens
KAGAFLGLTNVAVMNLSGNCLRN

SEQ ID NO: 203 - protein, 26 aa, Homo sapiens
KHYLMWGLSSDFWGEKPNLSYIIGKD

SEQ ID NO: 204 - protein, 9 aa, Homo sapiens
KVLNFTTKA

SEQ ID NO: 205 - protein, 11 aa, Homo sapiens
RFNDTEVLQRL

SEQ ID NO: 206 - protein, 16 aa, Homo sapiens
VGNGTVFFILPDKGKM

SEQ ID NO: 207 - protein, 21 aa, Homo sapiens
KVVNNSPQPQNVVFDVQIPKG

SEQ ID NO: 208 - protein, 21 aa, Homo sapiens
KFVQGNSTEVACHPGYGLPKA

SEQ ID NO: 209 - protein, 33 aa, Homo sapiens
RQLDMLDLSNNSLASVPEGLWASLGQPNWDMRD

SEQ ID NO: 210 - protein, 22 aa, Homo sapiens
KLTDTICGVGNMSANASDQERT

SEQ ID NO: 211 - protein, 33 aa, Homo sapiens
KNMASRPYSIYPHGVTFSPYEDEVNSSFTSGRN

SEQ ID NO: 212 - protein, 11 aa, Homo sapiens
KSLTFNETYQD

SEQ ID NO: 213 - protein, 25 aa, Homo sapiens
KALGISPFHEHAEVVFTANDSGPRR

SEQ ID NO: 214 - protein, 17 aa, Homo sapiens
RVFHIHNESWVLLTPKA

SEQ ID NO: 215 - protein, 23 aa, Homo sapiens
RGLTFQQNASSMCGPDQDTAIRV

SEQ ID NO: 216 - protein, 12 aa, Homo sapiens
RVELEDFNGNRT

SEQ ID NO: 217 - protein, 22 aa, Homo sapiens
RAYLLPAPPAPGNASESEEDRS

SEQ ID NO: 218 - protein, 11 aa, Homo sapiens
RLDVDQALNRS

SEQ ID NO: 219 - protein, 25 aa, Homo sapiens
RFEQLELRPVLYNYLDKNLTVSVHV

SEQ ID NO: 220 - protein, 15 aa, Homo sapiens
RNHSCEPCQTLAVRS

SEQ ID NO: 221 - protein, 18 aa, Homo sapiens
RVNQNLVYESGSLNFSKL

SEQ ID NO: 222 - protein, 18 aa, Homo sapiens
RNQALNLSLAYSFVTPLT

SEQ ID NO: 223 - protein, 24 aa, Homo sapiens
KGFLALYQTVAVNYSQPISEASRG

SEQ ID NO: 224 - protein, 24 aa, Homo sapiens
KFHDVSESTHWTPFLNASVHYIRE

SEQ ID NO: 225 - protein, 13 aa, Homo sapiens
NIQVQENFNISRI

SEQ ID NO: 226 - protein, 12 aa, Homo sapiens
RCFLGNGTGYRG

SEQ ID NO: 227 - protein, 16 aa, Homo sapiens
RTVIRPFYLTNSSGVD

SEQ ID NO: 228 - protein, 21 aa, Homo sapiens
KLETTVNYTDSQRPICLPSKG

SEQ ID NO: 229 - protein, 11 aa, Homo sapiens
RGICNSSDVRG

SEQ ID NO: 230 - protein, 9 aa, Homo sapiens
RNYTLTGRD

SEQ ID NO: 231 - protein, 12 aa, Homo sapiens
KNGTAVCATNRR

SEQ ID NO: 232 - protein, 22 aa, Homo sapiens
LVSGNNTVPFAVSLVDSTSEKS

SEQ ID NO: 233 - protein, 24 aa, Homo sapiens
RLSLLEEPGNGTFTVILNQLTSRD

SEQ ID NO: 234 - protein, 17 aa, Homo sapiens
KGELNTSIFSSRPIDKF

SEQ ID NO: 235 - protein, 12 aa, Homo sapiens
KCGNCSLTTLKD

SEQ ID NO: 236 - protein, 14 aa, Homo sapiens
RLVPHMNVSAVEKQ

SEQ ID NO: 237 - protein, 11 aa, Homo sapiens
KELLETVVNRT

SEQ ID NO: 238 - protein, 20 aa, Homo sapiens
HCAGNGSWVNEVLGPELPKC

SEQ ID NO: 239 - protein, 19 aa, Homo sapiens
KYNQNFSAGNNENIMEAHV

SEQ ID NO: 240 - protein, 19 aa, Homo sapiens
KDFEDLYTPVNGSIVIVRA

SEQ ID NO: 241 - protein, 14 aa, Homo sapiens
NQLVDALTTWQNKT

SEQ ID NO: 242 - protein, 24 aa, Homo sapiens
KAATCINPLNGSVCERPANHSAKQ

SEQ ID NO: 243 - protein, 9 aa, Homo sapiens
KDKNCTSRL

SEQ ID NO: 244 - protein, 20 aa, Homo sapiens
KNQSVNVFLGHTAIDEMLKL

SEQ ID NO: 245 - protein, 22 aa, Homo sapiens
KFNTTYINIGSSYFPEHGYFRA

SEQ ID NO: 246 - protein, 14 aa, Homo sapiens
RANISHKDMQLGRL

SEQ ID NO: 247 - protein, 16 aa, Homo sapiens
KAFNSTLPTMAQMEKA

SEQ ID NO: 248 - protein, 11 aa, Homo sapiens
KHNFSHCCSKV

SEQ ID NO: 249 - protein, 27 aa, Homo sapiens
REVSFLNCSLDNGGCTHYCLEEVGWRR

SEQ ID NO: 250 - protein, 26 aa, Homo sapiens
KGTGNDTVLNVALLNVISNQECNIKH

SEQ ID NO: 251 - protein, 10 aa, Homo sapiens
RHNSTGCLRM

SEQ ID NO: 252 - protein, 18 aa, Homo sapiens
REILSVDCSTNNPSQAKL

SEQ ID NO: 253 - protein, 20 aa, Homo sapiens
KNNFNGSLVQASYQHEELRR

SEQ ID NO: 254 - protein, 24 aa, Homo sapiens
RSAPVPVTTQNPPGAPPNVSGRRH

SEQ ID NO: 255 - protein, 28 aa, Homo sapiens
RWLNVQLSPWQGSLGLQYNASQEWDLRS

SEQ ID NO: 256 - protein, 21 aa, Homo sapiens
RVVAEGFDFANGINISPDGKY

SEQ ID NO: 257 - protein, 14 aa, Homo sapiens
RDNYTKAEEILSRS

SEQ ID NO: 258 - protein, 31 aa, Homo sapiens
RNCQDIDECVTGIHNCSINETCFNIQGGFRC

SEQ ID NO: 259 - protein, 15 aa, Homo sapiens
KSPDVINGSPISQKI

SEQ ID NO: 260 - protein, 18 aa, Homo sapiens
RSLEAINGSGLQMGLQRV

SEQ ID NO: 261 - protein, 13 aa, Homo sapiens
KNVTFWGRPLPRC

SEQ ID NO: 262 - protein, 24 aa, Homo sapiens
KALQAVYSMMSWPDDVPPEGWNRT

SEQ ID NO: 263 - protein, 16 aa, Homo sapiens
RWFSAGLASNSSWLRE

SEQ ID NO: 264 - protein, 13 aa, Homo sapiens
KANQQLNFTEAKE

SEQ ID NO: 265 - protein, 9 aa, Homo sapiens
RENGTVSRY

SEQ ID NO: 266 - protein, 15 aa, Homo sapiens
RSSTSSIDSNISSKS

SEQ ID NO: 267 - protein, 16 aa, Homo sapiens
RDGQLLPSSNYSNIKI

SEQ ID NO: 268 - protein, 24 aa, Homo sapiens
RCMWSSALNSLNLSFAGLEQVPKG

SEQ ID NO: 269 - protein, 37 aa, Homo sapiens
RFVQAICEGDDCQPPAYTYNNITCASPPEVVGLDLRD

SEQ ID NO: 270 - protein, 20 aa, Homo sapiens
RYNWSFIHCPACQCNGHSKC

SEQ ID NO: 271 - protein, 11 aa, Homo sapiens
KWSDIWNATKY

SEQ ID NO: 272 - protein, 16 aa, Homo sapiens
KQSVPAHFVALNGSKL

SEQ ID NO: 273 - protein, 22 aa, Homo sapiens
RSHEIWTHSCPQSPGNGTDASH

SEQ ID NO: 274 - protein, 28 aa, Homo sapiens
KMPSQAPTGNFYPQPLLNSSMCLEDSRY

SEQ ID NO: 275 - protein, 14 aa, Homo sapiens
RVYSGILNQSEIKE

SEQ ID NO: 276 - protein, 25 aa, Homo sapiens
KVSAITLVSATSTTANMTVGPEGKW

SEQ ID NO: 277 - protein, 16 aa, Homo sapiens
KDASSFLAEWQNITKG

SEQ ID NO: 278 - protein, 35 aa, Homo sapiens
KAHLNVSGIPCSVLLADVEDLIQQQISNDTVSPRA

SEQ ID NO: 279 - protein, 18 aa, Homo sapiens
RSVTLQIYNHSLTLSARW

SEQ ID NO: 280 - protein, 28 aa, Homo sapiens
KGHFIYKNVSEDLPLPTFSPTLLGDSRM

SEQ ID NO: 281 - protein, 24 aa, Homo sapiens
KGPSTPLPEDPNWNVTEFHTTPKM

SEQ ID NO: 282 - protein, 15 aa, Homo sapiens
YNNHNYTDCTSEGRR

SEQ ID NO: 283 - protein, 12 aa, Homo sapiens
KSYNVTSVLFRK

SEQ ID NO: 284 - protein, 12 aa, Homo sapiens
KLNDTLDYECHD

SEQ ID NO: 285 - protein, 13 aa, Homo sapiens
RDAGVVCTNETRS

SEQ ID NO: 286 - protein, 16 aa, Homo sapiens
RGTANTTTAGVPCQRW

SEQ ID NO: 287 - protein, 14 aa, Homo sapiens
RNLTTSLTESVDRN

SEQ ID NO: 288 - protein, 20 aa, Homo sapiens
RTNINSSRDPDNIAAWYLRS

SEQ ID NO: 289 - protein, 28 aa, Homo sapiens
RGMNLTVFGGTVTAFLGIPYAQPPLGRL

SEQ ID NO: 290 - protein, 17 aa, Homo sapiens
KFVGTPEVNQTTLYQRY

SEQ ID NO: 291 - protein, 15 aa, Homo sapiens
NYLNETQQLTQEIKA

SEQ ID NO: 292 - protein, 28 aa, Homo sapiens
KWNVNAPPTFHSEMMYDNFTLVPVWGKE

SEQ ID NO: 293 - protein, 25 aa, Homo sapiens
RSNSTSSMSSGLPEQDRMAMTLPRN

SEQ ID NO: 294 - protein, 30 aa, Homo sapiens
REVNTSGFAPARPPPQPGSTTFWAWSVLRV

SEQ ID NO: 295 - protein, 12 aa, Homo sapiens
KGINYNSSVAKS

SEQ ID NO: 296 - protein, 17 aa, Homo sapiens
KFGLYHVDFNNTNRPRT

SEQ ID NO: 297 - protein, 14 aa, Homo sapiens
RGDVLHNGNGTYQS

SEQ ID NO: 298 - protein, 21 aa, Homo sapiens
KVASVININPNTTHSTGSCRS

SEQ ID NO: 299 - protein, 23 aa, Homo sapiens
KSHAASDAPENLTLLAETADARG

SEQ ID NO: 300 - protein, 22 aa, Homo sapiens
KTDNSLLDQALQNDTVFLNMRG

SEQ ID NO: 301 - protein, 19 aa, Homo sapiens
RCATPHGDNASLEATFVKR

SEQ ID NO: 302 - protein, 14 aa, Homo sapiens
KHIPGLIHNMTARC

SEQ ID NO: 303 - protein, 10 aa, Homo sapiens
RWEYCNLTRC

SEQ ID NO: 304 - protein, 22 aa, Homo sapiens
RISALGLPTNLTHILLFGMGRG

SEQ ID NO: 305 - protein, 10 aa, Homo sapiens
KETFFNLSKR

SEQ ID NO: 306 - protein, 13 aa, Homo sapiens
KAEFNITLIHPKD

SEQ ID NO: 307 - protein, 15 aa, Homo sapiens
KSLVTQYLNATGNRW

SEQ ID NO: 308 - protein, 16 aa, Homo sapiens
RHSHNNNSSDLHPHKH

SEQ ID NO: 309 - protein, 19 aa, Homo sapiens
KISNSSDTVECECSENWKG

SEQ ID NO: 310 - protein, 27 aa, Homo sapiens
KMLFVEPILEVSSLPTTNSTTNSATKI

SEQ ID NO: 311 - protein, 28 aa, Homo sapiens
KDHENGTGTNTYAALNSVYLMMNNQMRL

SEQ ID NO: 312 - protein, 20 aa, Homo sapiens
KYGNPNETQNNSTSWPVFKS

SEQ ID NO: 313 - protein, 10 aa, Homo sapiens
RNVTAEQARN

SEQ ID NO: 314 - protein, 15 aa, Homo sapiens
KLTGVAGNYTVCQKD

SEQ ID NO: 315 - protein, 19 aa, Homo sapiens
KLGYNANTSVLSFQAVCRE

SEQ ID NO: 316 - protein, 20 aa, Homo sapiens
RNEMLEIQVFNYSKVFSNKL

SEQ ID NO: 317 - protein, 15 aa, Homo sapiens
KAAIPSALDTNSSKS

SEQ ID NO: 318 - protein, 12 aa, Homo sapiens
RLHEITNETFRG

SEQ ID NO: 319 - protein, 22 aa, Homo sapiens
KMLNNNTGIYTCSAQGVWMNKV

SEQ ID NO: 320 - protein, 14 aa, Homo sapiens
KIGGIWTWVGTNKS

SEQ ID NO: 321 - protein, 14 aa, Homo sapiens
MMLQNILQINRSKR

SEQ ID NO: 322 - protein, 19 aa, Homo sapiens
RVVLLDPKPVANVTCVNKH

SEQ ID NO: 323 - protein, 18 aa, Homo sapiens
KTIHDLHLFIENIDFNKS

SEQ ID NO: 324 - protein, 14 aa, Homo sapiens
RNATLVNEADKLRA

SEQ ID NO: 325 - protein, 13 aa, Homo sapiens
VFGELCGVNENRT

SEQ ID NO: 326 - protein, 14 aa, Homo sapiens
RFQLLNFSSSELKV

SEQ ID NO: 327 - protein, 29 aa, Homo sapiens
RTEPMQVALHCTNGSVVYHEVLNAMECKC

SEQ ID NO: 328 - protein, 18 aa, Homo sapiens
RGPECSQNYTTPSGVIKS

SEQ ID NO: 329 - protein, 10 aa, Homo sapiens
RMNKTVAVRT

SEQ ID NO: 330 - protein, 31 aa, Homo sapiens
KHGSNNVGLSENLTDGAAAGNGDGGLVPQRK

SEQ ID NO: 331 - protein, 18 aa, Homo sapiens
RIDWDDDKYYNTSLETRL

SEQ ID NO: 332 - protein, 16 aa, Homo sapiens
RKVHLMGYNCNATTKC

SEQ ID NO: 333 - protein, 36 aa, Homo sapiens
KVLPSLGISNVFTSHADLSGISNHSNIQVSEMVHKA

SEQ ID NO: 334 - protein, 13 aa, Homo sapiens
GGNTSTDHFSLRA

SEQ ID NO: 335 - protein, 16 aa, Homo sapiens
KVPGNVTAVLGETLKV

SEQ ID NO: 336 - protein, 23 aa, Homo sapiens
RVAVVQHAPSESVDNASMPPVKV

SEQ ID NO: 337 - protein, 29 aa, Homo sapiens
REQFCPPPPQIPNAQNMTTTVNYQDGEKV

SEQ ID NO: 338 - protein, 36 aa, Homo sapiens
KTTTVQVPMMHQMEQYYHLVDMELNCTVLQMDYSKN

SEQ ID NO: 339 - protein, 16 aa, Homo sapiens
RSTIISNTTNPIWHRE

SEQ ID NO: 340 - protein, 14 aa, Homo sapiens
KIIYPKNHSIEVQL

SEQ ID NO: 341 - protein, 27 aa, Homo sapiens
RIAIHALATNMGAGTEGANASYILIRD

SEQ ID NO: 342 - protein, 18 aa, Homo sapiens
KLPYQGNATMLVVLMEKM

SEQ ID NO: 343 - protein, 15 aa, Homo sapiens
REVYPWYNLTVEAKE

SEQ ID NO: 344 - protein, 8 aa, Homo sapiens
KVVNPTQK

SEQ ID NO: 345 - protein, 15 aa, Homo sapiens
KVVNSTTGPGEHLRN

SEQ ID NO: 346 - protein, 20 aa, Homo sapiens
KAAPAPQEATATFNSTADRE

SEQ ID NO: 347 - protein, 26 aa, Homo sapiens
KENIQDNISLFSLGMGFDVDYDFLKR

SEQ ID NO: 348 - protein, 23 aa, Homo sapiens
KTAFITNFTLTIDGVTYPGNVKE

SEQ ID NO: 349 - protein, 20 aa, Homo sapiens
KIHVAGETDSSNLNVSEPRA

SEQ ID NO: 350 - protein, 24 aa, Homo sapiens
RSNKTLADSLDNANDPHDPIVNRL

SEQ ID NO: 351 - protein, 26 aa, Homo sapiens
KVSPRGIILTDNLTNQLIENVSIYRI

SEQ ID NO: 352 - protein, 36 aa, Homo sapiens
RFNFQGTCEYLLSAPCHGPPLGAENFTVTVANEHRG

SEQ ID NO: 353 - protein, 22 aa, Homo sapiens
KTFSSMTCASGANVSEQLSLKL

SEQ ID NO: 354 - protein, 32 aa, Homo sapiens
RDYKQTGDNLSSMLLENLTDNESENTNLKKKV

SEQ ID NO: 355 - protein, 35 aa, Homo sapiens
KIQSPLFTLDANADIGNGTTSANEAGIAASITAKG

SEQ ID NO: 356 - protein, 27 aa, Homo sapiens
KHYTNPSQDVTVPCPVPPPPPCCHPRL

SEQ ID NO: 357 - protein, 26 aa, Homo sapiens
AETTLTQSPAFMSATPGDKVNISCKA

SEQ ID NO: 358 - protein, 17 aa, Homo sapiens
RLNPTVTYGNDSFSAKA

SEQ ID NO: 359 - protein, 35 aa, Homo sapiens
KQVFPGLNYCTSGAYSNASSTDSASYYPLTGDTRL

SEQ ID NO: 360 - protein, 16 aa, Homo sapiens
KNYHQPAILNSSALRQ

SEQ ID NO: 361 - protein, 18 aa, Homo sapiens
KFIHNENGANYSVTATRS

SEQ ID NO: 362 - protein, 23 aa, Homo sapiens
RSILELSPQPKNFNRTATGWRLQ

SEQ ID NO: 363 - protein, 15 aa, Homo sapiens
KMAANSSGQGFQNKN

SEQ ID NO: 364 - protein, 10 aa, Homo sapiens
KLCDNLSTKN

SEQ ID NO: 365 - protein, 14 aa, Homo sapiens
KIDVNSWIENFTKT

SEQ ID NO: 366 - protein, 13 aa, Homo sapiens
RETHLETNFTLKS

SEQ ID NO: 367 - protein, 17 aa, Homo sapiens
RDNANNSPYLQMNSLRA

SEQ ID NO: 368 - protein, 26 aa, Homo sapiens
RAFHYNVSSHGCQLLPWTQHSPHTRL

SEQ ID NO: 369 - protein, 27 aa, Homo sapiens
KQPTPIANTSSQQAVFTSARQLPSART

SEQ ID NO: 370 - protein, 10 aa, Homo sapiens
KDNNSIITRK

SEQ ID NO: 371 - protein, 26 aa, Homo sapiens
RFMGPASGMNMSGMGGLGSLGDVSKN

SEQ ID NO: 372 - protein, 10 aa, Homo sapiens
RKMSNITFLN

SEQ ID NO: 373 - protein, 31 aa, Homo sapiens
KMSNITFLNFDPPIEEFHQYYQHIVTTLVKG

SEQ ID NO: 374 - protein, 18 aa, Homo sapiens
KNLTDFAEQYSIQDWAKR

SEQ ID NO: 375 - protein, 39 aa, Homo sapiens
RQPQPVHLLPLHGIQHLNMVFSNLTLEHINAILLGAYRQ

SEQ ID NO: 376 - protein, 29 aa, Homo sapiens
RGGLNLTAVTVAAENNHTVAFLGTSDGRI

SEQ ID NO: 377 - protein, 20 aa, Homo sapiens
KNGSGAVFPVAGADVQTLRE

SEQ ID NO: 378 - protein, 15 aa, Homo sapiens
KGTNSSASSNFRCRS

SEQ ID NO: 379 - protein, 30 aa, Homo sapiens
RNLSSLESVQLDHNQLETLPGDVFGALPRL

SEQ ID NO: 380 - protein, 12 aa, Homo sapiens
RLRNVSWATGRS

SEQ ID NO: 381 - protein, 16 aa, Homo sapiens
KALYSFAPISMHCNKS

SEQ ID NO: 382 - protein, 18 aa, Homo sapiens
RHTNYSFSPWHGFTIHRA

SEQ ID NO: 383 - protein, 12 aa, Homo sapiens
RFGYILHTDNRT

SEQ ID NO: 384 - protein, 17 aa, Homo sapiens
REDQYHYLLDRNLSCRV

SEQ ID NO: 385 - protein, 19 aa, Homo sapiens
KLGYNANTSILSFQAVCRE

SEQ ID NO: 386 - protein, 12 aa, Homo sapiens
KEVFVHPNYSKS

SEQ ID NO: 387 - protein, 21 aa, Homo sapiens
RIQMLSFAGEPLPQNSSMARG

SEQ ID NO: 388 - protein, 21 aa, Homo sapiens
KEPGSNVTMSVDAECVPMVRD

SEQ ID NO: 389 - protein, 23 aa, Homo sapiens
KVSCPIMPCSNATVPDGECCPRC

SEQ ID NO: 390 - protein, 17 aa, Homo sapiens
RMEACMLNGTVIGPGKT

SEQ ID NO: 391 - protein, 18 aa, Homo sapiens
KGQVYLQCGTPCNLTCRS

SEQ ID NO: 392 - protein, 12 aa, Homo sapiens
VCLPDNETLYRS

SEQ ID NO: 393 - protein, 17 aa, Homo sapiens
RSDFSQTMLFQANTTRI

SEQ ID NO: 394 - protein, 28 aa, Homo sapiens
RGCSCFSDWQGPGCSVPVPANQSFWTRE

SEQ ID NO: 395 - protein, 10 aa, Homo sapiens
KWQMNFTVRY

SEQ ID NO: 396 - protein, 23 aa, Homo sapiens
KMSGGSTMSSGGGNTNNSNSKKK

SEQ ID NO: 397 - protein, 21 aa, Homo sapiens
KTVVTYHIPQNSSLENVDSRY

SEQ ID NO: 398 - protein, 17 aa, Homo sapiens
RQAEEAEEQSNVNLSKF

SEQ ID NO: 399 - protein, 15 aa, Homo sapiens
KAFSQNISLVQHLRT

SEQ ID NO: 400 - protein, 23 aa, Homo sapiens
RPVDKPINTTLICNVTNALGARQ

SEQ ID NO: 401 - protein, 30 aa, Homo sapiens
KVMVEAYPGLQGFNWTYLGPFSDHQPEPKL

SEQ ID NO: 402 - protein, 19 aa, Homo sapiens
RQGSLGLQYNASQEWDLRR

SEQ ID NO: 403 - protein, 15 aa, Homo sapiens
KSLNVSSSVNQASRL

SEQ ID NO: 404 - protein, 11 aa, Homo sapiens
KNSSNWKLFKE

SEQ ID NO: 405 - protein, 23 aa, Homo sapiens
KNPTDEYLDAMMNEAPGPINFTM

SEQ ID NO: 406 - protein, 19 aa, Homo sapiens
RYRCNDTIPEDYETHQLRQ

SEQ ID NO: 407 - protein, 22 aa, Homo sapiens
RSTERNVSVEALASALQLLARE

SEQ ID NO: 408 - protein, 28 aa, Homo sapiens
REHYNLSAATCSPGQMCGHYTQVVWAKT

SEQ ID NO: 409 - protein, 20 aa, Homo sapiens
KSLPNFPNTSATANATGGRA

SEQ ID NO: 410 - protein, 33 aa, Homo sapiens
AMVNTTQQQGLSNASTEGPVADAFNNSSISIKE

SEQ ID NO: 411 - protein, 21 aa, Homo sapiens
KEGFSANYSVLQSSVSEDFKC

SEQ ID NO: 412 - protein, 21 aa, Homo sapiens
RNHPNITFFVYVSNFTWPIKI

SEQ ID NO: 413 - protein, 32 aa, Homo sapiens
RYLHTAVIVSGTMLVFGGNTHNDTSMSHGAKC

SEQ ID NO: 414 - protein, 32 aa, Homo sapiens
RDVLQNHLTEVLTLVAMELPHNVSSAEAVLRH

SEQ ID NO: 415 - protein, 28 aa, Homo sapiens
RAQVIINITDVDEPPIFQQPFYHFQLKE

SEQ ID NO: 416 - protein, 22 aa, Homo sapiens
RVLYMFNQMPLNLTNAVATARQ

SEQ ID NO: 417 - protein, 17 aa, Homo sapiens
RENQSILITGESGAGKT

SEQ ID NO: 418 - protein, 15 aa, Homo sapiens
KNSSLAEFVQNLSQI

SEQ ID NO: 419 - protein, 17 aa, Homo sapiens
KMSNYSLLSVDYVVDKA

SEQ ID NO: 420 - protein, 35 aa, Homo sapiens
KLDDISSNYTESFSTLDENDLLNPSEDIIAVQLKF

SEQ ID NO: 421 - protein, 20 aa, Homo sapiens
KHTGPGILSMANAGPNTNGS

SEQ ID NO: 422 - protein, 24 aa, Homo sapiens
KGSTPRNDPSVSVDYNTTEPAVRW

SEQ ID NO: 423 - protein, 29 aa, Homo sapiens
KEDGSGSAYDKESMAIIKLNNTTVLYLKE

SEQ ID NO: 424 - protein, 14 aa, Homo sapiens
RVITVQVANFTLRL

SEQ ID NO: 425 - protein, 14 aa, Homo sapiens
RNILDALMLNTTRI

SEQ ID NO: 426 - protein, 24 aa, Homo sapiens
LENSGRSKNFSYNLQSATQPKNKT

SEQ ID NO: 427 - protein, 8 aa, Homo sapiens
KYNFSFRY

SEQ ID NO: 428 - protein, 17 aa, Homo sapiens
KALRDFALQNPSAVPRF

SEQ ID NO: 429 - protein, 18 aa, Homo sapiens
SNLSFIDVCYISSTVPKM

SEQ ID NO: 430 - protein, 18 aa, Homo sapiens
RFVACQMELLHSNGSQRT

SEQ ID NO: 431 - protein, 14 aa, Homo sapiens
MILNSSTEDGIKRI

SEQ ID NO: 432 - protein, 24 aa, Homo sapiens
IELNDSVNENSDTVGQIVHYIMKN

SEQ ID NO: 433 - protein, 12 aa, Homo sapiens
KGSLSYLNVTRK

SEQ ID NO: 434 - protein, 12 aa, Homo sapiens
KLDFIILNETKF

SEQ ID NO: 435 - protein, 37 aa, Homo sapiens
RKEEEPSSSSVFNQNDPWAPTVDFSDFINNETIAGKD

SEQ ID NO: 436 - protein, 17 aa, Homo sapiens
RVNLSFDFPFYGHFLRE

SEQ ID NO: 437 - protein, 17 aa, Homo sapiens
RVVTVAALGTNISIHKD

SEQ ID NO: 438 - protein, 18 aa, Homo sapiens
RFQAFANGSLLIPDFGKL

SEQ ID NO: 439 - protein, 17 aa, Homo sapiens
RMKSDSFLQEMPNVTNI

SEQ ID NO: 440 - protein, 9 aa, Homo sapiens
RNINYTERG

SEQ ID NO: 441 - protein, 31 aa, Homo sapiens
RSFTDLLLDDGQDNNTQIEEDTDHNYYISRI

SEQ ID NO: 442 - protein, 21 aa, Homo sapiens
RSMQQQETNLLANLTTNDARD

SEQ ID NO: 443 - protein, 32 aa, Homo sapiens
RLPASLAEYTVTQLRPNATYSVCVMPLGPGRV

SEQ ID NO: 444 - protein, 15 aa, Homo sapiens
RFNGSGSGTDFTLKI

SEQ ID NO: 445 - protein, 24 aa, Homo sapiens
KTTCNPCPLGYKEENNTGECCGRC

SEQ ID NO: 446 - protein, 20 aa, Homo sapiens
RLDRENISEYHLTAVIVDKD

SEQ ID NO: 447 - protein, 20 aa, Homo sapiens
YGDSVEFNCSESFTMIGHRS

SEQ ID NO: 448 - protein, 28 aa, Homo sapiens
RANLTNFPENGTFVVNIAQLSQDDSGRY

SEQ ID NO: 449 - protein, 35 aa, Homo sapiens
KLLLSQLDSHPSHSAVVNWTSYASSIEALSSGNKE

SEQ ID NO: 450 - protein, 22 aa, Homo sapiens
MCDNNPVSLNCCSQGNVNWSKV

SEQ ID NO: 451 - protein, 28 aa, Homo sapiens
KMNGTLTAVESFLTIHSGPEGLSIHDGT

SEQ ID NO: 452 - protein, 24 aa, Homo sapiens
YHGNGTHSESLEHHGYHGNGTDRE

SEQ ID NO: 453 - protein, 22 aa, Homo sapiens
RTKSNSLSEQLAINTSPDAVKA

SEQ ID NO: 454 - protein, 23 aa, Homo sapiens
RRQGAYNIDVVAVVNDTVGTMMG

SEQ ID NO: 455 - protein, 12 aa, Homo sapiens
RRGASVNRTTRT

SEQ ID NO: 456 - protein, 26 aa, Homo sapiens
RHEKMGSNISQLTDKNELLTEQVHKA

SEQ ID NO: 457 - protein, 24 aa, Homo sapiens
KVELPPPDLGPSSALNQTLMLLRE

SEQ ID NO: 458 - protein, 27 aa, Homo sapiens
KSSRMETVGNASSSSNPSSPGRIKGRL

SEQ ID NO: 459 - protein, 26 aa, Homo sapiens
KLEESYTLNSDLARLGVQDLFNSSKA

SEQ ID NO: 460 - protein, 26 aa, Homo sapiens
KILPISLEPSSSTEPTQSNLSVTAKI

SEQ ID NO: 461 - protein, 28 aa, Homo sapiens
KHWTNFVITENANDAIGILNNSASFNKM

SEQ ID NO: 462 - protein, 23 aa, Homo sapiens
RLPHPWSGTGQVVYNGSIYFNKF

SEQ ID NO: 463 - protein, 29 aa, Homo sapiens
RLASPPSQGEVPPGPLPEAVLALYNSTRD

SEQ ID NO: 464 - protein, 18 aa, Homo sapiens
KVTVRPGESVMVNISAKA

SEQ ID NO: 465 - protein, 23 aa, Homo sapiens
RDGFDISGNPWICDQNLSDLYRW

SEQ ID NO: 466 - protein, 33 aa, Homo sapiens
RDCDPPGNPVHGYFEGNNFTLGSTISYYCEDRY

SEQ ID NO: 467 - protein, 20 aa, Homo sapiens
KWNNTGCQALPSQDEGPSKA

SEQ ID NO: 468 - protein, 21 aa, Homo sapiens
KWNCTDHVCDATCSTIGMAHY

SEQ ID NO: 469 - protein, 26 aa, Homo sapiens
KVHNGSEILFSYFQDLVITLPFELRK

SEQ ID NO: 470 - protein, 28 aa, Homo sapiens
KAQNGIAIMVYTNSSNTLYWELNQAVRT

SEQ ID NO: 471 - protein, 30 aa, Homo sapiens
RKQSESSFISGDINSTSTLNQGLTSHGLRA

SEQ ID NO: 472 - protein, 25 aa, Homo sapiens
MDTTISINNTVITPMLNPIIYSLRN

SEQ ID NO: 473 - protein, 18 aa, Homo sapiens
KLNVSDLYKLTDTVAIRE

SEQ ID NO: 474 - protein, 25 aa, Homo sapiens
KGDYNDSVQVVDCGLSLNDTAFEKM

SEQ ID NO: 475 - protein, 20 aa, Homo sapiens
KAMNASANITSDGVEVLGKM

SEQ ID NO: 476 - protein, 18 aa, Homo sapiens
KLNITNIWVLDYFGGPKI

SEQ ID NO: 477 - protein, 18 aa, Homo sapiens
KELYEPIWQNFTDPQLRR

SEQ ID NO: 478 - protein, 19 aa, Homo sapiens
KIAVQFGPGFSWIANFTKA

SEQ ID NO: 479 - protein, 13 aa, Homo sapiens
RFNSTEYQVVTRV

SEQ ID NO: 480 - protein, 28 aa, Homo sapiens
KDVDKEFYLFPTVFDENESLLLEDNIRM

SEQ ID NO: 481 - protein, 36 aa, Homo sapiens
KALDKNVIFSPLSISTALAFLSLGAHNTTLTEILKA

SEQ ID NO: 482 - protein, 25 aa, Homo sapiens
KQLNVQMNMSNVMGNTTWTTSGLKS

SEQ ID NO: 483 - protein, 17 aa, Homo sapiens
RAAYNVTLLNFMDPQKM

SEQ ID NO: 484 - protein, 33 aa, Homo sapiens
AGMNPGMLAAGNGQGIMPNQVMNGSIGAGRGRQ

SEQ ID NO: 485 - protein, 13 aa, Homo sapiens
KLFSDIENISEET

SEQ ID NO: 486 - protein, 19 aa, Homo sapiens
KYEFCPFHNVTQHEQTFRW

SEQ ID NO: 487 - protein, 30 aa, Homo sapiens
RNAITHLPLSIFASLGNLTFLSLQWNMLRV

SEQ ID NO: 488 - protein, 23 aa, Homo sapiens
RLALTPAHLLFTADNHTEPAARF

SEQ ID NO: 489 - protein, 17 aa, Homo sapiens
QLMNITAGTSHVMISRR

SEQ ID NO: 490 - protein, 18 aa, Homo sapiens
RNRNLSGGVLMGFMLNRI

SEQ ID NO: 491 - protein, 23 aa, Homo sapiens
RGLQPTLTNPGECRPNFTCACRK

SEQ ID NO: 492 - protein, 20 aa, Homo sapiens
KRSVLPPDGNGSPVLPDKRN

SEQ ID NO: 493 - protein, 19 aa, Homo sapiens
RKVEVEPLNSTAVHVYWKL

SEQ ID NO: 494 - protein, 25 aa, Homo sapiens
DGESCSNSSHQQILETGEGSPSLKI

SEQ ID NO: 495 - protein, 17 aa, Homo sapiens
YLANLTQSQIALNEKRV

SEQ ID NO: 496 - protein, 23 aa, Homo sapiens
RYTLVFNSSSERNVSLTEHKKKQ

SEQ ID NO: 497 - protein, 23 aa, Homo sapiens
RVGSSPKINVSPFYQNQTSTQRS

SEQ ID NO: 498 - protein, 36 aa, Homo sapiens
RRFIPPARMMSTESANSFTLIGEASDGGTMENLSRR

SEQ ID NO: 499 - protein, 17 aa, Homo sapiens
RLNVNATDSSSTSNHKQ

SEQ ID NO: 500 - protein, 14 aa, Homo sapiens
RGLAGVENVTELKK

SEQ ID NO: 501 - protein, 24 aa, Homo sapiens
REPSDPTSNRSTFHPGDSQKPVKR

SEQ ID NO: 502 - protein, 31 aa, Homo sapiens
RCGEPPSIMNGYASGSNYSFGAMVAYSCNKG

SEQ ID NO: 503 - protein, 37 aa, Homo sapiens
MSAAAMGSGSGNMSAGSMNMSSYVGAGMSPSLAGMSP

SEQ ID NO: 504 - protein, 26 aa, Homo sapiens
MMNYGQSMSGGNGQAANQTLSPQMWK

SEQ ID NO: 505 - protein, 20 aa, Homo sapiens
MDFNLSGDSDGSAGVSESRI

SEQ ID NO: 506 - protein, 27 aa, Homo sapiens
KRVYSLMENNSYPRFLESEFYQDLCKK

SEQ ID NO: 507 - protein, 12 aa, Homo sapiens
KQNTTLGLSERP

SEQ ID NO: 508 - protein, 27 aa, Homo sapiens
KNYSPYYNTIDDLKDQIVDLTVGNNKT

SEQ ID NO: 509 - protein, 14 aa, Homo sapiens
KNLSGPDDLLIDKN

SEQ ID NO: 510 - protein, 20 aa, Homo sapiens
KNGTVDGTSENTEDGLDRKD

SEQ ID NO: 511 - protein, 35 aa, Homo sapiens
KGGMNGYHVNGAINDTESVDSLSEGLETLSIDARE

SEQ ID NO: 512 - protein, 15 aa, Homo sapiens
KEVLLKTNLSGRQSP

SEQ ID NO: 513 - protein, 25 aa, Homo sapiens
KEMYQPEDDNNSDVTSDDDMTRNRR

SEQ ID NO: 514 - protein, 31 aa, Homo sapiens
VNLSLIFIIALGSIAGILFVTMIFVAIKCKR

SEQ ID NO: 515 - protein, 18 aa, Homo sapiens
RRTEKLFFTILSPNQSKP

SEQ ID NO: 516 - protein, 17 aa, Homo sapiens
RIDGSQNFNETWENYKY

SEQ ID NO: 517 - protein, 36 aa, Homo sapiens
RFDFQGTCEYLLSAPCHGPPLGAENFTVTVANEHRG

SEQ ID NO: 518 - protein, 27 aa, Homo sapiens
RECFNIGNFNSMMAIISGMNLSPVARL

SEQ ID NO: 519 - protein, 21 aa, Homo sapiens
MVDPEMLPPKTARQTENVSRT

SEQ ID NO: 520 - protein, 15 aa, Homo sapiens
KVQNMSQSIEVLDRR

SEQ ID NO: 521 - protein, 19 aa, Homo sapiens
KMSISPNTTYPSLLEDGRV

SEQ ID NO: 522 - protein, 25 aa, Homo sapiens
KESGLDNCTRISGFLAFKNFDYGAM

SEQ ID NO: 523 - protein, 11 aa, Homo sapiens
RTRLSSNSTKK

SEQ ID NO: 524 - protein, 8 aa, Homo sapiens
RCNYSIRV

SEQ ID NO: 525 - protein, 38 aa, Homo sapiens
KSSVITLNTNAELFNQSDIVAHLLSSSSSVIDALQYKL

SEQ ID NO: 526 - protein, 15 aa, Homo sapiens
KLQNLTLPTNASIKF

SEQ ID NO: 527 - protein, 22 aa, Homo sapiens
KEKPPNENCNNNSPESSLLPRA

SEQ ID NO: 528 - protein, 24 aa, Homo sapiens
KEHAVFTSNQEEQDPANHTCGVKS

SEQ ID NO: 529 - protein, 26 aa, Homo sapiens
EFIHLLSNITGAIVNTDNVQFHVDKK

SEQ ID NO: 530 - protein, 18 aa, Homo sapiens
KVQGLVPAGGSSSNSTRE

SEQ ID NO: 531 - protein, 25 aa, Homo sapiens
KLNNPKDFQELNKQTKKNMTIDGKE

SEQ ID NO: 532 - protein, 16 aa, Homo sapiens
KANEQVVQSLNQTYKM

SEQ ID NO: 533 - protein, 16 aa, Homo sapiens
RVDLEDFENNTAYAKY

SEQ ID NO: 534 - protein, 32 aa, Homo sapiens
RTAGWNVPIGTLRPFLNWTGPPEPIEAAVARF

SEQ ID NO: 535 - protein, 25 aa, Homo sapiens
KLDSFGPINPTLNTTYSFLTTFFKE

SEQ ID NO: 536 - protein, 16 aa, Homo sapiens
RTNSTFVQALVEHVKE

SEQ ID NO: 537 - protein, 18 aa, Homo sapiens
RLSALDNLLNHSSMFLKG

SEQ ID NO: 538 - protein, 18 aa, Homo sapiens
RILIWEDGSLEINNITRN

SEQ ID NO: 539 - protein, 12 aa, Homo sapiens
KGTEWLVNSSRI

SEQ ID NO: 540 - protein, 33 aa, Homo sapiens
IAAGHGDYALNVTGPILNFFAGHYDTPYPLPKS

SEQ ID NO: 541 - protein, 12 aa, Homo sapiens
RVQPFNVTQGKY

SEQ ID NO: 542 - protein, 12 aa, Homo sapiens
RGHTLTLNFTRN

SEQ ID NO: 543 - protein, 16 aa, Homo sapiens
RGHTLTLNFTRNATRY

SEQ ID NO: 544 - protein, 20 aa, Homo sapiens
RTLSDVPSAAPQNLSLEVRN

SEQ ID NO: 545 - protein, 23 aa, Homo sapiens
RLGSYPVGGNVSFECEDGFILRG

SEQ ID NO: 546 - protein, 16 aa, Homo sapiens
RAGPNGTLFVADAYKG

SEQ ID NO: 547 - protein, 16 aa, Homo sapiens
KEDAAVNCTDISVQKT

SEQ ID NO: 548 - protein, 17 aa, Homo sapiens
RLMSTEASQNITYHCKN

SEQ ID NO: 549 - protein, 14 aa, Homo sapiens
KQNNGAFNETLFRN

SEQ ID NO: 550 - protein, 12 aa, Homo sapiens
RENVGIYNLSKG

SEQ ID NO: 551 - protein, 18 aa, Homo sapiens
KHVGNQQYNVTYVVKERG

SEQ ID NO: 552 - protein, 33 aa, Homo sapiens
KVTELQLTSSELDFQPQQELMLQITNASLGLRF

SEQ ID NO: 553 - protein, 22 aa, Homo sapiens
RSYSESSSTSSSESLNSSAPRG

SEQ ID NO: 554 - protein, 18 aa, Homo sapiens
KLLHALGGDDFLGMLNRT

SEQ ID NO: 555 - protein, 10 aa, Homo sapiens
RVLNVSQNLL

SEQ ID NO: 556 - protein, 22 aa, Homo sapiens
RSCLSCPENTSTVKRGAVNISA

SEQ ID NO: 557 - protein, 16 aa, Homo sapiens
RSCLSCPENTSTVKRG

SEQ ID NO: 558 - protein, 30 aa, Homo sapiens
KIKRNFSSGTIPGTPGPNGEDGVEQTAIKV

SEQ ID NO: 559 - protein, 21 aa, Homo sapiens
KGRNTSSAVEMPFRNSKRSRL

SEQ ID NO: 560 - protein, 40 aa, Homo sapiens
MPSSTLPGWPGSSGGPVSRPSSLESSRNTSSNSSPLNLKG

SEQ ID NO: 561 - protein, 18 aa, Homo sapiens
RGAFFPLTERNWSLPNRA

SEQ ID NO: 562 - protein, 9 aa, Homo sapiens
KLISNCSKF

SEQ ID NO: 563 - protein, 18 aa, Homo sapiens
MSLFLSNLSTNDSSLWKE

SEQ ID NO: 564 - protein, 15 aa, Homo sapiens
ATLGTTALNNSNPKD

SEQ ID NO: 565 - protein, 14 aa, Homo sapiens
RGNETLHYETFGKA

SEQ ID NO: 566 - protein, 11 aa, Homo sapiens
RANLTVVLLRG

SEQ ID NO: 567 - protein, 15 aa, Homo sapiens
KEAPYFYNDTVTFKC

SEQ ID NO: 568 - protein, 26 aa, Homo sapiens
KRKNSTSSTSNSSAGNNANSTGSKKK

SEQ ID NO: 569 - protein, 29 aa, Homo sapiens
KEYYLMENPQEPDAPIVTFFPLINDTFRK

SEQ ID NO: 570 - protein, 15 aa, Homo sapiens
SPGLEYNVSVYTVKD

SEQ ID NO: 571 - protein, 9 aa, Homo sapiens
RGHVNITRS

SEQ ID NO: 572 - protein, 9 aa, Homo sapiens
PGFNNTERT

SEQ ID NO: 573 - protein, 9 aa, Homo sapiens
RTLLNASRS

SEQ ID NO: 574 - protein, 29 aa, Homo sapiens
KSLDLSHNLISDFAWSDLHNLSALQLLKM

SEQ ID NO: 575 - protein, 26 aa, Homo sapiens
KANYNLPIMVTDSGKPPMTNITDLRV

SEQ ID NO: 576 - protein, 21 aa, Homo sapiens
KGFSLLAEPQEFWVDNSTSVS

SEQ ID NO: 577 - protein, 15 aa, Homo sapiens
RIVAARLNGSLDFFS

SEQ ID NO: 578 - protein, 18 aa, Homo sapiens
RVEGLFLTLSGSNLTVKV

SEQ ID NO: 579 - protein, 15 aa, Homo sapiens
RTTASTNMNASSSRS

SEQ ID NO: 580 - protein, 16 aa, Homo sapiens
RTKSQSKLDRNTSFRL

SEQ ID NO: 581 - protein, 19 aa, Homo sapiens
RRGASVNRTTRTNSTPLRA

SEQ ID NO: 582 - protein, 11 aa, Homo sapiens
RQNSSPHLPKL

SEQ ID NO: 583 - protein, 25 aa, Homo sapiens
RQMGGNTNTGAALNFTLSLLQKAKK

SEQ ID NO: 584 - protein, 27 aa, Homo sapiens
RMSMLASQQNQSGPSGNNQSQGNMQRE

SEQ ID NO: 585 - protein, 44 aa, Homo sapiens
RMGMGNNYSGGYGTPDGLGGYGRGGGGSGGYYGQGGMSGGGWRG

SEQ ID NO: 586 - protein, 12 aa, Homo sapiens
RLHNGNASPPRV

SEQ ID NO: 587 - protein, 25 aa, Homo sapiens
RLFCDPTFLPENDSLFYNRLLPGKV

SEQ ID NO: 588 - protein, 29 aa, Homo sapiens
RISESGIKKMCRNIFVLQQNLTNITMSRE

SEQ ID NO: 589 - protein, 19 aa, Homo sapiens
RIGVSFIDDGSNATDLLRK

SEQ ID NO: 590 - protein, 27 aa, Homo sapiens
RGYLQALASKMTEELEALRNSSLGTRA

SEQ ID NO: 591 - protein, 26 aa, Homo sapiens
RGFNMSIPMPGHPVNFSSVTLEQARR

SEQ ID NO: 592 - protein, 22 aa, Homo sapiens
RDGVLLCQLLHNLSPGSIDLKD

SEQ ID NO: 593 - protein, 15 aa, Homo sapiens
NQNGAEGDQINASKN

SEQ ID NO: 594 - protein, 22 aa, Homo sapiens
MTNYSFHCNVCHHSGNTYFLRK

SEQ ID NO: 595 - protein, 27 aa, Homo sapiens
MSQSMGGDNLSSLDTNEAEIEPENMRE

SEQ ID NO: 596 - protein, 24 aa, Homo sapiens
MRANGNTTSNKNSAAMDAEIVLRS

SEQ ID NO: 597 - protein, 18 aa, Homo sapiens
MMLGDAKIGNNSVSSLKN

SEQ ID NO: 598 - protein, 20 aa, Homo sapiens
MKKVHVNSVNPNYTGGEPKR

SEQ ID NO: 599 - protein, 16 aa, Homo sapiens
MEVCNNETISVSSYKI

SEQ ID NO: 600 - protein, 22 aa, Homo sapiens
MAKSALRENGTNSETFRQRFRR

SEQ ID NO: 601 - protein, 19 aa, Homo sapiens
KYNNGSTELHSSSVGLAKA

SEQ ID NO: 602 - protein, 19 aa, Homo sapiens
KTNQGIPELNASSVGMAKA

SEQ ID NO: 603 - protein, 31 aa, Homo sapiens
KTLSTKTPSAAQNPMMTNASATQATLTAQKF

SEQ ID NO: 604 - protein, 25 aa, Homo sapiens
KSVSTSSPAGAAIASTSGASNNSSS

SEQ ID NO: 605 - protein, 26 aa, Homo sapiens
KSAMPIEVMMNETAQQNMENHPVIRT

SEQ ID NO: 606 - protein, 26 aa, Homo sapiens
KREEEEEEEGSIMNGSTAEDEEQTRS

SEQ ID NO: 607 - protein, 13 aa, Homo sapiens
KNPTTEETVLTKT

SEQ ID NO: 608 - protein, 28 aa, Homo sapiens
KNKTSTASSMVASAEQPSGSVEEELSKK

SEQ ID NO: 609 - protein, 34 aa, Homo sapiens
KMNMNVMEEAIGYFEQQLAMLQQLSGNESVLDRG

SEQ ID NO: 610 - protein, 14 aa, Homo sapiens
KLQTTNTTRSVLKD

SEQ ID NO: 611 - protein, 34 aa, Homo sapiens
KLLKGDIDIGSQNGTDLFGFGNTHEYPDLQMILS

SEQ ID NO: 612 - protein, 17 aa, Homo sapiens
KLALLNASLVKGNLSRV

SEQ ID NO: 613 - protein, 22 aa, Homo sapiens
KKDAENHEAQLKNGSLDQGSRI

SEQ ID NO: 614 - protein, 24 aa, Homo sapiens
KHPENNQKSENNQKLLTGANSSRF

SEQ ID NO: 615 - protein, 22 aa, Homo sapiens
KHFGEFFNLNQTVQSTIEDIKV

SEQ ID NO: 616 - protein, 22 aa, Homo sapiens
DRPPSPTDNISRYSFDNLPEKY

SEQ ID NO: 617 - protein, 17 aa, Homo sapiens
ALCDQEGWDTPINYSKT

SEQ ID NO: 618 - protein, 25 aa, Homo sapiens
RYNATVYSQAANGTEGQPQAIEFRT

SEQ ID NO: 619 - protein, 18 aa, Homo sapiens
RHDYILLPEDALTNTTRL

SEQ ID NO: 620 - protein, 30 aa, Homo sapiens
RARGNSSSNHLYGVAEAGAPPADPSTLYRD

SEQ ID NO: 621 - protein, 23 aa, Homo sapiens
MGNSSEFQKAVKLVINTVSFDKD

SEQ ID NO: 622 - protein, 23 aa, Homo sapiens
KYIPYTLYSVFNPSDHDLVLIRL

SEQ ID NO: 623 - protein, 22 aa, Homo sapiens
KVPLSHSRSNDTLYIPEWEGRA

SEQ ID NO: 624 - protein, 22 aa, Homo sapiens
KVLLLHEVHANDTGSYVCYYKY

SEQ ID NO: 625 - protein, 23 aa, Homo sapiens
KVEFHWGHSNGSAGSEHSINGRR

SEQ ID NO: 626 - protein, 17 aa, Homo sapiens
KSMVDFMNTDNFTSHRL

SEQ ID NO: 627 - protein, 16 aa, Homo sapiens
KNEEVKNMSLELNSKL

SEQ ID NO: 628 - protein, 17 aa, Homo sapiens
KNAVITVPAYFNDSQRQ

SEQ ID NO: 629 - protein, 16 aa, Homo sapiens
KLLDLSGNNLTHLPKG

SEQ ID NO: 630 - protein, 24 aa, Homo sapiens
KGCVLLSHLNETVTVSASLESGRE

SEQ ID NO: 631 - protein, 30 aa, Homo sapiens
KEEVQNLTSVLNELQEEIGAYDYDELQSRV

SEQ ID NO: 632 - protein, 19 aa, Homo sapiens
KCIRCAVVGNGGILNGSRQ

SEQ ID NO: 633 - protein, 19 aa, Homo sapiens
KCINQSICEKCENLTTGKH

SEQ ID NO: 634 - protein, 11 aa, Homo sapiens
KCINQSICEKC

SEQ ID NO: 635 - protein, 34 aa, Homo sapiens
KAVVNGNIMWVVGGYMFNHSDYNMVLAYDLASRE

SEQ ID NO: 636 - protein, 13 aa, Homo sapiens
FSINTTSISVNKL

SEQ ID NO: 637 - protein, 19 aa, Homo sapiens
NIVSNASCTTNCLAPLAKV

SEQ ID NO: 638 - protein, 27 aa, Homo sapiens
MTYLYEDSNVWHDISDFLVYNKSRPSN

SEQ ID NO: 639 - protein, 10 aa, Homo sapiens
RYFYNNQTKQ

SEQ ID NO: 640 - protein, 25 aa, Homo sapiens
RVTWKPQGAPVEWEEETVTNHTLRV

SEQ ID NO: 641 - protein, 13 aa, Homo sapiens
RVNSTELFHVDRH

SEQ ID NO: 642 - protein, 11 aa, Homo sapiens
RVFPQVNVTKM

SEQ ID NO: 643 - protein, 19 aa, Homo sapiens
RTVYLYPNQTGLPDPLSRH

SEQ ID NO: 644 - protein, 13 aa, Homo sapiens
RSVNILFNLTHRV

SEQ ID NO: 645 - protein, 21 aa, Homo sapiens
RSGQVEVNITAFCQLIYPGKG

SEQ ID NO: 646 - protein, 17 aa, Homo sapiens
RRRNITVGLAVFATGRF

SEQ ID NO: 647 - protein, 10 aa, Homo sapiens
RNGTLVAFRG

SEQ ID NO: 648 - protein, 24 aa, Homo sapiens
RIVESYFMLNSTLYFSYTHMVCRT

SEQ ID NO: 649 - protein, 25 aa, Homo sapiens
RGLRGPNLTSPASITFTTGLEAPRD

SEQ ID NO: 650 - protein, 16 aa, Homo sapiens
RAVQPHNGCFNWTSRA

SEQ ID NO: 651 - protein, 16 aa, Homo sapiens
RALLTNVSSVALGSRR

SEQ ID NO: 652 - protein, 29 aa, Homo sapiens
MKKDAEEDDSLANSSDLLKELLETGDNRE

SEQ ID NO: 653 - protein, 28 aa, Homo sapiens
KVLAAKVLNLVLPNLSLGPIDSSVLSRN

SEQ ID NO: 654 - protein, 34 aa, Homo sapiens
KTVSNLTESSSESIQSFLQSMITAVGIPEVMSRL

SEQ ID NO: 655 - protein, 12 aa, Homo sapiens
KTMQENSTPRED

SEQ ID NO: 656 - protein, 32 aa, Homo sapiens
KLGSLQELFLDSNNISELPPQVFSQLFCLERL

SEQ ID NO: 657 - protein, 13 aa, Homo sapiens
KGVVVNSSVMVKF

SEQ ID NO: 658 - protein, 20 aa, Homo sapiens
KGVHSFYNNISGLTDFGEKV

SEQ ID NO: 659 - protein, 29 aa, Homo sapiens
KEASLADNNTDVRLIGEKLFHGVSMSERC

SEQ ID NO: 660 - protein, 11 aa, Homo sapiens
IRVGNATIDRE

SEQ ID NO: 661 - protein, 14 aa, Homo sapiens
RVDNFTQNPGMFRI

SEQ ID NO: 662 - protein, 21 aa, Homo sapiens
RTFTDKWEDYPKSENESNIRY

SEQ ID NO: 663 - protein, 29 aa, Homo sapiens
RNLDPENGSGMALQPLQAAPEPGAQGQRE

SEQ ID NO: 664 - protein, 19 aa, Homo sapiens
RIDDLQMVLNQTEDHRQRV

SEQ ID NO: 665 - protein, 12 aa, Homo sapiens
RGHNLSRDELRG

SEQ ID NO: 666 - protein, 30 aa, Homo sapiens
RDNLSGLSADMQDYGLIIDGAALSLIMKPR

SEQ ID NO: 667 - protein, 20 aa, Homo sapiens
QTVQRSMANLSVLFGQVVRG

SEQ ID NO: 668 - protein, 20 aa, Homo sapiens
QRNISLQLMSNMNISNKIRN

SEQ ID NO: 669 - protein, 17 aa, Homo sapiens
MKLAVDEEENADNNTKA

SEQ ID NO: 670 - protein, 12 aa, Homo sapiens
MIQNTFNFSLKQ

SEQ ID NO: 671 - protein, 18 aa, Homo sapiens
MANFTPVNGSSGNQSVRL

SEQ ID NO: 672 - protein, 21 aa, Homo sapiens
KVLQQQWTNQSSQLLHSVERF

SEQ ID NO: 673 - protein, 18 aa, Homo sapiens
KVFDSLLNLSSTLQATRA

SEQ ID NO: 674 - protein, 21 aa, Homo sapiens
KLAVDEEENADNNTKANVTKP

SEQ ID NO: 675 - protein, 30 aa, Homo sapiens
KEKDSNSSSGSFNGEQEPIIGFQPMDSTRA

SEQ ID NO: 676 - protein, 17 aa, Homo sapiens
KASGQVIDEIAGNFSRA

SEQ ID NO: 677 - protein, 14 aa, Homo sapiens
EDDFQHSSNSTYRT

SEQ ID NO: 678 - protein, 10 aa, Homo sapiens
RNLEKNSTKQ

SEQ ID NO: 679 - protein, 30 aa, Homo sapiens
KTGVCPELQADQNCTQECVSDSECADNLKC

SEQ ID NO: 680 - protein, 17 aa, Homo sapiens
KLNDTTLQVLNTWYTKQ

SEQ ID NO: 681 - protein, 18 aa, Homo sapiens
RYLPVNSSLLTSDCSERC

SEQ ID NO: 682 - protein, 29 aa, Homo sapiens
KDEGTYTCALHHSGHSPPISSQNVTVLRD

SEQ ID NO: 683 - protein, 14 aa, Homo sapiens
RYKVPAEILANTSD

SEQ ID NO: 684 - protein, 17 aa, Homo sapiens
KSSISNNYLNLTFPRKR

SEQ ID NO: 685 - protein, 19 aa, Homo sapiens
KLLDMLQYYLNLTEANLKG

SEQ ID NO: 686 - protein, 11 aa, Homo sapiens
KVINETWAWKN

SEQ ID NO: 687 - protein, 20 aa, Homo sapiens
RHRPTAGAFNHSDLDAELRR

SEQ ID NO: 688 - protein, 12 aa, Homo sapiens
KWNVTSLETLKA

SEQ ID NO: 689 - protein, 27 aa, Homo sapiens
RMATPLLMQALPMGALPQGPMQNATKY

SEQ ID NO: 690 - protein, 16 aa, Homo sapiens
RCNTTQGNEVTSILRW

SEQ ID NO: 691 - protein, 27 aa, Homo sapiens
RMSGDLSSNVTVSVTSSTISSNVASKA

SEQ ID NO: 692 - protein, 29 aa, Homo sapiens
SRMSGECAPNVSVSVSTSHTTISGGGSRG

SEQ ID NO: 693 - protein, 14 aa, Homo sapiens
KAFRNHSFLLIHQR

SEQ ID NO: 694 - protein, 31 aa, Homo sapiens
RCGPCPAGFTGNGSHCTDVNECNAHPCFPRV

SEQ ID NO: 695 - protein, 24 aa, Homo sapiens
MPNNLTDCEDGDGGANPGDGNPKE

SEQ ID NO: 696 - protein, 18 aa, Homo sapiens
AEESPFVGNPGNITGARG

SEQ ID NO: 697 - protein, 24 aa, Homo sapiens
RVAQPGINYALGTNVSYPNNLLRN

SEQ ID NO: 698 - protein, 21 aa, Homo sapiens
KFLTEVEKNATALYHVEAFKT

SEQ ID NO: 699 - protein, 27 aa, Homo sapiens
KGCSSSTSVLLTLDNNVVNGSSPAIRT

SEQ ID NO: 700 - protein, 12 aa, Homo sapiens
IPAANLSANRKR

SEQ ID NO: 701 - protein, 26 aa, Homo sapiens
RSLDAYPILNQAQALENHTEVQFQKE

SEQ ID NO: 702 - protein, 16 aa, Homo sapiens
RSINVTGQGFSLIQRF

SEQ ID NO: 703 - protein, 20 aa, Homo sapiens
KSNISPNFNFMGQLLDFERS

SEQ ID NO: 704 - protein, 20 aa, Homo sapiens
KNFSSLHTVFCATGGGAYKF

SEQ ID NO: 705 - protein, 12 aa, Homo sapiens
KGNKNGDNNSNH

SEQ ID NO: 706 - protein, 20 aa, Homo sapiens
KSNISPNFNFMGQLLDFERT

SEQ ID NO: 707 - protein, 16 aa, Homo sapiens
RRQAPINFTSRLNRRA

SEQ ID NO: 708 - protein, 25 aa, Homo sapiens
RQNASSSSQQNNGPMDVISPHSYKS

SEQ ID NO: 709 - protein, 25 aa, Homo sapiens
RGCNVNSTSSAGNTALHVAVMRNRF

SEQ ID NO: 710 - protein, 20 aa, Homo sapiens
KTIAQGNLSNTDVQAAKNKL

SEQ ID NO: 711 - protein, 17 aa, Homo sapiens
KSTRMILNLTQSSGFNG

SEQ ID NO: 712 - protein, 25 aa, Homo sapiens
KSSEFASIPANSSRPLSNISKSGRM

SEQ ID NO: 713 - protein, 28 aa, Homo sapiens
KRAMNKSFMESGGTVLSTNWSDVGKRKV

SEQ ID NO: 714 - protein, 24 aa, Homo sapiens
KNASMNTQHGTATEVAVETTTPKQ

SEQ ID NO: 715 - protein, 17 aa, Homo sapiens
KKSLELNPNNSTAMLRK

SEQ ID NO: 716 - protein, 23 aa, Homo sapiens
GTAGVYQTQGLVGSSNGSSHKKS

SEQ ID NO: 717 - protein, 19 aa, Homo sapiens
GDVNLTNLNLDDIVHIRRK

SEQ ID NO: 718 - protein, 32 aa, Homo sapiens
NNFSTEINTTSILVGPLVSNLEITHTSNLTRV

SEQ ID NO: 719 - protein, 20 aa, Homo sapiens
KTGGDNKTLLHLGSSAPGKE

SEQ ID NO: 720 - protein, 10 aa, Homo sapiens
MISNMNASRA

SEQ ID NO: 721 - protein, 24 aa, Homo sapiens
KHYLVSNISHDTVLQCHFTCSGKQ

SEQ ID NO: 722 - protein, 23 aa, Homo sapiens
KNQILNLTTDNANILLQIDNARL

SEQ ID NO: 723 - protein, 46 aa, Homo sapiens
RFGGFGGPGGVGGLGGPGGFGPGGYPGGIHEVSVNQSLLQPLNVKV

SEQ ID NO: 724 - protein, 17 aa, Homo sapiens
KLNSSSSSSSNSSNERE

SEQ ID NO: 725 - protein, 19 aa, Homo sapiens
RKSIDEMNNAWENLNKTWK

SEQ ID NO: 726 - protein, 21 aa, Homo sapiens
RRSLNSSSSSPPSSPTMMPRL

SEQ ID NO: 727 - protein, 39 aa, Homo sapiens
RYGEQGLREGSGGGGGMDDIFSHIFGGGLFGFMGNQSRS

SEQ ID NO: 728 - protein, 26 aa, Homo sapiens
RNTFTPGEKVVFTTEINNQTSKCIKT

SEQ ID NO: 729 - protein, 31 aa, Homo sapiens
REKTSLSANNATLEKQLIELTRTNELLKSKF

SEQ ID NO: 730 - protein, 22 aa, Homo sapiens
REFVMQVKVGNHTAEGTGTNKK

SEQ ID NO: 731 - protein, 17 aa, Homo sapiens
KDDNLEHYKNSTVMARA

SEQ ID NO: 732 - protein, 15 aa, Homo sapiens
LKFLMSNETVLLAKH

SEQ ID NO: 733 - protein, 29 aa, Homo sapiens
KVLTLNLDQVDFQHAGNYSCVASNVQGKH

SEQ ID NO: 734 - protein, 21 aa, Homo sapiens
TATHPPGPAVQLNKTPSSSKK

SEQ ID NO: 735 - protein, 22 aa, Homo sapiens
SSNKQILINKNISESLGEQNRT

SEQ ID NO: 736 - protein, 26 aa, Homo sapiens
SAMINSNDDNGVLAGNWSGTYTGGRD

SEQ ID NO: 737 - protein, 18 aa, Homo sapiens
RYMLMLSFNNSLDVAAHL

SEQ ID NO: 738 - protein, 20 aa, Homo sapiens
RYIRTLMSSGQMAPSSSNKS

SEQ ID NO: 739 - protein, 22 aa, Homo sapiens
RVVSNSSVLASQSVGITNVRTV

SEQ ID NO: 740 - protein, 27 aa, Homo sapiens
RVLTNMTHEDDVPINCTMVLLHIVSKC

SEQ ID NO: 741 - protein, 20 aa, Homo sapiens
RVLNASTLALALANLNGSRQ

SEQ ID NO: 742 - protein, 24 aa, Homo sapiens
RVKAISDSDGVSYPWYGNTTETVT

SEQ ID NO: 743 - protein, 22 aa, Homo sapiens
RVGNLGLATSFFNEKNMNITKD

SEQ ID NO: 744 - protein, 20 aa, Homo sapiens
RVGECSCQVSLMLQNSSARA

SEQ ID NO: 745 - protein, 15 aa, Homo sapiens
RTHGRNGTENINHRG

SEQ ID NO: 746 - protein, 33 aa, Homo sapiens
RTAADNFSTQYVLDGSGHILSQKPSHLGQGKKV

SEQ ID NO: 747 - protein, 17 aa, Homo sapiens
RSSSFGSVSTSSNSSKG

SEQ ID NO: 748 - protein, 19 aa, Homo sapiens
RSSINSVDGESPNGSSDRG

SEQ ID NO: 749 - protein, 24 aa, Homo sapiens
RSPPGENPSPQGELPSPESSRRLF

SEQ ID NO: 750 - protein, 27 aa, Homo sapiens
RSGTNHYSTSSCTPPANGTDSIMANRG

SEQ ID NO: 751 - protein, 21 aa, Homo sapiens
RSCRAAQAMDCEVNNGSSLRD

SEQ ID NO: 752 - protein, 39 aa, Homo sapiens
RRSKSPADSANGTSSSQLSTPKSKQSPISTPTSPGSLRK

SEQ ID NO: 753 - protein, 32 aa, Homo sapiens
RRRNVSGNNGPFGQDKNIAMTGQITSTKPKRT

SEQ ID NO: 754 - protein, 10 aa, Homo sapiens
RRLSLNQSRG

SEQ ID NO: 755 - protein, 23 aa, Homo sapiens
RRLSIGLDNGTISEFILSEDYNK

SEQ ID NO: 756 - protein, 28 aa, Homo sapiens
RRGSEVISNTTEDTQLTSETQSLTGNKK

SEQ ID NO: 757 - protein, 19 aa, Homo sapiens
RRGASVNCTTRTNSTPLRA

SEQ ID NO: 758 - protein, 26 aa, Homo sapiens
RRGAIKHQVNFSSGGVAPLGGSWHRL

SEQ ID NO: 759 - protein, 13 aa, Homo sapiens
RRENNSPSNLPRP

SEQ ID NO: 760 - protein, 16 aa, Homo sapiens
RQSSSEQCSNLSSVRR

SEQ ID NO: 761 - protein, 24 aa, Homo sapiens
RQNSSSAQGSSSNSGGGSGIPQPP

SEQ ID NO: 762 - protein, 16 aa, Homo sapiens
RQHNVINLSSLDAMMD

SEQ ID NO: 763 - protein, 23 aa, Homo sapiens
RNWAHNSSVEASSNLEAPGNERK

SEQ ID NO: 764 - protein, 35 aa, Homo sapiens
RNIYQPPEGNASVIQDFTEDGHLLHTFYLGTGRRV

SEQ ID NO: 765 - protein, 23 aa, Homo sapiens
RNYSKSTELPGKNESTIEQIDKK

SEQ ID NO: 766 - protein, 12 aa, Homo sapiens
RNLTGVMNVARP

SEQ ID NO: 767 - protein, 36 aa, Homo sapiens
RNKSSMVVIDVKMLSGFTPTMSSIEELENKGQVMKT

SEQ ID NO: 768 - protein, 27 aa, Homo sapiens
RNDSESSGVLYSRAPTYFCGQTLTFRQ

SEQ ID NO: 769 - protein, 11 aa, Homo sapiens
RNASLSQSPRV

SEQ ID NO: 770 - protein, 31 aa, Homo sapiens
RMQNNSSPSISPNTSFTSDGSPSPLGGIKRK

SEQ ID NO: 771 - protein, 36 aa, Homo sapiens
RMIEDAIRSHSESASPSALSSSPNNLSPTGWSQPKT

SEQ ID NO: 772 - protein, 20 aa, Homo sapiens
RMETVSNASSSSNPSSPGRI

SEQ ID NO: 773 - protein, 29 aa, Homo sapiens
RMDVSSNSSPSCQASPSQEDVSADMQERR

SEQ ID NO: 774 - protein, 28 aa, Homo sapiens
RLQEMGFIIYGNENASVVPLLLYMPGKV

SEQ ID NO: 775 - protein, 30 aa, Homo sapiens
RLPINGANTVIGSNNSVQNVPTPQTFGGKH

SEQ ID NO: 776 - protein, 22 aa, Homo sapiens
RLMEEIMSEKENKTIVFVETKR

SEQ ID NO: 777 - protein, 12 aa, Homo sapiens
RLLPGNATISKA

SEQ ID NO: 778 - protein, 28 aa, Homo sapiens
RLKNISENADFFASLQLSESAARLREMI

SEQ ID NO: 779 - protein, 19 aa, Homo sapiens
RKTENAYNAIINGEANVTG

SEQ ID NO: 780 - protein, 26 aa, Homo sapiens
RKMFLFGTYLTKNGSEIPSTMQDAKD

SEQ ID NO: 781 - protein, 27 aa, Homo sapiens
RKKKINGSSPDTATSGGYHSPGDSATG

SEQ ID NO: 782 - protein, 25 aa, Homo sapiens
RKGALETDNSNSSAQVSTVGQTSRE

SEQ ID NO: 783 - protein, 12 aa, Homo sapiens
RKFLQENASGRG

SEQ ID NO: 784 - protein, 28 aa, Homo sapiens
RIVAECNAVRQALQDLLSEYMNNTGRKE

SEQ ID NO: 785 - protein, 24 aa, Homo sapiens
RFVRLGTASMLTSPDGPFINLSRL

SEQ ID NO: 786 - protein, 33 aa, Homo sapiens
RFHNHTTHMSLVGTFPWMAPEVIQSLPVSETCD

SEQ ID NO: 787 - protein, 18 aa, Homo sapiens
REVQGNESDLFMSYFPRG

SEQ ID NO: 788 - protein, 19 aa, Homo sapiens
RENALNNLDPNTELNVSRL

SEQ ID NO: 789 - protein, 13 aa, Homo sapiens
REGVQLNLSFIRP

SEQ ID NO: 790 - protein, 19 aa, Homo sapiens
RDLHNMQNGSTLVCTLTRE

SEQ ID NO: 791 - protein, 27 aa, Homo sapiens
RCYVNGQLVSYGDMAWHVNTNDSYDKC

SEQ ID NO: 792 - protein, 24 aa, Homo sapiens
RCTCGFSAVMNRKFGNNSGLFLED

SEQ ID NO: 793 - protein, 18 aa, Homo sapiens
RCDKDSMPDGNLSEEEKL

SEQ ID NO: 794 - protein, 19 aa, Homo sapiens
RAYYGNINFFGGPSNTSVK

SEQ ID NO: 795 - protein, 12 aa, Homo sapiens
RAFSQNANLTKH

SEQ ID NO: 796 - protein, 13 aa, Homo sapiens
QNLSEPIRPNRRT

SEQ ID NO: 797 - protein, 18 aa, Homo sapiens
PPTLHATAASVAVPNKTC

SEQ ID NO: 798 - protein, 34 aa, Homo sapiens
PFPGNMSSMTPSSPGMSQQGGPGMGPPMPTVNRK

SEQ ID NO: 799 - protein, 28 aa, Homo sapiens
PFKYIYELNNVTPLDNLLNLSNEILNAS

SEQ ID NO: 800 - protein, 33 aa, Homo sapiens
MVISPSGFTASPYEGENSSNIIPQQMAAHMLRS

SEQ ID NO: 801 - protein, 15 aa, Homo sapiens
MTSGNISVSWPATKE

SEQ ID NO: 802 - protein, 10 aa, Homo sapiens
MSNITVTYRD

SEQ ID NO: 803 - protein, 19 aa, Homo sapiens
MSFNCSTRNCSSRPIGGRC

SEQ ID NO: 804 - protein, 28 aa, Homo sapiens
MRKLHLGSSLDSSNASVSSSLSLASQKD

SEQ ID NO: 805 - protein, 13 aa, Homo sapiens
MRKLGHLNNFTKL

SEQ ID NO: 806 - protein, 25 aa, Homo sapiens
MNMGSDFDVFAHITNNTAEEYVCRL

SEQ ID NO: 807 - protein, 31 aa, Homo sapiens
MNKAGAVMHSGMQINMQAKQNSSKTTSKRRG

SEQ ID NO: 808 - protein, 28 aa, Homo sapiens
MMRGQGLNMTPSMVAPSGMPATMSNPRI

SEQ ID NO: 809 - protein, 14 aa, Homo sapiens
MLQDIQEVLNRSKS

SEQ ID NO: 810 - protein, 14 aa, Homo sapiens
MLFNVENGTPASRE

SEQ ID NO: 811 - protein, 28 aa, Homo sapiens
MLEPEGMSPMEPAGVSPMPGTQNDTGRT

SEQ ID NO: 812 - protein, 18 aa, Homo sapiens
MIFETTTKNETIAQEDKI

SEQ ID NO: 813 - protein, 18 aa, Homo sapiens
MIFENPSLCASNSEPLKL

SEQ ID NO: 814 - protein, 20 aa, Homo sapiens
MHVLTAPLLANTTEDKPSKD

SEQ ID NO: 815 - protein, 12 aa, Homo sapiens
MENNNLDELNKS

SEQ ID NO: 816 - protein, 18 aa, Homo sapiens
MENYSSLVSLETHTGEKL

SEQ ID NO: 817 - protein, 13 aa, Homo sapiens
MCVKNSTGVEIKR

SEQ ID NO: 818 - protein, 23 aa, Homo sapiens
MASYLETMNITLKQQLVKVYEKY

SEQ ID NO: 819 - protein, 18 aa, Homo sapiens
MASTFIGNSTAIQELFKR

SEQ ID NO: 820 - protein, 29 aa, Homo sapiens
MASFLKNVSATVSINGSGISGNTAINYKH

SEQ ID NO: 821 - protein, 26 aa, Homo sapiens
MAPAMVNSSAASVGLADMMSPGESKL

SEQ ID NO: 822 - protein, 20 aa, Homo sapiens
MANAGPNTNGSQCFICTAKT

SEQ ID NO: 823 - protein, 13 aa, Homo sapiens
LSQFADNTTYAKV

SEQ ID NO: 824 - protein, 14 aa, Homo sapiens
LNRSDSDSSTLAKK

SEQ ID NO: 825 - protein, 19 aa, Homo sapiens
KYSTTTAQNSSSSSSQSKM

SEQ ID NO: 826 - protein, 20 aa, Homo sapiens
KYFEEGLQDGNDTFALLGKA

SEQ ID NO: 827 - protein, 28 aa, Homo sapiens
KVLKNSSLAEFVQSLSQTMGFPQDQIRL

SEQ ID NO: 828 - protein, 13 aa, Homo sapiens
KVGSFGNGTVLRS

SEQ ID NO: 829 - protein, 16 aa, Homo sapiens
KVDTNTENSVNTMNRS

SEQ ID NO: 830 - protein, 13 aa, Homo sapiens
KVDEFNVSSPQFV

SEQ ID NO: 831 - protein, 21 aa, Homo sapiens
KVAIQLNDTHPSLAIPELMRI

SEQ ID NO: 832 - protein, 25 aa, Homo sapiens
KTLIPNASNEAIQLMTEMLNWDPKK

SEQ ID NO: 833 - protein, 26 aa, Homo sapiens
KTGEDEDEEDNDALLKENESPDVRRD

SEQ ID NO: 834 - protein, 32 aa, Homo sapiens
KSSSGNENDEQDSDNANMSTQSPVSSEEYDRT

SEQ ID NO: 835 - protein, 38 aa, Homo sapiens
KSSKDGNSVMSPLFISTFTLNISHTASEGATGENLAKV

SEQ ID NO: 836 - protein, 23 aa, Homo sapiens
KSRMAIWAATDHNVDNTTEIFRE

SEQ ID NO: 837 - protein, 28 aa, Homo sapiens
KSQLGFLNVTNYCHLAHELRLSCMERKK

SEQ ID NO: 838 - protein, 20 aa, Homo sapiens
KSIMENASAGVEHLLLGNKC

SEQ ID NO: 839 - protein, 21 aa, Homo sapiens
KSFSLNRTLTVHQRIHTGEKP

SEQ ID NO: 840 - protein, 15 aa, Homo sapiens
KQPKVGFYSSLNQTH

SEQ ID NO: 841 - protein, 16 aa, Homo sapiens
KNWIALIPKGNCTYRD

SEQ ID NO: 842 - protein, 21 aa, Homo sapiens
KNRVQSKISNLTDAKNPNLRK

SEQ ID NO: 843 - protein, 15 aa, Homo sapiens
KNMETPSTSNVSGRV

SEQ ID NO: 844 - protein, 15 aa, Homo sapiens
KNLNLELNPNQSVKV

SEQ ID NO: 845 - protein, 20 aa, Homo sapiens
KNIKHSGNITFDEIVNIARQ

SEQ ID NO: 846 - protein, 31 aa, Homo sapiens
KNEEIDEMIKEAPGPINFTVFLSMFGEKLKG

SEQ ID NO: 847 - protein, 39 aa, Homo sapiens
KNNSPGTAEGCGGGGGGGGGGGSGGSGGGGGGGGGGDKS

SEQ ID NO: 848 - protein, 29 aa, Homo sapiens
KNNSMNSNMGTGTFGPVGNGVHTGPESRE

SEQ ID NO: 849 - protein, 13 aa, Homo sapiens
KNLSINNDLNLRY

SEQ ID NO: 850 - protein, 20 aa, Homo sapiens
KNITDELGVLGVAGPQARKV

SEQ ID NO: 851 - protein, 19 aa, Homo sapiens
KMSATFIGNNTAIQELFKR

SEQ ID NO: 852 - protein, 20 aa, Homo sapiens
KMNSSIMANVTKAFVGDSKD

SEQ ID NO: 853 - protein, 16 aa, Homo sapiens
KMIGLEDFVADNYSKI

SEQ ID NO: 854 - protein, 27 aa, Homo sapiens
KLYDQCHDTLVQFGGFLASNLSTEDYI

SEQ ID NO: 855 - protein, 20 aa, Homo sapiens
KLVGLNLSPPMSPVQLPLRA

SEQ ID NO: 856 - protein, 23 aa, Homo sapiens
KLSELHDNQDGLVNMESLNSTRS

SEQ ID NO: 857 - protein, 20 aa, Homo sapiens
KLSDSNQTLKVIGEFILERN

SEQ ID NO: 858 - protein, 26 aa, Homo sapiens
KLMPNFSDSFGGGSGAGAGGGGMFGS

SEQ ID NO: 859 - protein, 24 aa, Homo sapiens
KLLMENPYEGPDSQKEKDSNSSKY

SEQ ID NO: 860 - protein, 27 aa, Homo sapiens
KLKLEAELGNMQGLVSGMQNMSIHTKT

SEQ ID NO: 861 - protein, 19 aa, Homo sapiens
KLETKFKSGLNGSILAERE

SEQ ID NO: 862 - protein, 33 aa, Homo sapiens
KKVDAQSSAGKEDMLLSKSPSSLSANISSSPKG

SEQ ID NO: 863 - protein, 24 aa, Homo sapiens
KKRGTFIEFRNGMLNISPIGRSCT

SEQ ID NO: 864 - protein, 22 aa, Homo sapiens
KKQSNNDLFQVNSTSDDEIPRK

SEQ ID NO: 865 - protein, 12 aa, Homo sapiens
KKQINDSANLRE

SEQ ID NO: 866 - protein, 20 aa, Homo sapiens
KKNITYYDSMGGINNEACRI

SEQ ID NO: 867 - protein, 29 aa, Homo sapiens
KHSGGGGGGGGGGGADPAWTSALSGNSSG

SEQ ID NO: 868 - protein, 11 aa, Homo sapiens
KHPLTANASRS

SEQ ID NO: 869 - protein, 19 aa, Homo sapiens
KGRTFNLTAGNDDSIVMKA

SEQ ID NO: 870 - protein, 19 aa, Homo sapiens
KGLGAQTGVLRMKGVNLSC

SEQ ID NO: 871 - protein, 18 aa, Homo sapiens
KGKRMLSEYLSPNLSLRA

SEQ ID NO: 872 - protein, 39 aa, Homo sapiens
KGHPNRSALSLPPGLRIGPSGIPQAGLGVWNEASDLPLG

SEQ ID NO: 873 - protein, 33 aa, Homo sapiens
KGDIGIVPLGLVETAILKPSMWSTFAPVNTTTE

SEQ ID NO: 874 - protein, 19 aa, Homo sapiens
KGCRCDPQGVNATATADRL

SEQ ID NO: 875 - protein, 16 aa, Homo sapiens
KFNVATQNVSTLSSKV

SEQ ID NO: 876 - protein, 23 aa, Homo sapiens
KFLAEHPNVTLTISAARLYYYRD

SEQ ID NO: 877 - protein, 22 aa, Homo sapiens
KFDVNTSAVQVLIEHIGNLDRA

SEQ ID NO: 878 - protein, 31 aa, Homo sapiens
KERPISMINEASNYNVTSDYAVHPMSPVGRT

SEQ ID NO: 879 - protein, 20 aa, Homo sapiens
KENLPENVTASESDAEVERS

SEQ ID NO: 880 - protein, 20 aa, Homo sapiens
KENKGDNNCNHNDPLYENSS

SEQ ID NO: 881 - protein, 12 aa, Homo sapiens
KENPSTVGVERV

SEQ ID NO: 882 - protein, 14 aa, Homo sapiens
KEIENLTQQYEEKA

SEQ ID NO: 883 - protein, 22 aa, Homo sapiens
KEIAFLSEKISNLTIVQAEIKD

SEQ ID NO: 884 - protein, 22 aa, Homo sapiens
KDLYRSNISPLTSEKDLDDFRR

SEQ ID NO: 885 - protein, 32 aa, Homo sapiens
KDLQRSLPPVMAQNLSIPLAFACLLHLANEKN

SEQ ID NO: 886 - protein, 30 aa, Homo sapiens
KDGKNKTDKKDHSNIGNDSKKTDGTKQRSH

SEQ ID NO: 887 - protein, 28 aa, Homo sapiens
KAVVVFDEAHNIDNVCIDSMSVNLTRRT

SEQ ID NO: 888 - protein, 17 aa, Homo sapiens
KAVTVMMDPNSTQRYRL

SEQ ID NO: 889 - protein, 25 aa, Homo sapiens
KALKSNSSLTKGLRTMVEQNLMEKL

SEQ ID NO: 890 - protein, 24 aa, Homo sapiens
KAFAADTGMNRSQSEYCNVGTKTY

SEQ ID NO: 891 - protein, 15 aa, Homo sapiens
GKVFNDSGNLSNHKR

SEQ ID NO: 892 - protein, 19 aa, Homo sapiens
GFVNSTMEEAGLCGLREKA

SEQ ID NO: 893 - protein, 29 aa, Homo sapiens
GAEVKFVLKHQNVSEFASSSGGSQLLFKQ

SEQ ID NO: 894 - protein, 23 aa, Homo sapiens
FVQNCTSLNSLNEVIPTDLQSKF

SEQ ID NO: 895 - protein, 20 aa, Homo sapiens
FGSNMGNGTVFLGIPGDNKQ

SEQ ID NO: 896 - protein, 24 aa, Homo sapiens
EQTYHMALNAATFPKNATWIGPLW

SEQ ID NO: 897 - protein, 32 aa, Homo sapiens
EPCYVSASEIKFDSQEGSVDQNHSWLGRKRRN

SEQ ID NO: 898 - protein, 25 aa, Homo sapiens
EENTDDNITVQGEIRKEDGMENLKN

SEQ ID NO: 899 - protein, 18 aa, Homo sapiens
DPFDNSSRPSQVVAETRK

SEQ ID NO: 900 - protein, 21 aa, Homo sapiens
DLGNVPNGSALTDGSQLPSRD

SEQ ID NO: 901 - protein, 16 aa, Homo sapiens
AMAYDLLPIENDTYKQ

SEQ ID NO: 902 - protein, 21 aa, Homo sapiens
AGLGNGVLPNVSEETVSPTRA

SEQ ID NO: 903 - protein, 26 aa, Homo sapiens
AAEGGNTSDTQSSSSVNIVMGPSARA

SEQ ID NO: 904 - protein, 14 aa, Homo sapiens
MNNTAASPMSTATS

SEQ ID NO: 905 - protein, 27 aa, Homo sapiens
MDSVAFEDVAVNFTQEEWALLDPSQKN

SEQ ID NO: 906 - protein, 17 aa, Homo sapiens
MALNNVSLSSGDQRSRV

SEQ ID NO: 907 - protein, 27 aa, Homo sapiens
MAEAGAGLSETVTETTVTVTTEPENRS

SEQ ID NO: 908 - protein, 36 aa, Homo sapiens
VYNGSVDEGSKPGTYVMTVTANDADDSTTANGMVRY

SEQ ID NO: 909 - protein, 23 aa, Homo sapiens
RYGEEYGNLTRPDITFTYFQPKP

SEQ ID NO: 910 - protein, 26 aa, Homo sapiens
RVSTVYANNGSVLQGTSVASVYHGKI

SEQ ID NO: 911 - protein, 16 aa, Homo sapiens
RSVQLHDSGNYSCYRA

SEQ ID NO: 912 - protein, 25 aa, Homo sapiens
RQLCGLLLGGGGNRSHSTPYCGLRR

SEQ ID NO: 913 - protein, 15 aa, Homo sapiens
RNSSSSGSSGAGQKR

SEQ ID NO: 914 - protein, 15 aa, Homo sapiens
RNHSCSEGQISIFRY

SEQ ID NO: 915 - protein, 34 aa, Homo sapiens
RGLNIALVNGTTGAVLGQKAFDMYSGDVMHLVKF

SEQ ID NO: 916 - protein, 17 aa, Homo sapiens
MGAAVTLKNLTGLNQRR

SEQ ID NO: 917 - protein, 18 aa, Homo sapiens
LFTMHNNRSLTIHQAMRG

SEQ ID NO: 918 - protein, 23 aa, Homo sapiens
KVMVVLTDGGIFEDPLNLTTVIN

SEQ ID NO: 919 - protein, 23 aa, Homo sapiens
KRRKPGSHTHSASEDNTTNNVRE

SEQ ID NO: 920 - protein, 26 aa, Homo sapiens
KNASDGALMDDNQNEWGDEDLETKKF

SEQ ID NO: 921 - protein, 35 aa, Homo sapiens
KMPAAATIPANSSDAPFIRPGPGTLDGRWVSLHRS

SEQ ID NO: 922 - protein, 22 aa, Homo sapiens
KMLAQKSGNIINMSSVASSVKG

SEQ ID NO: 923 - protein, 27 aa, Homo sapiens
KGCVLLSHLNETVTVSASLESGRENRS

SEQ ID NO: 924 - protein, 15 aa, Homo sapiens
KDNFTAAGYNSLESV

SEQ ID NO: 925 - protein, 16 aa, Homo sapiens
KAIHLDLEEYRNSSRV

SEQ ID NO: 926 - protein, 24 aa, Homo sapiens
ENAPNGTLVVTVNATDLDEGVNKD

SEQ ID NO: 927 - protein, 16 aa, Homo sapiens
ANRTGSVEAQTALKKR

SEQ ID NO: 928 - protein, 25 aa, Homo sapiens
RTSNGQPVKTAGEITQHNVTELLRD

SEQ ID NO: 929 - protein, 19 aa, Homo sapiens
RDIETFYNTSIEEMPPMLL

SEQ ID NO: 930 - protein, 28 aa, Homo sapiens
MRDSEATGSASSAQDSTSENSSSVGGRC

SEQ ID NO: 931 - protein, 15 aa, Homo sapiens
VFNILFVTSENGSRN

SEQ ID NO: 932 - protein, 19 aa, Homo sapiens
RYFCLAANDQNNVTIMANL

SEQ ID NO: 933 - protein, 26 aa, Homo sapiens
RYDGAVQVMATQDGANFTAARQGYRR

SEQ ID NO: 934 - protein, 15 aa, Homo sapiens
RVRASSYSANGTIEY

SEQ ID NO: 935 - protein, 32 aa, Homo sapiens
RQFYVAAQGISWSYRPEPTNSSLNLSVTSFKK

SEQ ID NO: 936 - protein, 18 aa, Homo sapiens
RNPSASTFLHLSTNSFRL

SEQ ID NO: 937 - protein, 31 aa, Homo sapiens
RNMSQLMETGEVSDDLASQLIYQLVAELAKA

SEQ ID NO: 938 - protein, 11 aa, Homo sapiens
RMDGSLNFNRT

SEQ ID NO: 939 - protein, 28 aa, Homo sapiens
RLFLGNYTGNVGNDALQYHNNTAFSTKD

SEQ ID NO: 940 - protein, 37 aa, Homo sapiens
RLEPEGPAPHMLGLVAGWGISNPNVTVDEIISSGTRT

SEQ ID NO: 941 - protein, 40 aa, Homo sapiens
RIAQLRPEDLAGLAALQELDVSNLSLQALPGDLSGLFPRL

SEQ ID NO: 942 - protein, 18 aa, Homo sapiens
RHVFPHNHTADIQSEVHC

SEQ ID NO: 943 - protein, 18 aa, Homo sapiens
RHLTLIDLSNNSISMLTN

SEQ ID NO: 944 - protein, 25 aa, Homo sapiens
RHCDGNVSSCGDHPSEGCFCPPDKV

SEQ ID NO: 945 - protein, 27 aa, Homo sapiens
RGNVAVTVSGHTCQHWSAQTPHTHNRT

SEQ ID NO: 946 - protein, 21 aa, Homo sapiens
RFRTVNSTSWMEVNFAKNRKD

SEQ ID NO: 947 - protein, 33 aa, Homo sapiens
QRHAAEIANMSLDILSAVGTFRMRHMPEVPVRI

SEQ ID NO: 948 - protein, 19 aa, Homo sapiens
QNFTTLEAAPSEAPDVWRI

SEQ ID NO: 949 - protein, 32 aa, Homo sapiens
NLLPICLPDNDTFYDLGLMGYVSGFGVMEEKI

SEQ ID NO: 950 - protein, 29 aa, Homo sapiens
MMSNQYVPVKTHEEVKMTLNDTLAKTNRE

SEQ ID NO: 951 - protein, 11 aa, Homo sapiens
MKYLNLSSTRI

SEQ ID NO: 952 - protein, 19 aa, Homo sapiens
MFEHFLLHREGMFNDTLRL

SEQ ID NO: 953 - protein, 20 aa, Homo sapiens
MEITWTPMNATSAFGPNLRY

SEQ ID NO: 954 - protein, 34 aa, Homo sapiens
MDNPFEFNPEDPIPVSFSPVDTNSTSGDPVEKKD

SEQ ID NO: 955 - protein, 13 aa, Homo sapiens
LTFPNSSPGLRRQ

SEQ ID NO: 956 - protein, 25 aa, Homo sapiens
KYRCNDTIPEDFQEFQTQNFDRFDN

SEQ ID NO: 957 - protein, 35 aa, Homo sapiens
KVEGSSSHLVTFTVLPLEIGLHNINFSLETWFGKE

SEQ ID NO: 958 - protein, 25 aa, Homo sapiens
KVASHLEVNCDKRNLTALPPDLPKD

SEQ ID NO: 959 - protein, 18 aa, Homo sapiens
KTGTDSNSTESSETSTGS

SEQ ID NO: 960 - protein, 8 aa, Homo sapiens
KSYNETKI

SEQ ID NO: 961 - protein, 33 aa, Homo sapiens
KSDSSKSESDSSDSDSKSDSSDSNSSDSSDNSD

SEQ ID NO: 962 - protein, 18 aa, Homo sapiens
KQMNMSPPPGNAGPVIMS

SEQ ID NO: 963 - protein, 18 aa, Homo sapiens
KQINSSISGNLWDKDQRA

SEQ ID NO: 964 - protein, 25 aa, Homo sapiens
KQFSLNWTYQECNNCSEEMFLQFRM

SEQ ID NO: 965 - protein, 24 aa, Homo sapiens
KNGDPELNVIQNYNEGIIDNLSKD

SEQ ID NO: 966 - protein, 26 aa, Homo sapiens
KMTSTMPELNPTSRIAEAMLQTTTRP

SEQ ID NO: 967 - protein, 14 aa, Homo sapiens
KMDIENLTISNAQM

SEQ ID NO: 968 - protein, 32 aa, Homo sapiens
KLYQLQVPLLGVLDLSTNVYSNLYNWSASYSG

SEQ ID NO: 969 - protein, 21 aa, Homo sapiens
KLTKNMLCAGYKNESYDACKG

SEQ ID NO: 970 - protein, 23 aa, Homo sapiens
KKTLDEERNSSSRSGITGTTNKK

SEQ ID NO: 971 - protein, 27 aa, Homo sapiens
KHLFEDSQNKLGAEMVINTSGKYGYKS

SEQ ID NO: 972 - protein, 25 aa, Homo sapiens
KEPHLNYSPTCLEPPVLSIHPGAID

SEQ ID NO: 973 - protein, 30 aa, Homo sapiens
KEEFVIHTIFPPNGMNLYKNNHSESSSNRS

SEQ ID NO: 974 - protein, 21 aa, Homo sapiens
KECMETLLSSNASMKEELERV

SEQ ID NO: 975 - protein, 15 aa, Homo sapiens
EYDTIPHTNRTILKE

SEQ ID NO: 976 - protein, 15 aa, Homo sapiens
ARDSNVTLAPSGPKG

SEQ ID NO: 977 - protein, 16 aa, Homo sapiens
AEEEMLENVSLVCPKD

SEQ ID NO: 978 - protein, 13 aa, Homo sapiens
VYNPSGLNLSIKG

SEQ ID NO: 979 - protein, 11 aa, Homo sapiens
RYSGVNMTGFR

SEQ ID NO: 980 - protein, 16 aa, Homo sapiens
RYNVSQQALDLQNLRF

SEQ ID NO: 981 - protein, 28 aa, Homo sapiens
RVHLTPVEGVPDSDYINASFINGYQEKN

SEQ ID NO: 982 - protein, 17 aa, Homo sapiens
RVESNSSAHPWGLVGKS

SEQ ID NO: 983 - protein, 29 aa, Homo sapiens
RVEIISNNSIQAVFNPTGVYAPSGYSYRC

SEQ ID NO: 984 - protein, 14 aa, Homo sapiens
RTLHSTFQPNISRY

SEQ ID NO: 985 - protein, 16 aa, Homo sapiens
RSNISSYDGEYAQPST

SEQ ID NO: 986 - protein, 15 aa, Homo sapiens
RSLYGKEDNDTLVRC

SEQ ID NO: 987 - protein, 29 aa, Homo sapiens
RRLCTNLVVNCWVLGFIWFLIPIVNISQM

SEQ ID NO: 988 - protein, 20 aa, Homo sapiens
RQNVYIPGSNATLTNAAGKR

SEQ ID NO: 989 - protein, 25 aa, Homo sapiens
RNVNFSGIAGNPVTFNENGDAPGRY

SEQ ID NO: 990 - protein, 24 aa, Homo sapiens
RNTPWTPWLPVNVTQGGARQEQRF

SEQ ID NO: 991 - protein, 27 aa, Homo sapiens
RNPVTSTNVLGMMTAILGVFLYNKTKY

SEQ ID NO: 992 - protein, 13 aa, Homo sapiens
RKTTSNNFTHSRA

SEQ ID NO: 993 - protein, 27 aa, Homo sapiens
RISWEEYNRTNTRVTHYLPNVTLEYRV

SEQ ID NO: 994 - protein, 24 aa, Homo sapiens
RFGKQAALDPFILLNLLPNSTDKY

SEQ ID NO: 995 - protein, 27 aa, Homo sapiens
RENLSAAFSRQLNVNAKPFVPNVHAAE

SEQ ID NO: 996 - protein, 37 aa, Homo sapiens
RCFPWTNITPPALPGITNDTTIQQGISGLIDSLNARD

SEQ ID NO: 997 - protein, 20 aa, Homo sapiens
RAAENASLGPTNGSKLMNRQ

SEQ ID NO: 998 - protein, 27 aa, Homo sapiens
PWAAAHGGAMMDVNSSGRPDLYGHLRS

SEQ ID NO: 999 - protein, 22 aa, Homo sapiens
PMDEYSNQNNFVHDCVNITIKQ

SEQ ID NO: 1000 - protein, 21 aa, Homo sapiens
MTTENPNQTVVSHFFLEGLRY

SEQ ID NO: 1001 - protein, 17 aa, Homo sapiens
MQSQAGGNNTGSTPLRK

SEQ ID NO: 1002 - protein, 18 aa, Homo sapiens
MGMIFTLFTINVSTDMRH

SEQ ID NO: 1003 - protein, 34 aa, Homo sapiens
KVNATNFQALAAEFGGESFTSTFQTQSPPSFYRA

SEQ ID NO: 1004 - protein, 22 aa, Homo sapiens
KVANNVTEFIFLGLSQDSGMRW

SEQ ID NO: 1005 - protein, 21 aa, Homo sapiens
KTPCMPQAASNTSLGLGDLRV

SEQ ID NO: 1006 - protein, 25 aa, Homo sapiens
KTANSSPIHFAGAQTSLPAFSPGRL

SEQ ID NO: 1007 - protein, 35 aa, Homo sapiens
KSNGLMFTNIMMQNTNPSASPEYMFSSNIEPEPKD

SEQ ID NO: 1008 - protein, 37 aa, Homo sapiens
KSLMDQLQGVVSNFSTAIPDFHAVLAGPGGPGNGLRS

SEQ ID NO: 1009 - protein, 22 aa, Homo sapiens
KSIEQSIEQEEGLNRSSADLRI

SEQ ID NO: 1010 - protein, 30 aa, Homo sapiens
KSGKGDSTLQVSSGLNENLTVNGGGWNEKS

SEQ ID NO: 1011 - protein, 24 aa, Homo sapiens
KRTIYLNITNTLNITNNNYYSVEV

SEQ ID NO: 1012 - protein, 27 aa, Homo sapiens
KQHLQINWTGLTNLLDAPGINDVSDSL

SEQ ID NO: 1013 - protein, 24 aa, Homo sapiens
KQDYNMDLELDEYYNKTLATENNT

SEQ ID NO: 1014 - protein, 18 aa, Homo sapiens
KNLLIFNLSEGDSGVYQC

SEQ ID NO: 1015 - protein, 26 aa, Homo sapiens
KNKIARLGNGSQDLNHGVDNENGGRR

SEQ ID NO: 1016 - protein, 28 aa, Homo sapiens
KNATVLIWIYGGGFQTGTSSLHVYDGKF

SEQ ID NO: 1017 - protein, 19 aa, Homo sapiens
KMPPGINSSQSLPVDNHEK

SEQ ID NO: 1018 - protein, 32 aa, Homo sapiens
KMENESATEGEDSAMTDMPPTEEVTDIVEMRE

SEQ ID NO: 1019 - protein, 17 aa, Homo sapiens
KLRWDPADYENVTSIRI

SEQ ID NO: 1020 - protein, 17 aa, Homo sapiens
KLQLWTNGSVAYSVARE

SEQ ID NO: 1021 - protein, 33 aa, Homo sapiens
KLNTTISTTSKGTLLPNSIMTSTLKDQGGISRT

SEQ ID NO: 1022 - protein, 28 aa, Homo sapiens
KLNPTPGSNAISDAYLNASETTTLSPSG

SEQ ID NO: 1023 - protein, 22 aa, Homo sapiens
KLMGSAGNATISTVSSTQRKRQ

SEQ ID NO: 1024 - protein, 32 aa, Homo sapiens
KKGDGLQLPAADGAAASNAADSANASLVNGKM

SEQ ID NO: 1025 - protein, 28 aa, Homo sapiens
KINSSSVCVSSISENDNGISFTCRLGRD

SEQ ID NO: 1026 - protein, 30 aa, Homo sapiens
KIIGNSVGALGNLTIILAIIVFVFALVGKQ

SEQ ID NO: 1027 - protein, 21 aa, Homo sapiens
KFVDTAGNFSFPVNFSLSLLN

SEQ ID NO: 1028 - protein, 28 aa, Homo sapiens
KFRNPPLVNGSLALAFQGTAPPPNWRRP

SEQ ID NO: 1029 - protein, 19 aa, Homo sapiens
KEASDIILTDDNFTSIVKA

SEQ ID NO: 1030 - protein, 21 aa, Homo sapiens
KANMTLTSGIMFIVSGLCAIA

SEQ ID NO: 1031 - protein, 20 aa, Homo sapiens
KAGNETQISEFLLLGFSEKQ

SEQ ID NO: 1032 - protein, 26 aa, Homo sapiens
KAELSNHTRPVILVPGCLGNQLEAKL

SEQ ID NO: 1033 - protein, 19 aa, Homo sapiens
IMYPIAVMGNITIILMSRL

SEQ ID NO: 1034 - protein, 13 aa, Homo sapiens
EYKIWCLGNETRF

SEQ ID NO: 1035 - protein, 26 aa, Homo sapiens
ENYLEFGLETGFTNFSDSAMQFLEKQ

SEQ ID NO: 1036 - protein, 30 aa, Homo sapiens
DKAKKEHERSNASPAIFPEYQLWEDHWIRC

SEQ ID NO: 1037 - protein, 14 aa, Homo sapiens
MILSNTTAVTPFLT

SEQ ID NO: 1038 - protein, 18 aa, Homo sapiens
MGMEGLLQNSTNFVLTGL

SEQ ID NO: 1039 - protein, 14 aa, Homo sapiens
MENGSYTSYFILLG

SEQ ID NO: 1040 - protein, 28 aa, Homo sapiens
MACLMAAFSVGTAMNASSYSAEMTEPKS

SEQ ID NO: 1041 - protein, 10 aa, Homo sapiens
KANDTSYIRD

SEQ ID NO: 1042 - protein, 19 aa, Homo sapiens
KVPVTLALNNTLFLIEERQ

SEQ ID NO: 1043 - protein, 16 aa, Homo sapiens
KYSVANDTGFVDIPKQ

SEQ ID NO: 1044 - protein, 17 aa, Homo sapiens
RLNLSENYTLSISNARI

SEQ ID NO: 1045 - protein, 16 aa, Homo sapiens
RYMQNLTVEQPIEVKK

SEQ ID NO: 1046 - protein, 28 aa, Homo sapiens
RTVNSLNVSAISIPEHDEADEISDENRE

SEQ ID NO: 1047 - protein, 27 aa, Homo sapiens
KVLSLPLNSSAVVNCSVHGLPTPALRW

SEQ ID NO: 1048 - protein, 11 aa, Homo sapiens
RNLHQSNTSRA

SEQ ID NO: 1049 - protein, 18 aa, Homo sapiens
RTALFPDLLAQGNASLRL

SEQ ID NO: 1050 - protein, 24 aa, Homo sapiens
KFLYNFTQIPHLAGTEQNFQLAKQ

SEQ ID NO: 1051 - protein, 28 aa, Homo sapiens
RNCTTLQGLAPGTAYLVTVTAAFRSGRE

SEQ ID NO: 1052 - protein, 32 aa, Homo sapiens
RVQGCMPQPGCNLLNGTQEIGPVGMTENCNRK

SEQ ID NO: 1053 - protein, 17 aa, Homo sapiens
RLLANSSMLGEGQVLRS

SEQ ID NO: 1054 - protein, 10 aa, Homo sapiens
KEGDNITLKC

SEQ ID NO: 1055 - protein, 18 aa, Homo sapiens
KKLRLPDTGLYNMTDSGT

SEQ ID NO: 1056 - protein, 18 aa, Homo sapiens
RIPNNTQWVTWSPVGHKL

SEQ ID NO: 1057 - protein, 17 aa, Homo sapiens
KNIETFTCDTQNITYRF

SEQ ID NO: 1058 - protein, 16 aa, Homo sapiens
RTCVSNCTASQFVCKN

SEQ ID NO: 1059 - protein, 15 aa, Homo sapiens
RMHLNGSNVQVLHRT

SEQ ID NO: 1060 - protein, 23 aa, Homo sapiens
KSAWCEAKNITQIVGHSGCEAKS

SEQ ID NO: 1061 - protein, 14 aa, Homo sapiens
KINYTVPQSGTFKI

SEQ ID NO: 1062 - protein, 17 aa, Homo sapiens
RLAFATMFNSSEQSQKG

SEQ ID NO: 1063 - protein, 17 aa, Homo sapiens
RLHVGNYNGTAGDALRF

SEQ ID NO: 1064 - protein, 22 aa, Homo sapiens
MLFTNEDNPHGNDSAKASRART

SEQ ID NO: 1065 - protein, 23 aa, Homo sapiens
KQMESSEGSSNTTEATSGSGVRG

SEQ ID NO: 1066 - protein, 34 aa, Homo sapiens
KHMGSASEDSMGPPRVGRVLPTTNGTFPVCIWRG

SEQ ID NO: 1067 - protein, 20 aa, Homo sapiens
RGLCVLSVGANLTTFDGARG

SEQ ID NO: 1068 - protein, 31 aa, Homo sapiens
KGGAVAADGRIEPGDMLLQVNEINFENMSND

SEQ ID NO: 1069 - protein, 27 aa, Homo sapiens
RLVAMNMPLNSDGTVMFNATLFALVRT

SEQ ID NO: 1070 - protein, 24 aa, Homo sapiens
KSEYMVIEEGGMNHSAFPQTPFKT

SEQ ID NO: 1071 - protein, 24 aa, Homo sapiens
REAESLQPMTVVGTDYVFHNDTKV

SEQ ID NO: 1072 - protein, 28 aa, Homo sapiens
RMELSMGPIQANHTGTGLLLTLQPEQKF

SEQ ID NO: 1073 - protein, 23 aa, Homo sapiens
KDLNGNVFQDAVFNQTVTVIERE

SEQ ID NO: 1074 - protein, 20 aa, Homo sapiens
KANIQFGDNGTTISAVSNKA

SEQ ID NO: 1075 - protein, 15 aa, Homo sapiens
KVSLTNVSISDEGRY

SEQ ID NO: 1076 - protein, 18 aa, Homo sapiens
KALSQQNVSMDLATFMKL

SEQ ID NO: 1077 - protein, 17 aa, Homo sapiens
RLLANYASQNITYHCKN

SEQ ID NO: 1078 - protein, 12 aa, Homo sapiens
RLTFYGNWSEKT

SEQ ID NO: 1079 - protein, 22 aa, Homo sapiens
KYGNMTEDHVMHLLQNADPLKV

SEQ ID NO: 1080 - protein, 17 aa, Homo sapiens
KINATDADEPNTLNSKI

SEQ ID NO: 1081 - protein, 17 aa, Homo sapiens
KLRPIIISMNYSLPLRM

SEQ ID NO: 1082 - protein, 19 aa, Homo sapiens
KQDILNNSLTTLSQDITKV

SEQ ID NO: 1083 - protein, 14 aa, Homo sapiens
KNTSVGPLYSGCRL

SEQ ID NO: 1084 - protein, 9 aa, Homo sapiens
KNTSVGPLY

SEQ ID NO: 1085 - protein, 30 aa, Homo sapiens
MLVNGENFGVSLNIFPSVAINKSSGAPRRV

SEQ ID NO: 1086 - protein, 14 aa, Homo sapiens
KITNISAVEMTPLP

SEQ ID NO: 1087 - protein, 15 aa, Homo sapiens
KAPGWANSSAGSGRI

SEQ ID NO: 1088 - protein, 23 aa, Homo sapiens
RSALLEFACTHNLGNCSTTAMKL

SEQ ID NO: 1089 - protein, 15 aa, Homo sapiens
KNISLTKQIDQLSKD

SEQ ID NO: 1090 - protein, 24 aa, Homo sapiens
KDSSGVIHVMLNGSEPTGAYPIKG

SEQ ID NO: 1091 - protein, 22 aa, Homo sapiens
KYRPENSVANDTGFTVVAPGKE

SEQ ID NO: 1092 - protein, 21 aa, Homo sapiens
RGHCWGPGPTQCVNCSQFLRG

SEQ ID NO: 1093 - protein, 21 aa, Homo sapiens
RLSTTECVDAGGESHANNTKW

SEQ ID NO: 1094 - protein, 19 aa, Homo sapiens
KDVRPINVSSHCPSAGTKC

SEQ ID NO: 1095 - protein, 9 aa, Homo sapiens
RKFNTTERV

SEQ ID NO: 1096 - protein, 24 aa, Homo sapiens
RVSVNTANVTLGPQLMEVTVYRRH

SEQ ID NO: 1097 - protein, 19 aa, Homo sapiens
KVYCNFTAGGSTCVFPDKK

SEQ ID NO: 1098 - protein, 10 aa, Homo sapiens
KSELVNETRW

SEQ ID NO: 1099 - protein, 20 aa, Homo sapiens
FSVTSNETITVSPEYVGSRL

SEQ ID NO: 1100 - protein, 28 aa, Homo sapiens
RSSSGHLFTLPGATPGGDPNSNNSNNKL

SEQ ID NO: 1101 - protein, 31 aa, Homo sapiens
RYMLASPDVTSILLTYNLSNTNSCNVSPKKE

SEQ ID NO: 1102 - protein, 14 aa, Homo sapiens
VTGDGVNDSPALKK

SEQ ID NO: 1103 - protein, 21 aa, Homo sapiens
RQGAIVAVTGDGVNDSPALKK

SEQ ID NO: 1104 - protein, 16 aa, Homo sapiens
PKWLNGSLLRIGPGKF

SEQ ID NO: 1105 - protein, 28 aa, Homo sapiens
KVDSEENTLNSQTNATSGMNPDGVLSKM

SEQ ID NO: 1106 - protein, 22 aa, Homo sapiens
RQDAVVAVTGDGVNDSPALKKA

SEQ ID NO: 1107 - protein, 10 aa, Homo sapiens
AQNPANMSKY

SEQ ID NO: 1108 - protein, 15 aa, Homo sapiens
TLLNDTGNYTCMLRN

SEQ ID NO: 1109 - protein, 16 aa, Homo sapiens
KSDPHWESMLNATTRR

SEQ ID NO: 1110 - protein, 19 aa, Homo sapiens
KGLTTTGNSSLNSTSNTKV

SEQ ID NO: 1111 - protein, 30 aa, Homo sapiens
RELLLHLIDYLVTSDGKDPEITNLINSTRI

SEQ ID NO: 1112 - protein, 12 aa, Homo sapiens
IMNGTLYIAARD

SEQ ID NO: 1113 - protein, 19 aa, Homo sapiens
KFNSTQIAAMAPEHEEPRI

SEQ ID NO: 1114 - protein, 28 aa, Homo sapiens
RSKKLGGSGGSNGSSSGKTDSGGGSRRS

SEQ ID NO: 1115 - protein, 24 aa, Homo sapiens
RMIRTNEAVPKTAPTNVSGRSGRR

SEQ ID NO: 1116 - protein, 20 aa, Homo sapiens
KQFSNMGLLSQTEDNPSSKM

SEQ ID NO: 1117 - protein, 12 aa, Homo sapiens
STAQLNLSNMKI

SEQ ID NO: 1118 - protein, 27 aa, Homo sapiens
RTILENNSGRSNSNPFNKEELTAILKF

SEQ ID NO: 1119 - protein, 22 aa, Homo sapiens
RSMNPNVSMVSSASSSPSSSRT

SEQ ID NO: 1120 - protein, 18 aa, Homo sapiens
KVAPQNDSFGTQLPPMHQ

SEQ ID NO: 1121 - protein, 24 aa, Homo sapiens
KTLVLSNLSYSATEETLQEVFEKA

SEQ ID NO: 1122 - protein, 28 aa, Homo sapiens
KSVVEKMKNISNHLVIEANLDGELNLKI

SEQ ID NO: 1123 - protein, 27 aa, Homo sapiens
KLVSDDLDSSLANLVGNLGIGNGTTKN

SEQ ID NO: 1124 - protein, 19 aa, Homo sapiens
KIIMLPSALDQLSQLNITY

SEQ ID NO: 1125 - protein, 26 aa, Homo sapiens
KHYQTVFLMRSNSTLNKHNENYKQKK

SEQ ID NO: 1126 - protein, 28 aa, Homo sapiens
MNGGNESSGADRAGGPVATSVPIGWQRC

SEQ ID NO: 1127 - protein, 16 aa, Homo sapiens
KTGVNSGVMLMNMTRM

SEQ ID NO: 1128 - protein, 9 aa, Homo sapiens
VFDNTTVKT

SEQ ID NO: 1129 - protein, 32 aa, Homo sapiens
RVEGLQGVYIATLINGSMNEENMRSVITFDKG

SEQ ID NO: 1130 - protein, 16 aa, Homo sapiens
NIDGLDLNNLSERARG

SEQ ID NO: 1131 - protein, 11 aa, Homo sapiens
AGYNVSGSVRS

SEQ ID NO: 1132 - protein, 20 aa, Homo sapiens
KNVTNKAASGPKRTPGAVHT

SEQ ID NO: 1133 - protein, 20 aa, Homo sapiens
RSNHTQATNDPPEVTVFPKE

SEQ ID NO: 1134 - protein, 16 aa, Homo sapiens
KNLSCTNVLQSNSTKK

SEQ ID NO: 1135 - protein, 24 aa, Homo sapiens
RSPMSTNSSVHTGSDVEQDAEKKA

SEQ ID NO: 1136 - protein, 21 aa, Homo sapiens
RVEDEGNYTCLFVTFPQGSRS

SEQ ID NO: 1137 - protein, 40 aa, Homo sapiens
REREAASKSNEVVAVPTNGTVNNVAQEPVNTLGDISGNKT

SEQ ID NO: 1138 - protein, 11 aa, Homo sapiens
AVPTNGTVNNV

SEQ ID NO: 1139 - protein, 30 aa, Homo sapiens
RSCCEGMICNVELPTNHTNAVFAVMHAQRT

SEQ ID NO: 1140 - protein, 23 aa, Homo sapiens
RGGGFGGNDNFGRGGNFSGRGGF

SEQ ID NO: 1141 - protein, 13 aa, Homo sapiens
YLINGVNANNTRV

SEQ ID NO: 1142 - protein, 13 aa, Homo sapiens
VNTSSVATSSMKG

SEQ ID NO: 1143 - protein, 24 aa, Homo sapiens
RTEDVMFISDNESFNPSLWEEQRK

SEQ ID NO: 1144 - protein, 19 aa, Homo sapiens
RRSYSVSGVCQPAIPNSSL

SEQ ID NO: 1145 - protein, 29 aa, Homo sapiens
RNNPVIQSSTTTNTTTTTTTTTSNTTHRV

SEQ ID NO: 1146 - protein, 13 aa, Homo sapiens
RNLSEGNNANYTE

SEQ ID NO: 1147 - protein, 17 aa, Homo sapiens
RNITPLLLDMVVHNDRL

SEQ ID NO: 1148 - protein, 18 aa, Homo sapiens
RMTNSSSSPSLLNDSAKP

SEQ ID NO: 1149 - protein, 28 aa, Homo sapiens
RLMPLEAGIPDPPNMSAELIQLKAKERH

SEQ ID NO: 1150 - protein, 24 aa, Homo sapiens
RLIGEPDLVVSVIPNNSNENIPRV

SEQ ID NO: 1151 - protein, 13 aa, Homo sapiens
RLATNTSAPDLKN

SEQ ID NO: 1152 - protein, 23 aa, Homo sapiens
RLASSNSSQSLAPLMMEVPMLSS

SEQ ID NO: 1153 - protein, 21 aa, Homo sapiens
RKRMNTNPSRGPYHFRAPSRI

SEQ ID NO: 1154 - protein, 14 aa, Homo sapiens
RKCQLNLTDSENRT

SEQ ID NO: 1155 - protein, 25 aa, Homo sapiens
RKATMAGGLANLQDLENTTPAQPKN

SEQ ID NO: 1156 - protein, 20 aa, Homo sapiens
RIYIEDNLSNSNEVEMEEKG

SEQ ID NO: 1157 - protein, 10 aa, Homo sapiens
RINDSAVMLF

SEQ ID NO: 1158 - protein, 30 aa, Homo sapiens
RIDRMFPEMSIHLSRPNGTSAMLLVTLGKV

SEQ ID NO: 1159 - protein, 12 aa, Homo sapiens
RDFDQNMNDSCE

SEQ ID NO: 1160 - protein, 28 aa, Homo sapiens
RCSHGMVEANGLIYVCGGSLGNNVSGRV

SEQ ID NO: 1161 - protein, 23 aa, Homo sapiens
RASLNHSTAFNPQPQSQMQDTRQ

SEQ ID NO: 1162 - protein, 10 aa, Homo sapiens
RASLNHSTAF

SEQ ID NO: 1163 - protein, 9 aa, Homo sapiens
LLLSNCSKA

SEQ ID NO: 1164 - protein, 17 aa, Homo sapiens
KWRLSNNSVVEIASLRF

SEQ ID NO: 1165 - protein, 19 aa, Homo sapiens
KVLNHSPMSDASVNFDYKS

SEQ ID NO: 1166 - protein, 20 aa, Homo sapiens
KNMHVKEMHTCTVEGCNATF

SEQ ID NO: 1167 - protein, 19 aa, Homo sapiens
KMSLVMPAMAPNETLSGRG

SEQ ID NO: 1168 - protein, 17 aa, Homo sapiens
KMQSTQTTNTSNSTNKS

SEQ ID NO: 1169 - protein, 21 aa, Homo sapiens
KLKGAILTTMLATRNFSAAKS

SEQ ID NO: 1170 - protein, 15 aa, Homo sapiens
KLGVGAFNLTLSMLP

SEQ ID NO: 1171 - protein, 16 aa, Homo sapiens
KLFKNITVEEMNELER

SEQ ID NO: 1172 - protein, 16 aa, Homo sapiens
KKVAHLAGCNHNSTQI

SEQ ID NO: 1173 - protein, 22 aa, Homo sapiens
KKSSLDSNSSEMAIMMGADAKI

SEQ ID NO: 1174 - protein, 29 aa, Homo sapiens
KKLSNGSIVPLEDSLNLIEVATEVPKRKT

SEQ ID NO: 1175 - protein, 21 aa, Homo sapiens
KKDGENVSMKDPPDLLDRQKC

SEQ ID NO: 1176 - protein, 27 aa, Homo sapiens
KINSSPNVNTTASGVEDLNIIQVTIPD

SEQ ID NO: 1177 - protein, 27 aa, Homo sapiens
KGYTPGESIQIFAEIENCSSRMVVPKA

SEQ ID NO: 1178 - protein, 20 aa, Homo sapiens
KGVARVVNITSPGHDASSRS

SEQ ID NO: 1179 - protein, 20 aa, Homo sapiens
KGSGQQAPSNVSGGLLVHRQ

SEQ ID NO: 1180 - protein, 26 aa, Homo sapiens
KGPVTSILPSQVNSSPVINHLLLGKK

SEQ ID NO: 1181 - protein, 14 aa, Homo sapiens
KGFNWSSALTKHKR

SEQ ID NO: 1182 - protein, 18 aa, Homo sapiens
KFNISNGGPAPEAITDKI

SEQ ID NO: 1183 - protein, 21 aa, Homo sapiens
KDYNASASTISPPSSMEEDKF

SEQ ID NO: 1184 - protein, 25 aa, Homo sapiens
KDRNASNDGFEMCSLSDFSANEQKS

SEQ ID NO: 1185 - protein, 14 aa, Homo sapiens
KDNSTACSHPVTKH

SEQ ID NO: 1186 - protein, 17 aa, Homo sapiens
ENVSMKDPPDLLDRQKC

SEQ ID NO: 1187 - protein, 16 aa, Homo sapiens
DNMSSLTSLSVSTPKS

SEQ ID NO: 1188 - protein, 20 aa, Homo sapiens
CTLHPNDSLAMEGPLSRVKS

SEQ ID NO: 1189 - protein, 17 aa, Homo sapiens
AVSKQSSSTNYTNELKA

SEQ ID NO: 1190 - protein, 16 aa, Homo sapiens
AGLNSSATSTANNSRC

SEQ ID NO: 1191 - protein, 29 aa, Homo sapiens
MVNHTMFFDVAVDSEPLDHVSFELFAEKF

SEQ ID NO: 1192 - protein, 11 aa, Homo sapiens
MMNNTDFLMLN

SEQ ID NO: 1193 - protein, 26 aa, Homo sapiens
MDPNCSCAAGDSCTCAGSCKCKECKC

SEQ ID NO: 1194 - protein, 16 aa, Homo sapiens
RVLNASAEAQRAAARF

SEQ ID NO: 1195 - protein, 26 aa, Homo sapiens
RNRHDLLNVSQGTVFIFWGPSSYMRR

SEQ ID NO: 1196 - protein, 12 aa, Homo sapiens
RLMNLTFLDLTR

SEQ ID NO: 1197 - protein, 14 aa, Homo sapiens
RKVLINNSLDEPRA

SEQ ID NO: 1198 - protein, 25 aa, Homo sapiens
RASASSFLNMSRCCIRALAEHKKKN

SEQ ID NO: 1199 - protein, 21 aa, Homo sapiens
RAPSNVSTIIHILYLPEDAKG

SEQ ID NO: 1200 - protein, 12 aa, Homo sapiens
RAMLAAIYNTTE

SEQ ID NO: 1201 - protein, 13 aa, Homo sapiens
NAQFDGNNETIKW

SEQ ID NO: 1202 - protein, 9 aa, Homo sapiens
DAYNTSNKE

SEQ ID NO: 1203 - protein, 13 aa, Homo sapiens
DENGTLDLSMNKQ

SEQ ID NO: 1204 - protein, 12 aa, Homo sapiens
WMLTSMNSSPRS

SEQ ID NO: 1205 - protein, 18 aa, Homo sapiens
TYTCNVTESVNDHQDEKA

SEQ ID NO: 1206 - protein, 12 aa, Homo sapiens
TSEMEENLANRS

SEQ ID NO: 1207 - protein, 14 aa, Homo sapiens
RNASVQDSTNTPLG

SEQ ID NO: 1208 - protein, 21 aa, Homo sapiens
RENMSLPSNLQLNDLTPDSRA

SEQ ID NO: 1209 - protein, 16 aa, Homo sapiens
KNHSGPGPCICFENLT

SEQ ID NO: 1210 - protein, 18 aa, Homo sapiens
KLAAKCLVMKAEMNGSKL

SEQ ID NO: 1211 - protein, 13 aa, Homo sapiens
KANFSIGPMMPVL

SEQ ID NO: 1212 - protein, 18 aa, Homo sapiens
RLQLDGNQITNLTDSSFG

SEQ ID NO: 1213 - protein, 34 aa, Homo sapiens
RLEQQMNSASGSSSNGSSINMSGIDNGEGTRLRN

SEQ ID NO: 1214 - protein, 29 aa, Homo sapiens
RDATGNMNDTIISGMNCNGSAACGLGYDF

SEQ ID NO: 1215 - protein, 13 aa, Homo sapiens
RDATGNMNDTIIS

SEQ ID NO: 1216 - protein, 16 aa, Homo sapiens
RAGVLSSLSPVNSSNH

SEQ ID NO: 1217 - protein, 18 aa, Homo sapiens
PGAYNNTALFEESGLIRI

SEQ ID NO: 1218 - protein, 12 aa, Homo sapiens
PGAPGGNASSRT

SEQ ID NO: 1219 - protein, 29 aa, Homo sapiens
MIPCVLQYLNFSTIIGVGVGAGAYILARY

SEQ ID NO: 1220 - protein, 14 aa, Homo sapiens
MEGAGGNGSSNVHV

SEQ ID NO: 1221 - protein, 18 aa, Homo sapiens
KYLKEAPLASSANGTEKN

SEQ ID NO: 1222 - protein, 21 aa, Homo sapiens
KVPTGTITEVSSTGVNSSSKI

SEQ ID NO: 1223 - protein, 36 aa, Homo sapiens
KSLKHQNILLEVDDFENRNGTDGLSYNGAIIVSGKQ

SEQ ID NO: 1224 - protein, 8 aa, Homo sapiens
KNLSSVII

SEQ ID NO: 1225 - protein, 32 aa, Homo sapiens
KEMEEFVQSSGENGVVVFSLGSMVSNMTAERA

SEQ ID NO: 1226 - protein, 10 aa, Homo sapiens
KAYSWNISRK

SEQ ID NO: 1227 - protein, 18 aa, Homo sapiens
GSMISNMNATRAEFQAKI

SEQ ID NO: 1228 - protein, 24 aa, Homo sapiens
MENRNNMTEFVLLGLTENPKMQKI

SEQ ID NO: 1229 - protein, 20 aa, Homo sapiens
MDQNQHLNKTAEAQPSENKK

SEQ ID NO: 1230 - protein, 23 aa, Homo sapiens
RWEALGNTLSSQPNLTVSWDPRI

SEQ ID NO: 1231 - protein, 23 aa, Homo sapiens
RENLTVFSFLGPIVNLSEPTAHE

SEQ ID NO: 1232 - protein, 11 aa, Homo sapiens
REARENLTVFS

SEQ ID NO: 1233 - protein, 15 aa, Homo sapiens
KGNMSGNFTYIIDKL

SEQ ID NO: 1234 - protein, 24 aa, Homo sapiens
RDYNSSREDSLQDAWDYVQAQVKC

SEQ ID NO: 1235 - protein, 20 aa, Homo sapiens
KQEMGGIVTEPIRDYNSSRE

SEQ ID NO: 1236 - protein, 24 aa, Homo sapiens
RFGSGAAGGSGSSNSSGDALVTRI

SEQ ID NO: 1237 - protein, 27 aa, Homo sapiens
KLVQDVANNTNEEAGDGTTTATVLARS

SEQ ID NO: 1238 - protein, 17 aa, Homo sapiens
RIIDVVYNASNNELVRT

SEQ ID NO: 1239 - protein, 17 aa, Homo sapiens
KALAAAGYDVEKNNSRI

SEQ ID NO: 1240 - protein, 28 aa, Homo sapiens
RALWQADTQVTSGVVTFTLQQLNAYNRT

SEQ ID NO: 1241 - protein, 14 aa, Homo sapiens
RIYNVTYLEPSLRI

SEQ ID NO: 1242 - protein, 36 aa, Homo sapiens
KMNLTFHVINTGNSMAPNVSVEIMVPNSFSPQTDKL

SEQ ID NO: 1243 - protein, 34 aa, Homo sapiens
QPGVQYNITIYAVEENQESTPVVIQQETTGTPRS

SEQ ID NO: 1244 - protein, 25 aa, Homo sapiens
KIMNLTEFSMVDGMWQAQGYPRNRL

SEQ ID NO: 1245 - protein, 23 aa, Homo sapiens
MESYDVIANQPVVIDNGSGVIKA

SEQ ID NO: 1246 - protein, 25 aa, Homo sapiens
KMEDGLLTCHGPGPDNCTKCSHFKD

SEQ ID NO: 1247 - protein, 14 aa, Homo sapiens
KNDRNSSDETFLKD

SEQ ID NO: 1248 - protein, 11 aa, Homo sapiens
KFDLNKNCTVT

SEQ ID NO: 1249 - protein, 16 aa, Homo sapiens
RMIENGSLSFLPTLRE

SEQ ID NO: 1250 - protein, 13 aa, Homo sapiens
KEEKANDSNPNEE

SEQ ID NO: 1251 - protein, 19 aa, Homo sapiens
KGTENHLLAIVNGTKGSRW

SEQ ID NO: 1252 - protein, 25 aa, Homo sapiens
RAGMVYMAGLVFAVGGFNGSLRVRT

SEQ ID NO: 1253 - protein, 15 aa, Homo sapiens
KTKATQSQRRNSSKT

SEQ ID NO: 1254 - protein, 22 aa, Homo sapiens
KIKELNNTCEPVVTQPKPKIES

SEQ ID NO: 1255 - protein, 16 aa, Homo sapiens
HKIVNSSMELAQTAKE

SEQ ID NO: 1256 - protein, 25 aa, Homo sapiens
MNQNTTEPVAATETLAEVPEHVLRG

SEQ ID NO: 1257 - protein, 27 aa, Homo sapiens
MAAQCVTKVALNVSCANLLDKDIGSKS

SEQ ID NO: 1258 - protein, 19 aa, Homo sapiens
RLQLSNGNMTLTLLSVKRN

SEQ ID NO: 1259 - protein, 11 aa, Homo sapiens
VNISYVNIFRM

SEQ ID NO: 1260 - protein, 17 aa, Homo sapiens
RTNVLNDAYENLTRYKE

SEQ ID NO: 1261 - protein, 26 aa, Homo sapiens
RSVQVVNLDPAAEHFNYSVMVDIREL

SEQ ID NO: 1262 - protein, 19 aa, Homo sapiens
RRPLNNNSEIALSLSRNKV

SEQ ID NO: 1263 - protein, 24 aa, Homo sapiens
RRHNSSDGFDSAIGRPNGGNFGRK

SEQ ID NO: 1264 - protein, 23 aa, Homo sapiens
RNNQTIFEQTINDLTFDGSFVKE

SEQ ID NO: 1265 - protein, 19 aa, Homo sapiens
RLTCNATGAPSPTLMWLKD

SEQ ID NO: 1266 - protein, 14 aa, Homo sapiens
RKQENSSQENENKT

SEQ ID NO: 1267 - protein, 24 aa, Homo sapiens
RKHTGSGILSMANAGPNTNGSQFF

SEQ ID NO: 1268 - protein, 24 aa, Homo sapiens
RGVSGDRDENSFSLNSSISSSARR

SEQ ID NO: 1269 - protein, 22 aa, Homo sapiens
RFTLTQSEADADILFNFSHFKD

SEQ ID NO: 1270 - protein, 17 aa, Homo sapiens
REFSAGTVYPETNKTKN

SEQ ID NO: 1271 - protein, 15 aa, Homo sapiens
RDDNSAANNSANEKE

SEQ ID NO: 1272 - protein, 21 aa, Homo sapiens
RANNSDFGLVAAVFTNDINKA

SEQ ID NO: 1273 - protein, 13 aa, Homo sapiens
MTLNNTAYLLDKL

SEQ ID NO: 1274 - protein, 20 aa, Homo sapiens
KTNLIVNYLPQNMTQEELKS

SEQ ID NO: 1275 - protein, 29 aa, Homo sapiens
KTMNNSAENHTANSSMAYPSLVAMASQRQ

SEQ ID NO: 1276 - protein, 22 aa, Homo sapiens
KRDFFLANASRARSEQFINLRE

SEQ ID NO: 1277 - protein, 18 aa, Homo sapiens
KQLFTLQTVNSNGTSDRT

SEQ ID NO: 1278 - protein, 17 aa, Homo sapiens
KNVSQENMCSASAAFKS

SEQ ID NO: 1279 - protein, 18 aa, Homo sapiens
KELLNETEEEINKALNKK

SEQ ID NO: 1280 - protein, 25 aa, Homo sapiens
KDVPPSINTTNIDTLLVATDQTERI

SEQ ID NO: 1281 - protein, 23 aa, Homo sapiens
KAKRTAKVLLNSSVPPAGAEELS

SEQ ID NO: 1282 - protein, 14 aa, Homo sapiens
MLNGTTLEAAMLFH

SEQ ID NO: 1283 - protein, 21 aa, Homo sapiens
RRCIIVGNGGVLANKSLGSRI

SEQ ID NO: 1284 - protein, 12 aa, Homo sapiens
KDNATDSVPLRT

SEQ ID NO: 1285 - protein, 18 aa, Homo sapiens
KNLNYSVPEEQGAGTVIG

SEQ ID NO: 1286 - protein, 18 aa, Homo sapiens
KINNTHALVSLLQNLNKA

SEQ ID NO: 1287 - protein, 20 aa, Homo sapiens
KFSRNQSQLLGHLSVDMAKS

SEQ ID NO: 1288 - protein, 23 aa, Homo sapiens
KENEEFLIGFNITSKGRQLPKRR

SEQ ID NO: 1289 - protein, 17 aa, Homo sapiens
SNLPAENLTIAVNMTKT

SEQ ID NO: 1290 - protein, 21 aa, Homo sapiens
RVINFYAGANQSMNVTCAGKR

SEQ ID NO: 1291 - protein, 12 aa, Homo sapiens
RNSNYTYPIKPA

SEQ ID NO: 1292 - protein, 39 aa, Homo sapiens
RNLLETGLNVSDTVTLPTAPNMNSEPTLQPQTGEITNRM

SEQ ID NO: 1293 - protein, 18 aa, Homo sapiens
RATANSQVMGSANSTLRA

SEQ ID NO: 1294 - protein, 12 aa, Homo sapiens
MMNNSYQLIARR

SEQ ID NO: 1295 - protein, 28 aa, Homo sapiens
MERAPPDGPLNASGALAGDAAAAGGARG

SEQ ID NO: 1296 - protein, 16 aa, Homo sapiens
KTTEFDTNSTDIALKV

SEQ ID NO: 1297 - protein, 19 aa, Homo sapiens
KMDTELAESGSNFSVGQRQ

SEQ ID NO: 1298 - protein, 29 aa, Homo sapiens
KHTGSGILSMANAGPNTNGSQFFICTAKT

SEQ ID NO: 1299 - protein, 22 aa, Homo sapiens
KHLDLSSNLLKTINKSALETKT

SEQ ID NO: 1300 - protein, 38 aa, Homo sapiens
KAQHEFTEFVGATMFGTYNVISLVVLLNMLIAMMNNSY

SEQ ID NO: 1301 - protein, 25 aa, Homo sapiens
GTEALSTNHSVIVNSPVITAAINKE

SEQ ID NO: 1302 - protein, 24 aa, Homo sapiens
RKIQQESLGSAPLMGDDHPNASRD

SEQ ID NO: 1303 - protein, 12 aa, Homo sapiens
KTHHWNITAVKL

SEQ ID NO: 1304 - protein, 14 aa, Homo sapiens
RGSANRTCQVNGRW

SEQ ID NO: 1305 - protein, 23 aa, Homo sapiens
KVVMDIPYELWNETSAEVADLKK

SEQ ID NO: 1306 - protein, 22 aa, Homo sapiens
KCVVEMEGNQTVLHPPPSNTKQ

SEQ ID NO: 1307 - protein, 18 aa, Homo sapiens
YISAMVNNGSLSYDHERD

SEQ ID NO: 1308 - protein, 24 aa, Homo sapiens
KLAGTWHSMAMATNNISLMATLKA

SEQ ID NO: 1309 - protein, 27 aa, Homo sapiens
RVMISAGNLQLPVEAGLVEFTNISQKL

SEQ ID NO: 1310 - protein, 23 aa, Homo sapiens
RVLGSILNASTVAAAMCMVVTRT

SEQ ID NO: 1311 - protein, 27 aa, Homo sapiens
RVISAMVNSLDDNGVLIGNWSGDYSRG

SEQ ID NO: 1312 - protein, 19 aa, Homo sapiens
RSPCSINASISSITSYTCF

SEQ ID NO: 1313 - protein, 30 aa, Homo sapiens
RMESQATSASINNSNPSTSEQASDTASAVT

SEQ ID NO: 1314 - protein, 21 aa, Homo sapiens
RGAAAAPGNWSSRQRPAHPRT

SEQ ID NO: 1315 - protein, 21 aa, Homo sapiens
RDGGEGCSWMFQPMNNSKMRV

SEQ ID NO: 1316 - protein, 19 aa, Homo sapiens
PDTPPDTPPAMKNATSSKQ

SEQ ID NO: 1317 - protein, 17 aa, Homo sapiens
MSSKHNMSGGEFQGKRE

SEQ ID NO: 1318 - protein, 19 aa, Homo sapiens
KVLGSSTSATNSTSVSSRK

SEQ ID NO: 1319 - protein, 21 aa, Homo sapiens
KQLLRDLSGLQGMNGSIQAKS

SEQ ID NO: 1320 - protein, 33 aa, Homo sapiens
KNTNQNSSAHPPHLNMDDTVNQSNIELKNVNRN

SEQ ID NO: 1321 - protein, 23 aa, Homo sapiens
KMNDSNSAGAGGPVKITENRSKK

SEQ ID NO: 1322 - protein, 18 aa, Homo sapiens
KINMNGINNSSGMVDARS

SEQ ID NO: 1323 - protein, 32 aa, Homo sapiens
KDYPSNTTSSTSNSGNETSGSSTIGETSKKKR

SEQ ID NO: 1324 - protein, 36 aa, Homo sapiens
KASMIAMMAGSDFIKTSTGKETVNATFPVAIVMLRA

SEQ ID NO: 1325 - protein, 17 aa, Homo sapiens
GNNMSTPLPAIVPAARK

SEQ ID NO: 1326 - protein, 21 aa, Homo sapiens
MDPNCSCAASDSCTCAGSCKC

SEQ ID NO: 1327 - protein, 27 aa, Homo sapiens
MALYHNISGVGLFLHPVGLELLLDHRA

SEQ ID NO: 1328 - protein, 25 aa, Homo sapiens
RGPMNQCLVATGTHEPKNQSYMVRG

SEQ ID NO: 1329 - protein, 11 aa, Homo sapiens
LNATDLDRSRE

SEQ ID NO: 1330 - protein, 23 aa, Homo sapiens
KMYSEGSDIVPQSNETALHYFKK

SEQ ID NO: 1331 - protein, 16 aa, Homo sapiens
KLQDIFYPNTSNCAKG

SEQ ID NO: 1332 - protein, 27 aa, Homo sapiens
RLVLGTPQSNSPFGAAVGEQNETLIRI

SEQ ID NO: 1333 - protein, 14 aa, Homo sapiens
RLLHSDYMNMTPRR

SEQ ID NO: 1334 - protein, 18 aa, Homo sapiens
RESWGQESNAGNQTVVRV

SEQ ID NO: 1335 - protein, 34 aa, Homo sapiens
RDNLSETASTMALAGASITGSLSGSAMVNCFNRL

SEQ ID NO: 1336 - protein, 25 aa, Homo sapiens
RALLSITDNSSSSDIVESSTSYIKI

SEQ ID NO: 1337 - protein, 26 aa, Homo sapiens
KNPELSGSLMTLSNVSCLSNTPARKI

SEQ ID NO: 1338 - protein, 30 aa, Homo sapiens
KINSTADLDFIQQAISYSSFPFWMGLSRRN

SEQ ID NO: 1339 - protein, 10 aa, Homo sapiens
MMGHQNHTFS

SEQ ID NO: 1340 - protein, 26 aa, Homo sapiens
RMIVEIHLEEYNNISKKPMNLVLFRF

SEQ ID NO: 1341 - protein, 30 aa, Homo sapiens
KGGNNDSWMNPLAKQFSNMGLLSQTEDNPS

SEQ ID NO: 1342 - protein, 24 aa, Homo sapiens
KESLIMNHVLNTSQLASSYQYKKK

SEQ ID NO: 1343 - protein, 30 aa, Homo sapiens
KNAKSSGNSSSSGSGSGSTSAGSSSPGARR

SEQ ID NO: 1344 - protein, 27 aa, Homo sapiens
KIKDQVNGTSEDSADGSTVGTAVSSSD

SEQ ID NO: 1345 - protein, 20 aa, Homo sapiens
YPDPQSANHMNSSLLSLYRK

SEQ ID NO: 1346 - protein, 27 aa, Homo sapiens
YNFTYTGDGDITLITDNNGNMVNVRRD

SEQ ID NO: 1347 - protein, 32 aa, Homo sapiens
YKPLNDSVRAQYSNWLLAGNLALSPTGNAKKP

SEQ ID NO: 1348 - protein, 32 aa, Homo sapiens
YDLKEGLLVSPGSVIMNGSNMANTSPSVKSKE

SEQ ID NO: 1349 - protein, 21 aa, Homo sapiens
WVSREPALLCTFPNPSAPRKD

SEQ ID NO: 1350 - protein, 27 aa, Homo sapiens
WNLNNDTEVPTASVAIEGASALNRVRW

SEQ ID NO: 1351 - protein, 38 aa, Homo sapiens
WAQNGSMSQPLGESPATATATATATTRPSPTTPAMPKM

SEQ ID NO: 1352 - protein, 27 aa, Homo sapiens
VYIVQSGCGEINDSLMELLIMINACKI

SEQ ID NO: 1353 - protein, 15 aa, Homo sapiens
VVRSGASLLSNMSRH

SEQ ID NO: 1354 - protein, 30 aa, Homo sapiens
VTQQMSNISGSCSMLQQTSISSPPTCSVKS

SEQ ID NO: 1355 - protein, 35 aa, Homo sapiens
VTAGILEMRNALGNQSTPAPPTGEVADTPLEPGKV

SEQ ID NO: 1356 - protein, 18 aa, Homo sapiens
VSWEILSNLSFLVTIQRA

SEQ ID NO: 1357 - protein, 18 aa, Homo sapiens
VQDSVNISGHTNTNTLKV

SEQ ID NO: 1358 - protein, 33 aa, Homo sapiens
VPTVFAFQDPTQQVRENTDPASERGNASSSQKE

SEQ ID NO: 1359 - protein, 20 aa, Homo sapiens
VMFLFQGNNGTVLYTGDFRL

SEQ ID NO: 1360 - protein, 27 aa, Homo sapiens
VLEMEEAGSIFACNMEGRSNSSGEVKY

SEQ ID NO: 1361 - protein, 15 aa, Homo sapiens
VKPYVNGTSPVYSRE

SEQ ID NO: 1362 - protein, 20 aa, Homo sapiens
VILSNNNHTEIQEISLALRS

SEQ ID NO: 1363 - protein, 18 aa, Homo sapiens
VIHNASIMNAEAAGGYRY

SEQ ID NO: 1364 - protein, 32 aa, Homo sapiens
VHSDFTAAATRGAMAVIDGNVMAINPSEETKM

SEQ ID NO: 1365 - protein, 18 aa, Homo sapiens
VHEEFNPNQANGSYASRR

SEQ ID NO: 1366 - protein, 28 aa, Homo sapiens
VFDASAPAHCGVRVGLSAQPCPNKSSKA

SEQ ID NO: 1367 - protein, 16 aa, Homo sapiens
VERPSSLLSLNTSNKG

SEQ ID NO: 1368 - protein, 29 aa, Homo sapiens
TVTPVSPSFAHNPKRHNSASVENVSLRKS

SEQ ID NO: 1369 - protein, 20 aa, Homo sapiens
TVAPQGQDMASIAPDNRSKS

SEQ ID NO: 1370 - protein, 26 aa, Homo sapiens
TTNSTNPSPQGSHSAIGLSGLNPSTG

SEQ ID NO: 1371 - protein, 28 aa, Homo sapiens
TRGRSISFPALLPIPGSNRSSVIMTAKP

SEQ ID NO: 1372 - protein, 18 aa, Homo sapiens
TQIINGSVDVDTEDRQKR

SEQ ID NO: 1373 - protein, 16 aa, Homo sapiens
TPVPGYMNNTVNTMRL

SEQ ID NO: 1374 - protein, 18 aa, Homo sapiens
TPKGNSSNGNSGSNSNKA

SEQ ID NO: 1375 - protein, 27 aa, Homo sapiens
TPADVFIVFTDNETFAGGVHPAIALRE

SEQ ID NO: 1376 - protein, 26 aa, Homo sapiens
TNASPEKTTYDSAEEENKENLYAGKN

SEQ ID NO: 1377 - protein, 41 aa, Homo sapiens
TLMAAFQGPGEDFIGGSIFVNVTMFSSGGEMVQAETSGVKI

SEQ ID NO: 1378 - protein, 37 aa, Homo sapiens
TKSRVGMGGMEAKVKAALWALQGGTSVVIANGTHPKV

SEQ ID NO: 1379 - protein, 14 aa, Homo sapiens
TKNVNPNWSVNVKT

SEQ ID NO: 1380 - protein, 24 aa, Homo sapiens
TILLDAHEAGSAENDTADAEPPKI

SEQ ID NO: 1381 - protein, 17 aa, Homo sapiens
TERLLGEASSNWSQAKR

SEQ ID NO: 1382 - protein, 24 aa, Homo sapiens
TELQLAAVETTANSLMWILYNLSR

SEQ ID NO: 1383 - protein, 19 aa, Homo sapiens
TDGTTITESSNLSEIESRL

SEQ ID NO: 1384 - protein, 28 aa, Homo sapiens
TDDTNVTWLQLETEIEALKEELLLMKKN

SEQ ID NO: 1385 - protein, 18 aa, Homo sapiens
TAANNLSVSNSASSLQKD

SEQ ID NO: 1386 - protein, 22 aa, Homo sapiens
SYQPWGNVPDANYTSDEEEEKQ

SEQ ID NO: 1387 - protein, 13 aa, Homo sapiens
SYFKCGENVSQKN

SEQ ID NO: 1388 - protein, 14 aa, Homo sapiens
SVPDNVPGQNGSRR

SEQ ID NO: 1389 - protein, 25 aa, Homo sapiens
SVNGSGALGSTGGGGPVGSMENGKP

SEQ ID NO: 1390 - protein, 18 aa, Homo sapiens
SVGAAPNASDGLAHSGKV

SEQ ID NO: 1391 - protein, 19 aa, Homo sapiens
STSGLLNSTWPLPSATQRC

SEQ ID NO: 1392 - protein, 17 aa, Homo sapiens
SSSREENWSFLDWDSRF

SEQ ID NO: 1393 - protein, 9 aa, Homo sapiens
SRGCNVSRK

SEQ ID NO: 1394 - protein, 13 aa, Homo sapiens
SQSGHMLLNLSRG

SEQ ID NO: 1395 - protein, 15 aa, Homo sapiens
SQELNFVMDVNSSKY

SEQ ID NO: 1396 - protein, 19 aa, Homo sapiens
SQCGKMANKANTSGDFEKD

SEQ ID NO: 1397 - protein, 25 aa, Homo sapiens
SPQRSSMNNGSPTALSGSKTNSPKN

SEQ ID NO: 1398 - protein, 35 aa, Homo sapiens
SPKVTKQNSLNDEGCQSDLEDNVSQGSSDALLLRG

SEQ ID NO: 1399 - protein, 22 aa, Homo sapiens
SPARQNVSSASNPENDSSHVRI

SEQ ID NO: 1400 - protein, 12 aa, Homo sapiens
SLSNPLNCSVKT

SEQ ID NO: 1401 - protein, 22 aa, Homo sapiens
SLSNIVRNLTPAPLTSTPPLRS

SEQ ID NO: 1402 - protein, 27 aa, Homo sapiens
SLRENSISPEGAQAIAHALCANSTLKN

SEQ ID NO: 1403 - protein, 26 aa, Homo sapiens
SLPSWKSLLNVPMEDVNLSSGHIARV

SEQ ID NO: 1404 - protein, 17 aa, Homo sapiens
SLNGTSRGSSDLTSARN

SEQ ID NO: 1405 - protein, 18 aa, Homo sapiens
SKKEHISAENMSLETLRN

SEQ ID NO: 1406 - protein, 24 aa, Homo sapiens
SISHDNNNISSTSELGTDLANTKV

SEQ ID NO: 1407 - protein, 25 aa, Homo sapiens
SGNKVSITTTPFENTSIKTGPARRN

SEQ ID NO: 1408 - protein, 27 aa, Homo sapiens
SGEKDESEVISQNETCSPAEVESNEKD

SEQ ID NO: 1409 - protein, 23 aa, Homo sapiens
SFMNVSESHFVSALTVVFINSKS

SEQ ID NO: 1410 - protein, 27 aa, Homo sapiens
SEESDEDDGPAPVIVENESYVNLKKKI

SEQ ID NO: 1411 - protein, 24 aa, Homo sapiens
SAYDSNDPDVESNSSSGISSPSRQ

SEQ ID NO: 1412 - protein, 16 aa, Homo sapiens
SANTTIEDEDAKARKQ

SEQ ID NO: 1413 - protein, 17 aa, Homo sapiens
RYVKTTGNATVDHLSKY

SEQ ID NO: 1414 - protein, 25 aa, Homo sapiens
RYVKQPLPDEFGSSPLEPGACNGSR

SEQ ID NO: 1415 - protein, 18 aa, Homo sapiens
RYTVSNLSMQTHAARFKT

SEQ ID NO: 1416 - protein, 26 aa, Homo sapiens
RYQQLAVALDSSYVTNKQLNITIEKL

SEQ ID NO: 1417 - protein, 25 aa, Homo sapiens
RYQEAAPNVANNTGPHAASCFGAKK

SEQ ID NO: 1418 - protein, 34 aa, Homo sapiens
RYPNSSTEVPELPIAPEIALELLMDVSFLDCEIK

SEQ ID NO: 1419 - protein, 24 aa, Homo sapiens
RYMIYEFWENSSVWNSHLQTNYSK

SEQ ID NO: 1420 - protein, 17 aa, Homo sapiens
RYLLQNTALEVFMANRT

SEQ ID NO: 1421 - protein, 18 aa, Homo sapiens
RYLFPEVDMTSTNFTGLS

SEQ ID NO: 1422 - protein, 12 aa, Homo sapiens
RYHTESLQNMSK

SEQ ID NO: 1423 - protein, 15 aa, Homo sapiens
RYGNTTQNVPHNPRR

SEQ ID NO: 1424 - protein, 37 aa, Homo sapiens
RYGDLLYKSLVPVPNSSSSSSSSNSLVSAAENPPQRL

SEQ ID NO: 1425 - protein, 30 aa, Homo sapiens
RYFNPVDQENALIAAIANWSELASMPVGRS

SEQ ID NO: 1426 - protein, 35 aa, Homo sapiens
RYDNVTILFSGIVGFNAFCSKHASGEGAMKIVNLL

SEQ ID NO: 1427 - protein, 29 aa, Homo sapiens
RYDLTGWLHRAKPNLSALDAPQVLHQSKR

SEQ ID NO: 1428 - protein, 17 aa, Homo sapiens
RYDAQLILENNSGIPKL

SEQ ID NO: 1429 - protein, 16 aa, Homo sapiens
RYATQSNHSGIATSQK

SEQ ID NO: 1430 - protein, 26 aa, Homo sapiens
RWLGSTGVTCGVRRQISEMNGNISRL

SEQ ID NO: 1431 - protein, 22 aa, Homo sapiens
RVVNLEALQMLSVNTTLEELKI

SEQ ID NO: 1432 - protein, 23 aa, Homo sapiens
RVTALEGYQIGQVACGLNHTLAV

SEQ ID NO: 1433 - protein, 21 aa, Homo sapiens
RVSTNGSDDPEDAGAGENRRV

SEQ ID NO: 1434 - protein, 31 aa, Homo sapiens
RVSTMNHPQMQAPSGMNGTSLSHLSNGESKS

SEQ ID NO: 1435 - protein, 20 aa, Homo sapiens
RVSGLMMANHTSISSLFERT

SEQ ID NO: 1436 - protein, 28 aa, Homo sapiens
RVRRTDDTPVVLVGNKSDLKQLRQVTKE

SEQ ID NO: 1437 - protein, 26 aa, Homo sapiens
RVQNTSLEHRGYHGSGTDGESSGRRG

SEQ ID NO: 1438 - protein, 31 aa, Homo sapiens
RVQNTSLEAIVQNASSDNQGIQLSAVQAARK

SEQ ID NO: 1439 - protein, 19 aa, Homo sapiens
RVPPTLNSSPCGGFTLCKA

SEQ ID NO: 1440 - protein, 30 aa, Homo sapiens
RVPGGSPRTPNRSVSSNVASVSPIPAGSKK

SEQ ID NO: 1441 - protein, 31 aa, Homo sapiens
RVLNTSSLESATDEAGSPLAAAAAAAAAERC

SEQ ID NO: 1442 - protein, 20 aa, Homo sapiens
RVLELNASDERGIQVVREKV

SEQ ID NO: 1443 - protein, 19 aa, Homo sapiens
RVLAPILPDNFSTPTGSRT

SEQ ID NO: 1444 - protein, 16 aa, Homo sapiens
RVKRNQENFSSVLYKE

SEQ ID NO: 1445 - protein, 22 aa, Homo sapiens
RVKNGSRVVSTALLSSYHKGIA

SEQ ID NO: 1446 - protein, 22 aa, Homo sapiens
RVFTEEAKDSLNTSENDSEHQT

SEQ ID NO: 1447 - protein, 20 aa, Homo sapiens
RVFFAGFSNATVDNSILLRL

SEQ ID NO: 1448 - protein, 20 aa, Homo sapiens
RVENGSSDENATALPGTWRR

SEQ ID NO: 1449 - protein, 11 aa, Homo sapiens
RVEFMDNTSRS

SEQ ID NO: 1450 - protein, 25 aa, Homo sapiens
RTTSTLSLSAEDSQSTESNMSVPKK

SEQ ID NO: 1451 - protein, 20 aa, Homo sapiens
RTTQRIVAPPGGRANITSLG

SEQ ID NO: 1452 - protein, 24 aa, Homo sapiens
RTSRKSALRAGNDSAMADGEGYRN

SEQ ID NO: 1453 - protein, 28 aa, Homo sapiens
RTSEHQVDLKVDPSQPSNVSHKLWTAAG

SEQ ID NO: 1454 - protein, 36 aa, Homo sapiens
RTQNLSQPSTGIPSGEPGHSAGGAAGSRCTRSMFRK

SEQ ID NO: 1455 - protein, 18 aa, Homo sapiens
RTPYRDMMLENYSLLLSV

SEQ ID NO: 1456 - protein, 20 aa, Homo sapiens
RTPQVIGVMQSQNSSAGNRG

SEQ ID NO: 1457 - protein, 21 aa, Homo sapiens
RTPNSSCSTPSRTSSGLFPRI

SEQ ID NO: 1458 - protein, 26 aa, Homo sapiens
RTPMNSSWLPGSPMPQAQSPEEGQRP

SEQ ID NO: 1459 - protein, 23 aa, Homo sapiens
RTNSRLSHMPPLPLNPSSNPTSL

SEQ ID NO: 1460 - protein, 31 aa, Homo sapiens
RTNFTLAELGICEPSPHRSGYCSDMGILHQG

SEQ ID NO: 1461 - protein, 19 aa, Homo sapiens
RTLIAPQGYPNPENFSWTE

SEQ ID NO: 1462 - protein, 28 aa, Homo sapiens
RTKDAGLGVYSLALLNNVSYNVVEFSKS

SEQ ID NO: 1463 - protein, 39 aa, Homo sapiens
RTIGIFWLNASETLVEINTEPAVEYTLTQMGPVAAKQKV

SEQ ID NO: 1464 - protein, 15 aa, Homo sapiens
RTHKMNVSPVPPLRR

SEQ ID NO: 1465 - protein, 41 aa, Homo sapiens
RTGPNPGAGQNPTRTGPNPGTGQNPTRTGPNPGTGQNPTRT

SEQ ID NO: 1466 - protein, 28 aa, Homo sapiens
RTGLLKQTHIAPKPAAHLAAPANGSAPS

SEQ ID NO: 1467 - protein, 38 aa, Homo sapiens
RTGGIGDSRPPSFHPNVASSRDGMDNETGTESMVSHRR

SEQ ID NO: 1468 - protein, 19 aa, Homo sapiens
RTESQLTPCIRNVTSPTRQ

SEQ ID NO: 1469 - protein, 24 aa, Homo sapiens
RTEGNIFDSLIGGNASAEGPEGKG

SEQ ID NO: 1470 - protein, 20 aa, Homo sapiens
RTASIWVPPLQERNSSWDRI

SEQ ID NO: 1471 - protein, 17 aa, Homo sapiens
RTALVANTSNMPVAARE

SEQ ID NO: 1472 - protein, 33 aa, Homo sapiens
RSYFVVVNHSQSQDTVTTGEALNVIPGAQEKKA

SEQ ID NO: 1473 - protein, 22 aa, Homo sapiens
RSVRKNLTYSCRSNQDCIINKH

SEQ ID NO: 1474 - protein, 20 aa, Homo sapiens
RSTVGLSLISPNNMSFATKK

SEQ ID NO: 1475 - protein, 15 aa, Homo sapiens
RSSTSSIDSNVSSKS

SEQ ID NO: 1476 - protein, 21 aa, Homo sapiens
RSSNSSVSGTKKEDSTAKIHA

SEQ ID NO: 1477 - protein, 38 aa, Homo sapiens
RSSDMDQQEDMISGVENSNVSENDIPFNVQYPGQTSKT

SEQ ID NO: 1478 - protein, 21 aa, Homo sapiens
RSRNKYGRGSISLNSSPRGRY

SEQ ID NO: 1479 - protein, 24 aa, Homo sapiens
RSRDFSAAPQNTTQNFLVNGRIRK

SEQ ID NO: 1480 - protein, 26 aa, Homo sapiens
RSRATIFEINASSRDLCSQVMRAKRQ

SEQ ID NO: 1481 - protein, 40 aa, Homo sapiens
RSQSSSQSPASHRNPTGAHSSSGHQSQSPNTSPPPKRHKK

SEQ ID NO: 1482 - protein, 18 aa, Homo sapiens
RSQSLIFLNLSTNNLLDD

SEQ ID NO: 1483 - protein, 33 aa, Homo sapiens
RSQSANQVCGYVKSNSLLSSNCSTWKYFICEKY

SEQ ID NO: 1484 - protein, 20 aa, Homo sapiens
RSQANGAGALSYVSPNTSKC

SEQ ID NO: 1485 - protein, 35 aa, Homo sapiens
RSPYNSHMGNNASRPHSANGEVYGLLGSVLTIKKE

SEQ ID NO: 1486 - protein, 27 aa, Homo sapiens
RSPTQGYRVTPDAVHSVGGNSSQSSSP

SEQ ID NO: 1487 - protein, 35 aa, Homo sapiens
RSPSPSKNDSFFTPDSNHNSLSQSTTGHLSLPQKQ

SEQ ID NO: 1488 - protein, 31 aa, Homo sapiens
RSPLQACENLAMNEGGPPTENNSLILEENKI

SEQ ID NO: 1489 - protein, 34 aa, Homo sapiens
RSPASERRPLGNFTAPPTYTETLSTAPLASWVRS

SEQ ID NO: 1490 - protein, 13 aa, Homo sapiens
RSNTENLSQHFRK

SEQ ID NO: 1491 - protein, 28 aa, Homo sapiens
RSLTYLSINCTSISLNMFSLLHDILHEP

SEQ ID NO: 1492 - protein, 34 aa, Homo sapiens
RSLSTPNALSFGSPTSSDDMTLTSPSMDNSSAEL

SEQ ID NO: 1493 - protein, 34 aa, Homo sapiens
RSLCCGDISQSAVLFLCQGTLAMLDWQNGSMGRS

SEQ ID NO: 1494 - protein, 19 aa, Homo sapiens
RSLAEANNLSFPLEPLSRE

SEQ ID NO: 1495 - protein, 24 aa, Homo sapiens
RSKGAIAPPEVTVPAQNTSLGPKK

SEQ ID NO: 1496 - protein, 28 aa, Homo sapiens
RSITKNPKIGGLPLIPIQHEGNATLARK

SEQ ID NO: 1497 - protein, 32 aa, Homo sapiens
RSIQKLGELNIGMDGLGNEVSALNQQCNGSKG

SEQ ID NO: 1498 - protein, 26 aa, Homo sapiens
RSHNASLHPTPEQCEAVSKFIGECKI

SEQ ID NO: 1499 - protein, 28 aa, Homo sapiens
RSFSCLNRSLSSGESLPGSPTHSLSPRS

SEQ ID NO: 1500 - protein, 19 aa, Homo sapiens
RSFCKDQQGDHNGENSSKC

SEQ ID NO: 1501 - protein, 33 aa, Homo sapiens
RSEASNGSTVAAGTSKSEEGLSSGLGSGVGGKP

SEQ ID NO: 1502 - protein, 21 aa, Homo sapiens
RSCNDFGSYNNQSSNFGPMKA

SEQ ID NO: 1503 - protein, 31 aa, Homo sapiens
RSASLSSLLITPFPSPNSSLTRSCASSYQRR

SEQ ID NO: 1504 - protein, 12 aa, Homo sapiens
RSANLTDQPSWN

SEQ ID NO: 1505 - protein, 19 aa, Homo sapiens
RRTSMHSSLNTSPNQQPDT

SEQ ID NO: 1506 - protein, 16 aa, Homo sapiens
RRTPEEAAAGEVNLSS

SEQ ID NO: 1507 - protein, 24 aa, Homo sapiens
RRSSENMTAEPMSESKLNTLVQKL

SEQ ID NO: 1508 - protein, 24 aa, Homo sapiens
RRSNVSSPATPTASSSSSTTPTRK

SEQ ID NO: 1509 - protein, 22 aa, Homo sapiens
RRRKNMSEFLGEASIPGQEPPT

SEQ ID NO: 1510 - protein, 26 aa, Homo sapiens
RRRINSSVTTETISETTEVLNEPFDN

SEQ ID NO: 1511 - protein, 19 aa, Homo sapiens
RRQAVELNVVAIVNDTVGT

SEQ ID NO: 1512 - protein, 23 aa, Homo sapiens
RRPLVLQLVNATTEYAEFLHCKG

SEQ ID NO: 1513 - protein, 26 aa, Homo sapiens
RRPAAVGAGLQNMGNTCYVNASLQCL

SEQ ID NO: 1514 - protein, 27 aa, Homo sapiens
RRPAAVGAGLQNMGNTCYENASLQCLT

SEQ ID NO: 1515 - protein, 32 aa, Homo sapiens
RRNAEWHVHMMEYYAAENMNNWSHGMNEAERF

SEQ ID NO: 1516 - protein, 24 aa, Homo sapiens
RRNTSGTPSIAVSGTSLSSDQSRS

SEQ ID NO: 1517 - protein, 17 aa, Homo sapiens
RRNASGLTNGLSSQERP

SEQ ID NO: 1518 - protein, 19 aa, Homo sapiens
RRMESNTSSSLENLATAPV

SEQ ID NO: 1519 - protein, 33 aa, Homo sapiens
RRLWQGLGNFSVNTSKGNTAKNGGLLLSTNMKW

SEQ ID NO: 1520 - protein, 34 aa, Homo sapiens
RRLTIEGVLDHPWLNSTEALDNVLPSAQLMMDKA

SEQ ID NO: 1521 - protein, 30 aa, Homo sapiens
RRLSLSQSITDDDLEAIANDSEEEIIKPRS

SEQ ID NO: 1522 - protein, 24 aa, Homo sapiens
RRLRIHNLGLNCSSQLADLYKSCE

SEQ ID NO: 1523 - protein, 31 aa, Homo sapiens
RRLRELAGNSSTPPPVSPGRGNPMHRLLNPF

SEQ ID NO: 1524 - protein, 30 aa, Homo sapiens
  VARIANT 12: Xaa = Any Amino Acid
RRKLAIENTMAXLVSVGANSAVNNTAESKM

SEQ ID NO: 1525 - protein, 14 aa, Homo sapiens
RRINMSFVEVKDKK

SEQ ID NO: 1526 - protein, 25 aa, Homo sapiens
RRHKDMDVDILALVNDTVGTMMTCA

SEQ ID NO: 1527 - protein, 36 aa, Homo sapiens
RRGGRFSAQGMGTFNPADYAEPANTDDNYGNSSGNT

SEQ ID NO: 1528 - protein, 29 aa, Homo sapiens
RREQMAAAAARPINASMKPGNVQQSVNRK

SEQ ID NO: 1529 - protein, 13 aa, Homo sapiens
RRDMGNFSWGSEC

SEQ ID NO: 1530 - protein, 27 aa, Homo sapiens
RRARHDSPDPSPPRRPQHNSSGDCQKA

SEQ ID NO: 1531 - protein, 23 aa, Homo sapiens
RRARHDSPDLAPNVTYSLPRTKS

SEQ ID NO: 1532 - protein, 22 aa, Homo sapiens
RRAEMSQTNFTPDTLAQNEGKA

SEQ ID NO: 1533 - protein, 26 aa, Homo sapiens
RRAELVCLNNTEISENSSDLSQKLKE

SEQ ID NO: 1534 - protein, 25 aa, Homo sapiens
RQYKDLWNMSDDKPFLCTAPGCGQR

SEQ ID NO: 1535 - protein, 16 aa, Homo sapiens
RQVYNATIAEHAPVGH

SEQ ID NO: 1536 - protein, 27 aa, Homo sapiens
RQSLTSPDSQSARPANRTALSDPSSRL

SEQ ID NO: 1537 - protein, 37 aa, Homo sapiens
RQSKSESDYSDGDNDSINSTSNSNDTINCSSESSSRD

SEQ ID NO: 1538 - protein, 38 aa, Homo sapiens
RQPPPPYPLTAANGQSPSALQTGGSAAPSSYTNGSIPQ

SEQ ID NO: 1539 - protein, 30 aa, Homo sapiens
RQPGKAPNFSVNWTVGDSAIEVINATTGKD

SEQ ID NO: 1540 - protein, 30 aa, Homo sapiens
RQNSSDSISSLNSITSHSSIGSSKDADAKK

SEQ ID NO: 1541 - protein, 11 aa, Homo sapiens
RQMSQQNLTKQ

SEQ ID NO: 1542 - protein, 25 aa, Homo sapiens
RQLVEMEYTMQQCNASVYMEAKNRG

SEQ ID NO: 1543 - protein, 19 aa, Homo sapiens
RQLNTSDENGKEELFSLKD

SEQ ID NO: 1544 - protein, 27 aa, Homo sapiens
RQLEDPNGSFSNAEMSELSVAQKPEKL

SEQ ID NO: 1545 - protein, 21 aa, Homo sapiens
RQKENDTQIFNDSAVDNHSKC

SEQ ID NO: 1546 - protein, 14 aa, Homo sapiens
RQIREILAKSNASN

SEQ ID NO: 1547 - protein, 27 aa, Homo sapiens
RQHNNTGYIYSRDQWDPEVIENHRKKK

SEQ ID NO: 1548 - protein, 34 aa, Homo sapiens
RQGNLSLPLNRELVEKVTNEYNESLLYSPEEPKI

SEQ ID NO: 1549 - protein, 17 aa, Homo sapiens
RQFPKLNISEVDEQVRL

SEQ ID NO: 1550 - protein, 17 aa, Homo sapiens
RQFNQTVQSSGNMTDKS

SEQ ID NO: 1551 - protein, 29 aa, Homo sapiens
RQDNGTLLSLEDLNGGILVDVNTAEHSTV

SEQ ID NO: 1552 - protein, 30 aa, Homo sapiens
RPQSNSSAVTGTSGSIMENGVSSSNTADKS

SEQ ID NO: 1553 - protein, 24 aa, Homo sapiens
RNYQRIEQNLTSTASSGTNVHGSP

SEQ ID NO: 1554 - protein, 26 aa, Homo sapiens
RNTEASSEEESSASRMQVEQNLSDHI

SEQ ID NO: 1555 - protein, 17 aa, Homo sapiens
RNSRMNFTYQIADCNRD

SEQ ID NO: 1556 - protein, 33 aa, Homo sapiens
RNSINVFASPAHYTSTTGSCNFETSSGNWTTAC

SEQ ID NO: 1557 - protein, 17 aa, Homo sapiens
RNRDLNNSSINLTKVKI

SEQ ID NO: 1558 - protein, 30 aa, Homo sapiens
RNQQTILGSPASGIQNTIGSVGTGQQNATS

SEQ ID NO: 1559 - protein, 39 aa, Homo sapiens
RNPFHHSLPFSIPVHFTNGTYHVVGFDGSSTVDEFLQRL

SEQ ID NO: 1560 - protein, 33 aa, Homo sapiens
RNPADGIPAPESSSDSDSHESSLAQKWNMTGRS

SEQ ID NO: 1561 - protein, 18 aa, Homo sapiens
RNMYTVQNNSGPYFNPRS

SEQ ID NO: 1562 - protein, 27 aa, Homo sapiens
RNLNGTLHELLRMNIVPIVNTNDAVVP

SEQ ID NO: 1563 - protein, 27 aa, Homo sapiens
RNLNDSSLFVSAEEFGHLLDENMGSKF

SEQ ID NO: 1564 - protein, 21 aa, Homo sapiens
RNLFNQWKQNATDIMEAMLKR

SEQ ID NO: 1565 - protein, 21 aa, Homo sapiens
RNLAMEATYINHNFSQQCLRM

SEQ ID NO: 1566 - protein, 20 aa, Homo sapiens
RNKESSDQTGINISGFENKI

SEQ ID NO: 1567 - protein, 19 aa, Homo sapiens
RNINGLFLPPSSNITLQKE

SEQ ID NO: 1568 - protein, 14 aa, Homo sapiens
RNHETTNLSIQQKR

SEQ ID NO: 1569 - protein, 25 aa, Homo sapiens
RNGYGFINRNDTKEDVFVHQTAIKK

SEQ ID NO: 1570 - protein, 26 aa, Homo sapiens
RNGKPENNTMNINASIYDEIQQEMKR

SEQ ID NO: 1571 - protein, 27 aa, Homo sapiens
RNGGTNEESNSSGNTNTDPPAEDSQKS

SEQ ID NO: 1572 - protein, 26 aa, Homo sapiens
RNGESMLNASLVNASSLSEAEQLQRE

SEQ ID NO: 1573 - protein, 28 aa, Homo sapiens
RNGDPSTWVKNSTALISTIPGTYVGVAN

SEQ ID NO: 1574 - protein, 26 aa, Homo sapiens
RNFNYHILSPCDLSNYTDLAMSTVKQ

SEQ ID NO: 1575 - protein, 24 aa, Homo sapiens
RNEKCNENYTTDFIFNLYSEEGKG

SEQ ID NO: 1576 - protein, 39 aa, Homo sapiens
RNDMTYNYANRQSTGSAPQGPAYHGVNRTDEVLHTDQRA

SEQ ID NO: 1577 - protein, 15 aa, Homo sapiens
RNCQAIQQNHSCSKS

SEQ ID NO: 1578 - protein, 19 aa, Homo sapiens
RNAWGNQSYAELISQAIES

SEQ ID NO: 1579 - protein, 14 aa, Homo sapiens
RNYSSIHSQSRSTS

SEQ ID NO: 1580 - protein, 18 aa, Homo sapiens
RNSTELSEMFPVLPGSHL

SEQ ID NO: 1581 - protein, 36 aa, Homo sapiens
RNSTDENFHASLMSEISPISTSPEISEASLMSNLPL

SEQ ID NO: 1582 - protein, 11 aa, Homo sapiens
RNSSLVLHHRT

SEQ ID NO: 1583 - protein, 16 aa, Homo sapiens
RNSSLLEPQKSGNNET

SEQ ID NO: 1584 - protein, 22 aa, Homo sapiens
RNRSFQPGLDNIIFVVETGPLP

SEQ ID NO: 1585 - protein, 32 aa, Homo sapiens
RNPSSAAPVQSRGGIGASENLENPPKMGEEEA

SEQ ID NO: 1586 - protein, 33 aa, Homo sapiens
RNPSQLPALSSSPAHSGMMGINSYGSQLGVSIS

SEQ ID NO: 1587 - protein, 41 aa, Homo sapiens
RNNSYSGSNSGAAIGWESASGNGFNGGSGSSMDSQSSGWEM

SEQ ID NO: 1588 - protein, 21 aa, Homo sapiens
RNMTLLATIMSGSTMSLNHEA

SEQ ID NO: 1589 - protein, 22 aa, Homo sapiens
RNLTALGLNLVASGGTAKALRD

SEQ ID NO: 1590 - protein, 14 aa, Homo sapiens
RNLTAGMAMSTCRE

SEQ ID NO: 1591 - protein, 34 aa, Homo sapiens
RNLSLQVAFSGATACMAHVDGIHLHVANAGDCRA

SEQ ID NO: 1592 - protein, 16 aa, Homo sapiens
RNITIMASGNTGGEKD

SEQ ID NO: 1593 - protein, 34 aa, Homo sapiens
RNFSLPDICEEDPGAPAGAVELPGAWVPGAGQRH

SEQ ID NO: 1594 - protein, 17 aa, Homo sapiens
RNCTIVSPDAGGAKRVT

SEQ ID NO: 1595 - protein, 29 aa, Homo sapiens
RMTQPMMNSSYHSNPAYMNQTAQYPMQMQ

SEQ ID NO: 1596 - protein, 27 aa, Homo sapiens
RMQSPQNLHGQQDDDSAAESFNGNETL

SEQ ID NO: 1597 - protein, 28 aa, Homo sapiens
RMIEQYHNHSDHYCLNLDSGMVIDSYRM

SEQ ID NO: 1598 - protein, 25 aa, Homo sapiens
RMENANLPTKQEPSWINQSEQGIKE

SEQ ID NO: 1599 - protein, 25 aa, Homo sapiens
RMDDVPSHSKALSDGNGSSGIEWSN

SEQ ID NO: 1600 - protein, 23 aa, Homo sapiens
RLYQQFNENNSIGETQARKLSKL

SEQ ID NO: 1601 - protein, 24 aa, Homo sapiens
RLVKVKNEGDDFGWGVVVNFSKKS

SEQ ID NO: 1602 - protein, 28 aa, Homo sapiens
RLSSSGSNCSSGSEGEPVALHAGICVRQ

SEQ ID NO: 1603 - protein, 26 aa, Homo sapiens
RLSQNQNNYQISGNLTVPWITGCSRK

SEQ ID NO: 1604 - protein, 9 aa, Homo sapiens
RLSNGSIDS

SEQ ID NO: 1605 - protein, 27 aa, Homo sapiens
RLRNSSSFSMDDPDAGAMGAAAAEGQA

SEQ ID NO: 1606 - protein, 21 aa, Homo sapiens
RLQQLAEPQSDLEELKHENKS

SEQ ID NO: 1607 - protein, 35 aa, Homo sapiens
RLPNTYPNSSSPGPGGLGGSVHYATMARSAVRPAS

SEQ ID NO: 1608 - protein, 30 aa, Homo sapiens
RLPLANMSYYVSPQAVDAVHRGLGLPLPRT

SEQ ID NO: 1609 - protein, 30 aa, Homo sapiens
RLNYLLRVNGSEQTVVAFFIMPARTNNFNV

SEQ ID NO: 1610 - protein, 27 aa, Homo sapiens
RLNTTNAWDAAPPSLGSQPLYRSSLSH

SEQ ID NO: 1611 - protein, 32 aa, Homo sapiens
RLNSSSVSNLAAVGDLLHSSQASLTAALGLRP

SEQ ID NO: 1612 - protein, 23 aa, Homo sapiens
RLNMTTEQFTGDHTQHFLDGGEM

SEQ ID NO: 1613 - protein, 11 aa, Homo sapiens
RLNGSAAGHVL

SEQ ID NO: 1614 - protein, 30 aa, Homo sapiens
RLMQGDQILMVNGEDVRNATQEAVAALLKC

SEQ ID NO: 1615 - protein, 17 aa, Homo sapiens
RLMLPDDTTNHSNSSKE

SEQ ID NO: 1616 - protein, 30 aa, Homo sapiens
RLMAFGCVSGSVQVYTIDNSTGAMLLSHKL

SEQ ID NO: 1617 - protein, 26 aa, Homo sapiens
RLLTSHTGNTSNSEDILSSACYTVRN

SEQ ID NO: 1618 - protein, 18 aa, Homo sapiens
RLLSNPLLQTYLPNSTKK

SEQ ID NO: 1619 - protein, 17 aa, Homo sapiens
RLLQMPSVVNYSGLRKR

SEQ ID NO: 1620 - protein, 32 aa, Homo sapiens
RLLNLSFCGGISDAGLLHLSHMGSLRSLNLRS

SEQ ID NO: 1621 - protein, 23 aa, Homo sapiens
RLLGHSPVLRNITNSQAPDGRRK

SEQ ID NO: 1622 - protein, 22 aa, Homo sapiens
RLLAEGVCDNDTVPSVSSINRI

SEQ ID NO: 1623 - protein, 27 aa, Homo sapiens
RLKYQAQNITSGDTTTILPAACCTMKS

SEQ ID NO: 1624 - protein, 15 aa, Homo sapiens
RLINLYIIQNNSFSQ

SEQ ID NO: 1625 - protein, 29 aa, Homo sapiens
RLGTFTTQNASAPRNPETPGSPVPPSGRP

SEQ ID NO: 1626 - protein, 29 aa, Homo sapiens
RLGSTFSLDTSMSMNSSPLVGPECDHPKI

SEQ ID NO: 1627 - protein, 27 aa, Homo sapiens
RLGSSKSGDNSSSSLGDVVTGTRRPTP

SEQ ID NO: 1628 - protein, 13 aa, Homo sapiens
RLGPVSTANMSRP

SEQ ID NO: 1629 - protein, 28 aa, Homo sapiens
RLGKPSVMTPTEGLDTGEMSNSTSSLKR

SEQ ID NO: 1630 - protein, 15 aa, Homo sapiens
RLESGMRNMSIHSKT

SEQ ID NO: 1631 - protein, 28 aa, Homo sapiens
RLEEFEGGGGGEGNVSQVGRVWPSSYRA

SEQ ID NO: 1632 - protein, 37 aa, Homo sapiens
RLECNGTISAHCNLHLPGSSDSPASSSRVAGITGIKT

SEQ ID NO: 1633 - protein, 22 aa, Homo sapiens
RLDNITQVMSLHTQYLESFLRS

SEQ ID NO: 1634 - protein, 16 aa, Homo sapiens
RLAMAYGLNVSFLERL

SEQ ID NO: 1635 - protein, 23 aa, Homo sapiens
RKYGSCSTILLDNSTASQPDLRH

SEQ ID NO: 1636 - protein, 27 aa, Homo sapiens
RKTDNGTEAWGSSATQTFNSGACIDKT

SEQ ID NO: 1637 - protein, 27 aa, Homo sapiens
RKSEIHGAPVLFQNLSGVHWGYEETKT

SEQ ID NO: 1638 - protein, 19 aa, Homo sapiens
RKRNVDSSGNKSVLMERLK

SEQ ID NO: 1639 - protein, 19 aa, Homo sapiens
RKQEEFDVANNGSSQANKL

SEQ ID NO: 1640 - protein, 20 aa, Homo sapiens
RKPSPQDIAQAVLRNFSGKD

SEQ ID NO: 1641 - protein, 36 aa, Homo sapiens
RKPPLFNMNAMSALYHIAQNDSPTLQSNEWTDSFRR

SEQ ID NO: 1642 - protein, 20 aa, Homo sapiens
RKNKPLSDMELNSSSEDSKG

SEQ ID NO: 1643 - protein, 30 aa, Homo sapiens
RKNYTSTELTVEPEEPSDSSGINLSGFGRN

SEQ ID NO: 1644 - protein, 12 aa, Homo sapiens
RKNSTFPQVQMR

SEQ ID NO: 1645 - protein, 10 aa, Homo sapiens
RKNITNDIRT

SEQ ID NO: 1646 - protein, 13 aa, Homo sapiens
RKNCSQIALFQKR

SEQ ID NO: 1647 - protein, 13 aa, Homo sapiens
RKNASALYEKIRG

SEQ ID NO: 1648 - protein, 15 aa, Homo sapiens
RKMPSNQNVSPSQRD

SEQ ID NO: 1649 - protein, 30 aa, Homo sapiens
RKMLLWAMSVTLEQNLTCPGSDLKPFTTRL

SEQ ID NO: 1650 - protein, 43 aa, Homo sapiens
RKMAHPAMFPRRGSGSGSASALNAAGTGVGSNATSSEDFPPPS

SEQ ID NO: 1651 - protein, 26 aa, Homo sapiens
RKLQGNMLLNSSMEDKMLKENPEEKL

SEQ ID NO: 1652 - protein, 16 aa, Homo sapiens
RKLNPSQNATGTSRSE

SEQ ID NO: 1653 - protein, 33 aa, Homo sapiens
RKLGYSSLILDSTGSTLFANCTDDNIYMFNMTG

SEQ ID NO: 1654 - protein, 13 aa, Homo sapiens
RKLFQEILNTSRE

SEQ ID NO: 1655 - protein, 30 aa, Homo sapiens
RKKVTAQNLSDGDIKLLVNIVRAYDIPVRK

SEQ ID NO: 1656 - protein, 17 aa, Homo sapiens
RKKNLTLALEALVQLRG

SEQ ID NO: 1657 - protein, 15 aa, Homo sapiens
RKKLINGTGLSAVKP

SEQ ID NO: 1658 - protein, 14 aa, Homo sapiens
RKFSFYGNLSPRRS

SEQ ID NO: 1659 - protein, 33 aa, Homo sapiens
RKFKTNVLPFRQNDSSSHCQKSGSPISSEERRR

SEQ ID NO: 1660 - protein, 25 aa, Homo sapiens
RKENSFLTHQHGNDSEAEGEVVCRL

SEQ ID NO: 1661 - protein, 11 aa, Homo sapiens
RKEGNFSDLKE

SEQ ID NO: 1662 - protein, 23 aa, Homo sapiens
RKDENESSAPADGEGGSELQPKN

SEQ ID NO: 1663 - protein, 18 aa, Homo sapiens
RKACKNCTCGLAEELEKE

SEQ ID NO: 1664 - protein, 32 aa, Homo sapiens
RKAASTLSDTKNMEIINSTIETLAPDSPFDHK

SEQ ID NO: 1665 - protein, 26 aa, Homo sapiens
RIVTTNVTMPEGPPQNCVTGNITGKS

SEQ ID NO: 1666 - protein, 9 aa, Homo sapiens
RIVNDTYRT

SEQ ID NO: 1667 - protein, 18 aa, Homo sapiens
RISKLINSSDELQDNFRE

SEQ ID NO: 1668 - protein, 28 aa, Homo sapiens
RISCRPQTQISNNYGNNPLNSSLLPQKQ

SEQ ID NO: 1669 - protein, 24 aa, Homo sapiens
RIRVDLPLGSPAVNCTVLPGGISV

SEQ ID NO: 1670 - protein, 23 aa, Homo sapiens
RIRTYNFTQDRVSDHRIAYEVRD

SEQ ID NO: 1671 - protein, 22 aa, Homo sapiens
RIPRADELNQTGQILVEQMGKE

SEQ ID NO: 1672 - protein, 28 aa, Homo sapiens
RINEVQVNLSLLGDDLLLPAQSTLQTKH

SEQ ID NO: 1673 - protein, 16 aa, Homo sapiens
RILTNFTGVMPPQFKK

SEQ ID NO: 1674 - protein, 16 aa, Homo sapiens
RILKVAEFFNYSKNRI

SEQ ID NO: 1675 - protein, 23 aa, Homo sapiens
RIIPGFMCQGGGFTCHNGTGGKS

SEQ ID NO: 1676 - protein, 16 aa, Homo sapiens
RIIKEALPDGVNISKE

SEQ ID NO: 1677 - protein, 16 aa, Homo sapiens
RIIIMCCANATGLHKL

SEQ ID NO: 1678 - protein, 26 aa, Homo sapiens
RHVNLSSLVSCLCVNLCSPYLLLRRA

SEQ ID NO: 1679 - protein, 33 aa, Homo sapiens
RHVNLSSLVPSLCVHLCSSHLLLRRAAVACLRQ

SEQ ID NO: 1680 - protein, 24 aa, Homo sapiens
RHRAGMQNLTEFIGSEPSKKRKRR

SEQ ID NO: 1681 - protein, 35 aa, Homo sapiens
RHQGTVTEDKNNASHVVYPVPGNLEEEEWVRPVMK

SEQ ID NO: 1682 - protein, 21 aa, Homo sapiens
RHNLSLHSKFIKVHNEATGKS

SEQ ID NO: 1683 - protein, 23 aa, Homo sapiens
RHNFTLAFSTAEKLADCAQLLDV

SEQ ID NO: 1684 - protein, 36 aa, Homo sapiens
RHMDMLTAADRLPTQAPLSTSQSVSGKNMTASQGPC

SEQ ID NO: 1685 - protein, 13 aa, Homo sapiens
RHIKFYDNNTGKL

SEQ ID NO: 1686 - protein, 29 aa, Homo sapiens
RHIANSIRTHGTGIMNTTKWAFTAWRGGP

SEQ ID NO: 1687 - protein, 10 aa, Homo sapiens
RHDQENDTRW

SEQ ID NO: 1688 - protein, 21 aa, Homo sapiens
RHCEAAIGNETVCTLWQEGRC

SEQ ID NO: 1689 - protein, 14 aa, Homo sapiens
RHAQNVTVDEVIGA

SEQ ID NO: 1690 - protein, 17 aa, Homo sapiens
RGYHGNGTHSESLEHRG

SEQ ID NO: 1691 - protein, 24 aa, Homo sapiens
RGVNGSPRISVTVGNIPKNSVSSS

SEQ ID NO: 1692 - protein, 23 aa, Homo sapiens
RGVEGPQGSPRPPAPIQQLNRSS

SEQ ID NO: 1693 - protein, 31 aa, Homo sapiens
RGTSGQPPEGCAAPTVIVSNHNLTDTVQNKQ

SEQ ID NO: 1694 - protein, 25 aa, Homo sapiens
RGTELDDGIQADSGPINDTDANPRY

SEQ ID NO: 1695 - protein, 31 aa, Homo sapiens
RGSQSYYTVAHAISEWVEKQSALLINGTLKH

SEQ ID NO: 1696 - protein, 32 aa, Homo sapiens
RGSGAVAEGNRTEAGSQDYSLLQAYYSQESKV

SEQ ID NO: 1697 - protein, 18 aa, Homo sapiens
RGRQPLTVFVELWLKNRT

SEQ ID NO: 1698 - protein, 27 aa, Homo sapiens
RGRPFPLALLGWAPSNITFALLFGRRF

SEQ ID NO: 1699 - protein, 21 aa, Homo sapiens
RGRPALPNPEGRAREPCPNRT

SEQ ID NO: 1700 - protein, 40 aa, Homo sapiens
RGRGASPRGGGPLILLDLNDENSNQSFHSEGSLPKGTEPS

SEQ ID NO: 1701 - protein, 30 aa, Homo sapiens
RGPVSSDVEENDSLNLLGILPNNSDSAKKN

SEQ ID NO: 1702 - protein, 26 aa, Homo sapiens
RGPSHPLDLGTSSPNTSQIHWTPYRA

SEQ ID NO: 1703 - protein, 32 aa, Homo sapiens
RGPPSRGGHMDDGGYSMNFNMSSSRGPLPVKR

SEQ ID NO: 1704 - protein, 31 aa, Homo sapiens
RGPHHLDNSSPGPGSEARGINGGPSRMSPKA

SEQ ID NO: 1705 - protein, 25 aa, Homo sapiens
RGNYGGGGNYNDFGNYSGQQQSNYG

SEQ ID NO: 1706 - protein, 26 aa, Homo sapiens
RGNTELFGGQVDGDNETLSVVSASLA

SEQ ID NO: 1707 - protein, 21 aa, Homo sapiens
RGNLNFTCNGNSVISPVGNRV

SEQ ID NO: 1708 - protein, 22 aa, Homo sapiens
RGNEATEGSGLLLNSTGDLMKK

SEQ ID NO: 1709 - protein, 24 aa, Homo sapiens
RGNCDSSGMNLNNISELIISNRSS

SEQ ID NO: 1710 - protein, 23 aa, Homo sapiens
RGMYLVFDGSVDLHYNCSAKCKS

SEQ ID NO: 1711 - protein, 32 aa, Homo sapiens
RGMGPMGTPIMPSPADSTNSSDNIYTMTGGRS

SEQ ID NO: 1712 - protein, 14 aa, Homo sapiens
RGLNSSFETSPKKV

SEQ ID NO: 1713 - protein, 22 aa, Homo sapiens
RGLDIPLLDNVINYSFPAKGKL

SEQ ID NO: 1714 - protein, 19 aa, Homo sapiens
RGKYSEVFEAINITNNERV

SEQ ID NO: 1715 - protein, 27 aa, Homo sapiens
RGKRMRPNSNTPVNETATASDSKGTSN

SEQ ID NO: 1716 - protein, 27 aa, Homo sapiens
RGKMADSSGRGAGKPATGPTNSSSAKK

SEQ ID NO: 1717 - protein, 22 aa, Homo sapiens
RGHKISDYFEYQGGNGSSPVRG

SEQ ID NO: 1718 - protein, 26 aa, Homo sapiens
RGGLGGGYSGASGMGGITAVMVNQSL

SEQ ID NO: 1719 - protein, 37 aa, Homo sapiens
RGGLGGGYGGASGMGGITTVTVNQSLLSPLNLEVDPH

SEQ ID NO: 1720 - protein, 21 aa, Homo sapiens
RGATAAVLAPDSSNASSEPSS

SEQ ID NO: 1721 - protein, 27 aa, Homo sapiens
RFVEGTNINRSLLALGNVINALADSKR

SEQ ID NO: 1722 - protein, 24 aa, Homo sapiens
RFSGLLNCSPAAPPTAPPACEAKP

SEQ ID NO: 1723 - protein, 15 aa, Homo sapiens
RFRSSGMTLDNISRA

SEQ ID NO: 1724 - protein, 17 aa, Homo sapiens
RFRGNLSGKRVDFSGRT

SEQ ID NO: 1725 - protein, 21 aa, Homo sapiens
RFQGNDTSPESFLLHNALARK

SEQ ID NO: 1726 - protein, 30 aa, Homo sapiens
RFNNSLLPTEPSQQLQAYVAWVNAQLKKRP

SEQ ID NO: 1727 - protein, 17 aa, Homo sapiens
RFLNNDSSGAEANSEKY

SEQ ID NO: 1728 - protein, 32 aa, Homo sapiens
RFLLNDNLTLPPEMYVYSTNSDHLPMTSSFRK

SEQ ID NO: 1729 - protein, 22 aa, Homo sapiens
RFLITHNPTNATLSTFIEDLKK

SEQ ID NO: 1730 - protein, 16 aa, Homo sapiens
RFLGTSGQNVSDIFRY

SEQ ID NO: 1731 - protein, 29 aa, Homo sapiens
RFIIVSAFDHFASVHSVSAEGTVVSNLSS

SEQ ID NO: 1732 - protein, 17 aa, Homo sapiens
RFIGLTNSFGFGGTNAT

SEQ ID NO: 1733 - protein, 25 aa, Homo sapiens
RFHFQGPCGRMLPEPLAGHENETVS

SEQ ID NO: 1734 - protein, 16 aa, Homo sapiens
RFGLLFNQENTTYSKT

SEQ ID NO: 1735 - protein, 18 aa, Homo sapiens
RFFVELVGHYSLNMTVTE

SEQ ID NO: 1736 - protein, 27 aa, Homo sapiens
RFEKTNEMLLNFNNLSSARLQQMSERF

SEQ ID NO: 1737 - protein, 22 aa, Homo sapiens
RFCTQTLGVDKGYKNQSFYRKH

SEQ ID NO: 1738 - protein, 24 aa, Homo sapiens
RFANGSAVIQSGDTAVMATAVSKT

SEQ ID NO: 1739 - protein, 18 aa, Homo sapiens
REYNLNFSGSSTIQEVKR

SEQ ID NO: 1740 - protein, 18 aa, Homo sapiens
REVTNKNGTNVFQEESRK

SEQ ID NO: 1741 - protein, 25 aa, Homo sapiens
REVNSTDWDSKMGFWAPLVLSHSRR

SEQ ID NO: 1742 - protein, 23 aa, Homo sapiens
RETALCSLNSSHGIVAFPSRSRS

SEQ ID NO: 1743 - protein, 38 aa, Homo sapiens
  VARIANT 9: Xaa = Any Amino Acid
RESTGAQVXMAGDMLPNSTEQAITIAGIPQSIIECVKQ

SEQ ID NO: 1744 - protein, 23 aa, Homo sapiens
RESIASYLSLTSEDNTSFDRKKK

SEQ ID NO: 1745 - protein, 22 aa, Homo sapiens
RESEELECNTGSNITNMHQDKE

SEQ ID NO: 1746 - protein, 15 aa, Homo sapiens
REQQNDTSSELQNRE

SEQ ID NO: 1747 - protein, 20 aa, Homo sapiens
RENMSDGDTSATESGDEVPV

SEQ ID NO: 1748 - protein, 18 aa, Homo sapiens
RELSEMRAPPAATNSSKK

SEQ ID NO: 1749 - protein, 17 aa, Homo sapiens
RELAGNTSSPPLSPGRP

SEQ ID NO: 1750 - protein, 28 aa, Homo sapiens
REIVSQTTATQEKSQEELPTTNNSVSKE

SEQ ID NO: 1751 - protein, 35 aa, Homo sapiens
REITASSAVSILIKPEQETDPLPVVSRNVSADAKC

SEQ ID NO: 1752 - protein, 20 aa, Homo sapiens
REHGAQAGEGALKDSNNDTN

SEQ ID NO: 1753 - protein, 17 aa, Homo sapiens
REHEKLLMEVCRNCSAV

SEQ ID NO: 1754 - protein, 23 aa, Homo sapiens
REGKELLLYFDASLEITNVTQKI

SEQ ID NO: 1755 - protein, 36 aa, Homo sapiens
REGGHDVPSNKDVTSLDWNTNGTLLATGSYDGFARI

SEQ ID NO: 1756 - protein, 36 aa, Homo sapiens
REGELCSLLKENVSELRILSSGNDHGNWCIIAEKKG

SEQ ID NO: 1757 - protein, 23 aa, Homo sapiens
REENNISGLNQDITDVCFSPEKD

SEQ ID NO: 1758 - protein, 16 aa, Homo sapiens
REENEGVYNGSWGGRG

SEQ ID NO: 1759 - protein, 36 aa, Homo sapiens
REDGDGDEDGPAQQLSGFNTNQSNNVLQAPLPPMRL

SEQ ID NO: 1760 - protein, 20 aa, Homo sapiens
REAYSPLELLDNLSGADVRQ

SEQ ID NO: 1761 - protein, 20 aa, Homo sapiens
REAPGMALAMLMGSLNVTPL

SEQ ID NO: 1762 - protein, 18 aa, Homo sapiens
REAFFGGNGKINLTVFKL

SEQ ID NO: 1763 - protein, 41 aa, Homo sapiens
REACANILIDSGADPNIVGVYGNTAVHYAVNSENLSVVAKL

SEQ ID NO: 1764 - protein, 20 aa, Homo sapiens
RDVNICNMTSHLPAAASASP

SEQ ID NO: 1765 - protein, 32 aa, Homo sapiens
RDVMWENYSNFISLGPSISKPDVITLLDEERK

SEQ ID NO: 1766 - protein, 26 aa, Homo sapiens
RDVMSDETNNEETESPSQEFVNITKY

SEQ ID NO: 1767 - protein, 31 aa, Homo sapiens
RDVMLENYSNLVSLGLLGPKPDTFSQLEKRE

SEQ ID NO: 1768 - protein, 21 aa, Homo sapiens
RDVMLENYSHLVSVGYLVAKP

SEQ ID NO: 1769 - protein, 37 aa, Homo sapiens
RDSFGAHTYELLAKPGQFIHTNWTGHGGSVSSSSYNA

SEQ ID NO: 1770 - protein, 21 aa, Homo sapiens
RDPNIEALNGNCSDTEIHEKE

SEQ ID NO: 1771 - protein, 37 aa, Homo sapiens
RDNGPDGMEPECVIESNWNEIVDSFDDMNLSESLLRD

SEQ ID NO: 1772 - protein, 14 aa, Homo sapiens
RDNTSVYHISGKKK

SEQ ID NO: 1773 - protein, 15 aa, Homo sapiens
RDMSISNTTMDEFRQ

SEQ ID NO: 1774 - protein, 20 aa, Homo sapiens
RDLNVSVTHLIAGEVGSKKY

SEQ ID NO: 1775 - protein, 35 aa, Homo sapiens
RDLAELKSSLVNESEGAAGSAGIPGVPGAGAGARG

SEQ ID NO: 1776 - protein, 21 aa, Homo sapiens
RDLAELKSSLVNESEGAAGGA

SEQ ID NO: 1777 - protein, 22 aa, Homo sapiens
RDKYLHTNCLAALANMSAQFRS

SEQ ID NO: 1778 - protein, 20 aa, Homo sapiens
RDGNGTVDFPEFLGMMARKM

SEQ ID NO: 1779 - protein, 18 aa, Homo sapiens
RDGKNATTDALTSVLTKI

SEQ ID NO: 1780 - protein, 28 aa, Homo sapiens
RDGKEPQPSAEAAAAPSLANISCFTQKL

SEQ ID NO: 1781 - protein, 22 aa, Homo sapiens
RDGEQSPNVSLMQRMSDMLSRW

SEQ ID NO: 1782 - protein, 24 aa, Homo sapiens
RDEDTLQDPAPLETPMNASSSHSC

SEQ ID NO: 1783 - protein, 32 aa, Homo sapiens
RDDNMNTSEDEDMFPIEMSSDEAMELLESSRT

SEQ ID NO: 1784 - protein, 21 aa, Homo sapiens
RDCYYDNSTTCPKCARLSLRK

SEQ ID NO: 1785 - protein, 15 aa, Homo sapiens
RCSVGTYNSSGAYRF

SEQ ID NO: 1786 - protein, 21 aa, Homo sapiens
RCSAEEATEGLMNLSPSAMKN

SEQ ID NO: 1787 - protein, 26 aa, Homo sapiens
RCRELRNFSSLRAILSALQSNPIYRL

SEQ ID NO: 1788 - protein, 12 aa, Homo sapiens
RCNSSLSNHQRI

SEQ ID NO: 1789 - protein, 30 aa, Homo sapiens
RCFLQLQPDNSTLTWVKPTTASPASSKAKL

SEQ ID NO: 1790 - protein, 14 aa, Homo sapiens
RCEGSQPWNLTPRQ

SEQ ID NO: 1791 - protein, 18 aa, Homo sapiens
RCDRNLAMGVNLTSMSKI

SEQ ID NO: 1792 - protein, 15 aa, Homo sapiens
RCDKAFNQSANLTKH

SEQ ID NO: 1793 - protein, 32 aa, Homo sapiens
RCCYSLGNGSSGFRFLKYGGCGFPSLSYGSRF

SEQ ID NO: 1794 - protein, 16 aa, Homo sapiens
RAVNALPQNMTSQMFS

SEQ ID NO: 1795 - protein, 38 aa, Homo sapiens [sequence omitted]

SEQ ID NO: 1796 - protein, 30 aa, Homo sapiens
RASSPNSTVSNTSTEGFGGIMSFASSLYRN

SEQ ID NO: 1797 - protein, 33 aa, Homo sapiens
RARAGHTMNTSPGTVGSDPVILATAGYDHTVRF

SEQ ID NO: 1798 - protein, 28 aa, Homo sapiens
RAQTEGINISEEALNHLGEIGTKTTLRY

SEQ ID NO: 1799 - protein, 22 aa, Homo sapiens
RAQPLINLQMVNASLYEHVERM

SEQ ID NO: 1800 - protein, 30 aa, Homo sapiens
RAQIFANTVDNSSIALQTDNTHLAADDLRV

SEQ ID NO: 1801 - protein, 18 aa, Homo sapiens
RAPTFLMNQTDTHIVEKM

SEQ ID NO: 1802 - protein, 16 aa, Homo sapiens
RANHTPESCPETKYKV

SEQ ID NO: 1803 - protein, 26 aa, Homo sapiens
RANGTAGPTEDHTDDFLGCLNIPVRE

SEQ ID NO: 1804 - protein, 19 aa, Homo sapiens
RALSMYEEAFQNTSDSDRY

SEQ ID NO: 1805 - protein, 18 aa, Homo sapiens
RAINMQLNNGSAGQPIRS

SEQ ID NO: 1806 - protein, 23 aa, Homo sapiens
RAGVVFMAGHVYAVGGFNGSLRV

SEQ ID NO: 1807 - protein, 30 aa, Homo sapiens
RAFDMLSECGFHMVACNSSVTASFINQYTD

SEQ ID NO: 1808 - protein, 20 aa, Homo sapiens
RAETQGANHTPVISAHQTRS

SEQ ID NO: 1809 - protein, 35 aa, Homo sapiens
RACLGLIYTVYVDSLNVSLESLIANLCACLVPAAG

SEQ ID NO: 1810 - protein, 21 aa, Homo sapiens
RAAGSAQGNNQACNSTSEVKD

SEQ ID NO: 1811 - protein, 18 aa, Homo sapiens
QVNQSATALKHVFASLRL

SEQ ID NO: 1812 - protein, 25 aa, Homo sapiens
QTIAAAPSNQSLPPLPSNHPAMTKS

SEQ ID NO: 1813 - protein, 16 aa, Homo sapiens
QRYFVISNTTGYNDRA

SEQ ID NO: 1814 - protein, 14 aa, Homo sapiens
QRNAENTKSNVTHK

SEQ ID NO: 1815 - protein, 25 aa, Homo sapiens
QQTTNTTSTQMTNIGVYVSNMTDKL

SEQ ID NO: 1816 - protein, 15 aa, Homo sapiens
QNSELQAKTNETEKA

SEQ ID NO: 1817 - protein, 25 aa, Homo sapiens
QNSTQDSGPQESEGSAGNSLTVAKD

SEQ ID NO: 1818 - protein, 12 aa, Homo sapiens
QNSSQSADGLRC

SEQ ID NO: 1819 - protein, 23 aa, Homo sapiens
QKFNDSEGDDTEETEDYRQFRKS

SEQ ID NO: 1820 - protein, 19 aa, Homo sapiens
QIVIKMFQNISNIIKSGKM

SEQ ID NO: 1821 - protein, 26 aa, Homo sapiens
QGWPRPLTPPAAGGLQNHTVGIIVKT

SEQ ID NO: 1822 - protein, 38 aa, Homo sapiens
QEMNVAQFLMHMGFDMQTVAQPQGLEPSELLGMLSNGS

SEQ ID NO: 1823 - protein, 26 aa, Homo sapiens
QCSSLGAESILSGKENSSALSPNHRI

SEQ ID NO: 1824 - protein, 22 aa, Homo sapiens
PVKLGIIGVVNRSQLDINNKKS

SEQ ID NO: 1825 - protein, 27 aa, Homo sapiens
PTSSMNVSMMTPINDLHTADSLNLAKG

SEQ ID NO: 1826 - protein, 20 aa, Homo sapiens
PTKIGSGRSSPVTVNQTDKE

SEQ ID NO: 1827 - protein, 18 aa, Homo sapiens
PTFSLPLQLPPPVNTSKL

SEQ ID NO: 1828 - protein, 18 aa, Homo sapiens
PSRPSNSNISKGESRPKW

SEQ ID NO: 1829 - protein, 16 aa, Homo sapiens
PSETSPISNSSINERM

SEQ ID NO: 1830 - protein, 20 aa, Homo sapiens
PPNNVSVPLLMPLVTLMERQ

SEQ ID NO: 1831 - protein, 32 aa, Homo sapiens
PFRMVNETHLDEIFASNTFAPILLTKGLLAKK

SEQ ID NO: 1832 - protein, 24 aa, Homo sapiens
PFMNSLGLVTSNGLPEVENLSKRY

SEQ ID NO: 1833 - protein, 14 aa, Homo sapiens
PFLSDIHNISTLKI

SEQ ID NO: 1834 - protein, 23 aa, Homo sapiens
PEVLSPLTLVNTSGEAQGTVDRV

SEQ ID NO: 1835 - protein, 18 aa, Homo sapiens
PASSDFSDLNTQTNWTKS

SEQ ID NO: 1836 - protein, 16 aa, Homo sapiens
NRNCILHLLSKNWSRR

SEQ ID NO: 1837 - protein, 27 aa, Homo sapiens
NQGNFSVVGTVLAATQAEKAVANFDRT

SEQ ID NO: 1838 - protein, 17 aa, Homo sapiens
NNESSSEGFICPQCMKS

SEQ ID NO: 1839 - protein, 24 aa, Homo sapiens
NMINATIKQDDPFNIDLGQQSQRS

SEQ ID NO: 1840 - protein, 31 aa, Homo sapiens
NKMGQLGLGNQTDAVPSPAQIMYNGQPITKM

SEQ ID NO: 1841 - protein, 15 aa, Homo sapiens
NISSNSSASILESKS

SEQ ID NO: 1842 - protein, 17 aa, Homo sapiens
NIAPNISRAEIISLCKR

SEQ ID NO: 1843 - protein, 28 aa, Homo sapiens
NGPDTNHQNPQNKTSPFSVSPTGPSTKI

SEQ ID NO: 1844 - protein, 38 aa, Homo sapiens
  VARIANT 22: Xaa = Any Amino Acid
NGNSVALSLSDILWNGPVGTVXIGMTDGECVVNPTRKE

SEQ ID NO: 1845 - protein, 20 aa, Homo sapiens
NFSVTNLSQTDEIPVLTLKD

SEQ ID NO: 1846 - protein, 21 aa, Homo sapiens
NFGHNDSTSQMSLNSAAVTKT

SEQ ID NO: 1847 - protein, 23 aa, Homo sapiens
NELCRLGALDILEEVNVSGTRKN

SEQ ID NO: 1848 - protein, 21 aa, Homo sapiens
NDNFGIGGNFSGLGGFGGSRG

SEQ ID NO: 1849 - protein, 20 aa, Homo sapiens
MYVDNNRSWFMHCNSHTNRT

SEQ ID NO: 1850 - protein, 30 aa, Homo sapiens
MVYNCTTGSTNPFHWGEVGMILPVFLNVRI

SEQ ID NO: 1851 - protein, 34 aa, Homo sapiens
MVVLEWLANPSNDMYADTVTTVILEVQSNPKIRK

SEQ ID NO: 1852 - protein, 23 aa, Homo sapiens
MVTEMYSGPCVAMEIQQNNATKT

SEQ ID NO: 1853 - protein, 27 aa, Homo sapiens
MVNQSLLNPLNLEVDPNIQAVCTQEKK

SEQ ID NO: 1854 - protein, 29 aa, Homo sapiens
MVDAASYAANLTDSAEAPKGSPGSWWKKE

SEQ ID NO: 1855 - protein, 23 aa, Homo sapiens
MVAGLLNSGNSNKTIHTSSSIKL

SEQ ID NO: 1856 - protein, 22 aa, Homo sapiens
MVADNPSYNTKTQIIQDFLRKG

SEQ ID NO: 1857 - protein, 18 aa, Homo sapiens
MTWSFGWNSSLPVYYIRE

SEQ ID NO: 1858 - protein, 23 aa, Homo sapiens
MTRDQNGTWEMESNENFEGYMKA

SEQ ID NO: 1859 - protein, 19 aa, Homo sapiens
MTNTSYSEPAQNSKLSLKQ

SEQ ID NO: 1860 - protein, 32 aa, Homo sapiens
MTNGTLEPAAEWSVLLGVHSQDGPLDGAHTRA

SEQ ID NO: 1861 - protein, 29 aa, Homo sapiens
MTNASNSQQSISMQQFSQTSNPSAHFHKC

SEQ ID NO: 1862 - protein, 20 aa, Homo sapiens
MSVTFISNNTAIQELFRFRC

SEQ ID NO: 1863 - protein, 31 aa, Homo sapiens
MSTISCHQDVILSMSFNTNGSLLATTCKDRK

SEQ ID NO: 1864 - protein, 38 aa, Homo sapiens
MSSLGGGSQDAGGSSSSSTNGSGGSGSSGPKAGAADKS

SEQ ID NO: 1865 - protein, 28 aa, Homo sapiens
MSSHFYINDVNFTRKMLLMFFEVSAHES

SEQ ID NO: 1866 - protein, 23 aa, Homo sapiens
MSQHYQSGPVPGTAINGTLPLSH

SEQ ID NO: 1867 - protein, 21 aa, Homo sapiens
MSQGAVANANSTPPPYERTRL

SEQ ID NO: 1868 - protein, 37 aa, Homo sapiens
MSNVEQALFARLLLQDPGNHLINMTSSTTLNLSADRD

SEQ ID NO: 1869 - protein, 16 aa, Homo sapiens
MSNYSSSSLLSGAGKD

SEQ ID NO: 1870 - protein, 26 aa, Homo sapiens
MSLDFNATGRITAAQLQTMLLEKSRV

SEQ ID NO: 1871 - protein, 23 aa, Homo sapiens
MSHFPDRGSENGTPMDVKAGVRV

SEQ ID NO: 1872 - protein, 28 aa, Homo sapiens
MSGTTTSTNTFPGGPIATLFNMSMSIKD

SEQ ID NO: 1873 - protein, 26 aa, Homo sapiens
MSGREETEKVNTSPSVNTKTTTESKA

SEQ ID NO: 1874 - protein, 17 aa, Homo sapiens
MSDHLCSMNETLSKQRE

SEQ ID NO: 1875 - protein, 17 aa, Homo sapiens
MSACNISIQGPSIYNKE

SEQ ID NO: 1876 - protein, 23 aa, Homo sapiens
MRVNNSTMLGASGDYADFQYLKQ

SEQ ID NO: 1877 - protein, 16 aa, Homo sapiens
MRSFLQQDVNKTKSRL

SEQ ID NO: 1878 - protein, 36 aa, Homo sapiens
MRPRGQPADIRQQPGMMPHGQLTTINQSQLSAQLGL

SEQ ID NO: 1879 - protein, 18 aa, Homo sapiens
MRNLQFTTISLNFSTTKT

SEQ ID NO: 1880 - protein, 25 aa, Homo sapiens
MRGIETVLLIKNNSVARAVMQSQKP

SEQ ID NO: 1881 - protein, 26 aa, Homo sapiens
MQTTDLEQTSPPVNQAPNQTKLEVKA

SEQ ID NO: 1882 - protein, 24 aa, Homo sapiens
MQRLNIGYVINVTTHLPLYHYEKG

SEQ ID NO: 1883 - protein, 16 aa, Homo sapiens
MQQHNMSWIEVQFLKK

SEQ ID NO: 1884 - protein, 24 aa, Homo sapiens
MQQFLYEISNLDTLTNSSSFEGYI

SEQ ID NO: 1885 - protein, 31 aa, Homo sapiens
MQNNWCFPACSFNGTSAQEWFMAQDCPYRKR

SEQ ID NO: 1886 - protein, 19 aa, Homo sapiens
MQKSTNSDTSVETLNSTRQ

SEQ ID NO: 1887 - protein, 19 aa, Homo sapiens
MQINTNKSKDASTSPPNRE

SEQ ID NO: 1888 - protein, 14 aa, Homo sapiens
MQELSNILNLSYKQ

SEQ ID NO: 1889 - protein, 26 aa, Homo sapiens
MPVSSSSPLSSLTFNAINRYTNTSKT

SEQ ID NO: 1890 - protein, 14 aa, Homo sapiens
MPSNSSASISKLRE

SEQ ID NO: 1891 - protein, 25 aa, Homo sapiens
MPPVSLNHNLTTPFTSQAGENSLFM

SEQ ID NO: 1892 - protein, 37 aa, Homo sapiens
MPIASEFAPDVVLVSSGFDAVEGHPTPLGGYNLSARC

SEQ ID NO: 1893 - protein, 25 aa, Homo sapiens
MPDTPDILLAKSNSANISQKLYTKG

SEQ ID NO: 1894 - protein, 20 aa, Homo sapiens
MNWVVGSADLEIINATTGRR

SEQ ID NO: 1895 - protein, 27 aa, Homo sapiens
MNSEFNLSLLAPCLSLGMSEISGGQKS

SEQ ID NO: 1896 - protein, 26 aa, Homo sapiens
MNQNAQLLIQQSSLENENESVIKERE

SEQ ID NO: 1897 - protein, 27 aa, Homo sapiens
MNKWAGLLGPISNHSFGGSFRTASNKE

SEQ ID NO: 1898 - protein, 33 aa, Homo sapiens
MNEILTDPSDDTKGFFDPNTEENLTYLQLMERC

SEQ ID NO: 1899 - protein, 18 aa, Homo sapiens
MNDQDLPNWSNENVDDRL

SEQ ID NO: 1900 - protein, 11 aa, Homo sapiens
MNTSTVNSARE

SEQ ID NO: 1901 - protein, 25 aa, Homo sapiens
MNSTDIQWSAILSWGYADNILRLKS

SEQ ID NO: 1902 - protein, 17 aa, Homo sapiens
MNRSQFEELCAELLQKI

SEQ ID NO: 1903 - protein, 25 aa, Homo sapiens
MNNSQGRVTFEDVTVNFTQGEWQRL

SEQ ID NO: 1904 - protein, 25 aa, Homo sapiens
MNNSLDYLAYPVIVSNHRQSTTFRK

SEQ ID NO: 1905 - protein, 29 aa, Homo sapiens
MNNSCLTNAVHLNNVSVVSPVNVHINTRT

SEQ ID NO: 1906 - protein, 19 aa, Homo sapiens
MNISLAFFLYDLLSLMDRG

SEQ ID NO: 1907 - protein, 15 aa, Homo sapiens
MNGTSSQPKKEEYGS

SEQ ID NO: 1908 - protein, 25 aa, Homo sapiens
MNGSGQSPSVLKGILHEAAMQYPKQ

SEQ ID NO: 1909 - protein, 27 aa, Homo sapiens
MMQQTPCYSFAPPNTSLNSPSPNYQKY

SEQ ID NO: 1910 - protein, 27 aa, Homo sapiens
MMGMLASQQNQSGPSGNNQNQGNMQRE

SEQ ID NO: 1911 - protein, 26 aa, Homo sapiens
MLTTHPSLYRVDNLSDEGALNISDRT

SEQ ID NO: 1912 - protein, 26 aa, Homo sapiens
MLSSSSEMNEEFLKENNSVEYKKSKA

SEQ ID NO: 1913 - protein, 10 aa, Homo sapiens
MLRNVTQMSK

SEQ ID NO: 1914 - protein, 25 aa, Homo sapiens
MLQYGGRNRTVATPSHGVWDMRGKQ

SEQ ID NO: 1915 - protein, 19 aa, Homo sapiens
MLQDDNTSAGLHFMASVKK

SEQ ID NO: 1916 - protein, 23 aa, Homo sapiens
MLPNPSHLEAVNPVAVGKTRGRQ

SEQ ID NO: 1917 - protein, 20 aa, Homo sapiens
MLNLSSYPIWVSLFRGSPRR

SEQ ID NO: 1918 - protein, 22 aa, Homo sapiens
MLLNGTPFAFVIDLAALASRRE

SEQ ID NO: 1919 - protein, 23 aa, Homo sapiens
MLISVESPNLTTPITSNPTDTRK

SEQ ID NO: 1920 - protein, 32 aa, Homo sapiens
  VARIANT 7: Xaa = Any Amino Acid
MLGSEMXGQNVSNPAPSPSLSGVSWPDNVPKI

SEQ ID NO: 1921 - protein, 19 aa, Homo sapiens
MLGGYGHISSSIDINSSRK

SEQ ID NO: 1922 - protein, 27 aa, Homo sapiens
MLENPLNSTQWMNDPETGPVMLQISRI

SEQ ID NO: 1923 - protein, 17 aa, Homo sapiens
MLASNHMNGSNGESPLA

SEQ ID NO: 1924 - protein, 21 aa, Homo sapiens
MLAQEGMLANLVEQNISVRRR

SEQ ID NO: 1925 - protein, 16 aa, Homo sapiens
MKVKTNASQVPAEPKE

SEQ ID NO: 1926 - protein, 18 aa, Homo sapiens
MKTQEPAGSLEENNSDKN

SEQ ID NO: 1927 - protein, 16 aa, Homo sapiens
MKPVNQTAASNKGLRG

SEQ ID NO: 1928 - protein, 19 aa, Homo sapiens
MKNSCNVLHPQSPNNSNRQ

SEQ ID NO: 1929 - protein, 19 aa, Homo sapiens
MKNVSHNPLLLLTPQKVKR

SEQ ID NO: 1930 - protein, 16 aa, Homo sapiens
MKMYSDAFLNDSYLKY

SEQ ID NO: 1931 - protein, 23 aa, Homo sapiens
MKFRNSSVAMGASLSCSEYSLKV

SEQ ID NO: 1932 - protein, 27 aa, Homo sapiens
MKFRGNGALSNISDLPFLAENSAFPKM

SEQ ID NO: 1933 - protein, 27 aa, Homo sapiens
MKENPAKEQLWALEQDNCSLANLVCKV

SEQ ID NO: 1934 - protein, 30 aa, Homo sapiens
MKDFLTDRSNQSHLVGVPKPGVPQTPVNKI

SEQ ID NO: 1935 - protein, 28 aa, Homo sapiens
MITVVQTYSTLSNSTIEGIDIMAIKFRN

SEQ ID NO: 1936 - protein, 37 aa, Homo sapiens
MINNTKAFIHHELLAYLYSSADQSSLMEESADQAQRR

SEQ ID NO: 1937 - protein, 27 aa, Homo sapiens
MILLNNSQKLLVLYKPLAWSIPESLKV

SEQ ID NO: 1938 - protein, 19 aa, Homo sapiens
MHSSNFSSSNGSTEDLFRD

SEQ ID NO: 1939 - protein, 18 aa, Homo sapiens
MHLTTLCNTSLDNPTQRN

SEQ ID NO: 1940 - protein, 23 aa, Homo sapiens
MGYLCTHQLLFLQLNQSSFNSKN

SEQ ID NO: 1941 - protein, 29 aa, Homo sapiens
MGVYGQESGGFSGPGENRSMSGPDNRGRG

SEQ ID NO: 1942 - protein, 35 aa, Homo sapiens
MGTPSQTSQDTSLETGQGYEDEQDGWNSSSKTTRV

SEQ ID NO: 1943 - protein, 28 aa, Homo sapiens
MFRMLNSSFEDDPFFSESILAHRENMRQ

SEQ ID NO: 1944 - protein, 25 aa, Homo sapiens
MFQNAVMYNSSDHDVYHMAVEMQRD

SEQ ID NO: 1945 - protein, 32 aa, Homo sapiens
MFPVLFPFNPSSLTMDSIHIPACLNLEFLNEV

SEQ ID NO: 1946 - protein, 23 aa, Homo sapiens
MFNQDIEKLVEGEEVVRENETRL

SEQ ID NO: 1947 - protein, 11 aa, Homo sapiens
MFNISPGAVQF

SEQ ID NO: 1948 - protein, 29 aa, Homo sapiens
MFKMAKNWSAAGNAFCQAAKLHMQLQSKH

SEQ ID NO: 1949 - protein, 35 aa, Homo sapiens
MFCNQQSVCDPPSQNNAANISMVQAASAGPPSLRK

SEQ ID NO: 1950 - protein, 16 aa, Homo sapiens
MEVNGQNFENITFMKA

SEQ ID NO: 1951 - protein, 29 aa, Homo sapiens
METSISTGGNSACSPDNMSSASGLDMGKI

SEQ ID NO: 1952 - protein, 21 aa, Homo sapiens
MESLALSNATGLSADGGAKRQ

SEQ ID NO: 1953 - protein, 34 aa, Homo sapiens
MERESLKSPFTGDTSMNNLETVHHNNSKADKLKE

SEQ ID NO: 1954 - protein, 18 aa, Homo sapiens
MEPGNGSLDLGGDSAGRS

SEQ ID NO: 1955 - protein, 25 aa, Homo sapiens
MENILSGNPLLNLTGPSQPQANFKV

SEQ ID NO: 1956 - protein, 20 aa, Homo sapiens
MEGFNSGLNSGGSTNSSPKV

SEQ ID NO: 1957 - protein, 28 aa, Homo sapiens
MDSSLVSQQPPDNQEKERLNTSIPQKRK

SEQ ID NO: 1958 - protein, 17 aa, Homo sapiens
MDQMAVLLVSNINESKG

SEQ ID NO: 1959 - protein, 15 aa, Homo sapiens
MDLQNMTMGTLVSKA

SEQ ID NO: 1960 - protein, 27 aa, Homo sapiens
MDGMNSSGVYASPTCSNMAHHALSFRG

SEQ ID NO: 1961 - protein, 28 aa, Homo sapiens
MCYACNKSITAKEALICPTCNVTIHNRC

SEQ ID NO: 1962 - protein, 28 aa, Homo sapiens
MCQELETGIVDLLIPSPNATAEVGYNRD

SEQ ID NO: 1963 - protein, 22 aa, Homo sapiens
MAVRGLIRPMNKSPMLITGIRC

SEQ ID NO: 1964 - protein, 30 aa, Homo sapiens
MATYSATCANNSPAQGINMANSIANLRLKA

SEQ ID NO: 1965 - protein, 14 aa, Homo sapiens
MATRTLNLSFFPRS

SEQ ID NO: 1966 - protein, 23 aa, Homo sapiens
MANVTWPQGPFTTWSTTGDAPVI

SEQ ID NO: 1967 - protein, 30 aa, Homo sapiens
MANRTDNTNRTGDATVIKQEMLTGQEMPRE

SEQ ID NO: 1968 - protein, 26 aa, Homo sapiens
MADLIDGYCRLVNGTSQSFIIRPQKE

SEQ ID NO: 1969 - protein, 40 aa, Homo sapiens
MAAANPWDPASAPNGAGLVLGHFIASGMVNQEMLNMSKKT

SEQ ID NO: 1970 - protein, 12 aa, Homo sapiens
LSMLNGTKVLSD

SEQ ID NO: 1971 - protein, 20 aa, Homo sapiens
LRTTNGRLNIDNLNLSFRKE

SEQ ID NO: 1972 - protein, 12 aa, Homo sapiens
LQLANHSGYIKV

SEQ ID NO: 1973 - protein, 13 aa, Homo sapiens
LQGLPGSSGNMTN

SEQ ID NO: 1974 - protein, 26 aa, Homo sapiens
LPLNESADITFATLNTKGNEGDIVRD

SEQ ID NO: 1975 - protein, 28 aa, Homo sapiens
LMQNQSSTNHPGASIALSRPSLNKDFRD

SEQ ID NO: 1976 - protein, 26 aa, Homo sapiens
LLSPNLTDEQAMLEDTLVALFDLEKV

SEQ ID NO: 1977 - protein, 14 aa, Homo sapiens
LLSNKTNAVEENKA

SEQ ID NO: 1978 - protein, 14 aa, Homo sapiens
LLNFSQEEENMLKE

SEQ ID NO: 1979 - protein, 22 aa, Homo sapiens
LLLLLVLANLTDASDAPNPYRQ

SEQ ID NO: 1980 - protein, 31 aa, Homo sapiens
LLKANNTLLKMGYHFELPGPRMVVTNLLTRN

SEQ ID NO: 1981 - protein, 10 aa, Homo sapiens
LKSNNSMAQA

SEQ ID NO: 1982 - protein, 22 aa, Homo sapiens
LKRKWNSLSVIPVLNSSSYTKE

SEQ ID NO: 1983 - protein, 36 aa, Homo sapiens
LKDENTISPYEMCSSGLVQALLTVLNNVSIFRATKQ

SEQ ID NO: 1984 - protein, 25 aa, Homo sapiens
LIHALATNSSSELFRLAAHPLNNRM

SEQ ID NO: 1985 - protein, 18 aa, Homo sapiens
LFNSNNFDLGCKQNGTKL

SEQ ID NO: 1986 - protein, 17 aa, Homo sapiens
LEECCTHNNSATLSWKQ

SEQ ID NO: 1987 - protein, 31 aa, Homo sapiens
LDTCPSSSTASSISSSGGSSGSSSDNRTYRY

SEQ ID NO: 1988 - protein, 21 aa, Homo sapiens
LATYNNSLSPLHASHQEACRS

SEQ ID NO: 1989 - protein, 36 aa, Homo sapiens
LAPNQYVISGEVAILNSTTIEISELPVRTWTQTYKE

SEQ ID NO: 1990 - protein, 22 aa, Homo sapiens
LALANSSQANDCLDSFASPNKT

SEQ ID NO: 1991 - protein, 29 aa, Homo sapiens
KYTGSGILSMANAVLNTNGSHFFICTAKT

SEQ ID NO: 1992 - protein, 34 aa, Homo sapiens
KYTEVTDINSVDANYNSSVLVSGDDFGLVKLFKF

SEQ ID NO: 1993 - protein, 25 aa, Homo sapiens
KYRTKIETLNFTPVDDRVDYVTAKQ

SEQ ID NO: 1994 - protein, 33 aa, Homo sapiens
KYRETKSQESEELVVTGGGGLRRFKTIELNSTI

SEQ ID NO: 1995 - protein, 19 aa, Homo sapiens
KYPESNRTPVKPSSVEEED

SEQ ID NO: 1996 - protein, 33 aa, Homo sapiens
KYNLEKDLKDKFVALTIDDICFSLNNNSPNIRY

SEQ ID NO: 1997 - protein, 18 aa, Homo sapiens
KYLCIPAADSPSQNLTRH

SEQ ID NO: 1998 - protein, 14 aa, Homo sapiens
KYKPLNTTPNATKE

SEQ ID NO: 1999 - protein, 22 aa, Homo sapiens
KYKELTLTRNQGICGKNNSYIE

SEQ ID NO: 2000 - protein, 25 aa, Homo sapiens
KYKDQWGQQGLYHCPNFSDVMGNKT

SEQ ID NO: 2001 - protein, 25 aa, Homo sapiens
KYEYLMTLHGVVNESTVCLMGHERR

SEQ ID NO: 2002 - protein, 30 aa, Homo sapiens
KYERGLIFYINHSLYENLDEELNEELAAKV

SEQ ID NO: 2003 - protein, 17 aa, Homo sapiens
KYEIYLNSSLVQFLLSR

SEQ ID NO: 2004 - protein, 26 aa, Homo sapiens
KYDYLMTLHGVVNESTVCLMSYERRQ

SEQ ID NO: 2005 - protein, 23 aa, Homo sapiens
KYDNSLKIISNASCTTNCLAPRA

SEQ ID NO: 2006 - protein, 18 aa, Homo sapiens [sequence omitted]

SEQ ID NO: 2007 - protein, 29 aa, Homo sapiens
KYALIIVMMTIMTATDIQLLNQTMENTRQ

SEQ ID NO: 2008 - protein, 29 aa, Homo sapiens
KWSPTGPATSNPNSSIMLASASFDSTVRL

SEQ ID NO: 2009 - protein, 20 aa, Homo sapiens
KWSMVCLLMNGSSHSPTAIN

SEQ ID NO: 2010 - protein, 21 aa, Homo sapiens
KWSCTEASNTSPTMSAAQNAE

SEQ ID NO: 2011 - protein, 15 aa, Homo sapiens
KWRSNTSLLQQNLRQ

SEQ ID NO: 2012 - protein, 22 aa, Homo sapiens
KWRRPDYDGGSPNLSYHVERRL

SEQ ID NO: 2013 - protein, 21 aa, Homo sapiens
KWQSAIQDFRSNATALCHIRN

SEQ ID NO: 2014 - protein, 15 aa, Homo sapiens
KWNFSSGFIEAVFKH

SEQ ID NO: 2015 - protein, 15 aa, Homo sapiens
KWMLKTGMKNNATKQ

SEQ ID NO: 2016 - protein, 19 aa, Homo sapiens
KWLPNSTTTCSLSPDSAIL

SEQ ID NO: 2017 - protein, 23 aa, Homo sapiens
KWIHTLTSLLQNISSYYTSLPRF

SEQ ID NO: 2018 - protein, 22 aa, Homo sapiens
KVYENTTLGFIVEVEGLPVPGV

SEQ ID NO: 2019 - protein, 28 aa, Homo sapiens
KVTRDALTEPLAIVEGYNSYFSFSRNRS

SEQ ID NO: 2020 - protein, 24 aa, Homo sapiens
KVTCDIDVNSSLNISAVGKSTEKE

SEQ ID NO: 2021 - protein, 24 aa, Homo sapiens
KVSSPLENEKLKSMTINFSSLNRK

SEQ ID NO: 2022 - protein, 24 aa, Homo sapiens
KVSNLSLFGGLPANHVLVNQYLPG

SEQ ID NO: 2023 - protein, 19 aa, Homo sapiens
KVRRPSPNRSKLSNVARKA

SEQ ID NO: 2024 - protein, 22 aa, Homo sapiens
KVNRYDAGKYTIEAENQSGKKS

SEQ ID NO: 2025 - protein, 17 aa, Homo sapiens
KVNAPILTNTTLNVIRL

SEQ ID NO: 2026 - protein, 26 aa, Homo sapiens
KVNPTLVIQPTNLSARLETDVECLKL

SEQ ID NO: 2027 - protein, 28 aa, Homo sapiens
KVNNSGISLCNLISAVTTPAKAIAAVKS

SEQ ID NO: 2028 - protein, 30 aa, Homo sapiens
KVNKTLTSLNIESNFITGTGILALVEALKE

SEQ ID NO: 2029 - protein, 25 aa, Homo sapiens
KVLTPEELLYRAVQSVNVTHDAVHA

SEQ ID NO: 2030 - protein, 24 aa, Homo sapiens
KVLEANATPLDRGDGVLRTCALRP

SEQ ID NO: 2031 - protein, 22 aa, Homo sapiens
KVKNLTEEMAGLDETIAKLTKE

SEQ ID NO: 2032 - protein, 36 aa, Homo sapiens
KVKMVVSREEVELAYQEAMFNMATLNRTAAGLMHTF

SEQ ID NO: 2033 - protein, 19 aa, Homo sapiens
KVIQMDVALFEMNQSDSKE

SEQ ID NO: 2034 - protein, 36 aa, Homo sapiens
  VARIANT 15: Xaa = Any Amino Acid
KVHTGTHMWNSTPVXQGRQLSGDGPMTFLGGNPIKF

SEQ ID NO: 2035 - protein, 34 aa, Homo sapiens
KVGAERNVLIFDLGDDTFNVSILTTEDGIFEVKS

SEQ ID NO: 2036 - protein, 17 aa, Homo sapiens
KVDSNDSLYGGDSKFLA

SEQ ID NO: 2037 - protein, 22 aa, Homo sapiens
KVDPETNKNITRGQSLDNLIKV

SEQ ID NO: 2038 - protein, 20 aa, Homo sapiens
KVDMHDDSLNTTANLIWNKL

SEQ ID NO: 2039 - protein, 25 aa, Homo sapiens
KVARLEQNGSPMGARGRPNGAVAKA

SEQ ID NO: 2040 - protein, 18 aa, Homo sapiens
KVAPVINNGSPTILGKRS

SEQ ID NO: 2041 - protein, 35 aa, Homo sapiens
KVAGSEENGTAETEEVEDESASGELDLEAQFHLHF

SEQ ID NO: 2042 - protein, 29 aa, Homo sapiens
KVADRTKSENGLQNESLSSTHHTDGLSKI

SEQ ID NO: 2043 - protein, 22 aa, Homo sapiens
KTYWESNGSAGSHYITLHMRRG

SEQ ID NO: 2044 - protein, 15 aa, Homo sapiens
KTVNLSVTPSPAPRT

SEQ ID NO: 2045 - protein, 24 aa, Homo sapiens
KTTTRQLSSPNHSPSQSPNQSPRI

SEQ ID NO: 2046 - protein, 28 aa, Homo sapiens
KTSIAQSVLQSLPSSQWSVLVVNMSAQT

SEQ ID NO: 2047 - protein, 16 aa, Homo sapiens
KTRPQNGSMILYNRKK

SEQ ID NO: 2048 - protein, 24 aa, Homo sapiens
KTRGRGAANDSTQFTVAGRMVKKG

SEQ ID NO: 2049 - protein, 15 aa, Homo sapiens
KTQLNSSSLQKLFRE

SEQ ID NO: 2050 - protein, 11 aa, Homo sapiens
KTNNVNVSSRV

SEQ ID NO: 2051 - protein, 38 aa, Homo sapiens
KTNLDDDVPILLFESNGSLIYTPTIEINSSHHSAMEKR

SEQ ID NO: 2052 - protein, 34 aa, Homo sapiens
KTNEISVIQSGGVPTLPVSLGATSVVNNATVSKM

SEQ ID NO: 2053 - protein, 15 aa, Homo sapiens
KTNVTHEEHTAVEKI

SEQ ID NO: 2054 - protein, 22 aa, Homo sapiens
KTNRSSVKTPKPVEPAASDLEP

SEQ ID NO: 2055 - protein, 35 aa, Homo sapiens
KTNGTLLRNGGLPGGPNKIPNGDICCIPNSNLDKA

SEQ ID NO: 2056 - protein, 27 aa, Homo sapiens
KTMSIVSYNHLGNNDGENLSAPLQFRS

SEQ ID NO: 2057 - protein, 25 aa, Homo sapiens
KTLTFLAVMLIVLNSTGPAHQPGRG

SEQ ID NO: 2058 - protein, 26 aa, Homo sapiens
KTLPDSAGYVEGLQCMSVENATTIRT

SEQ ID NO: 2059 - protein, 23 aa, Homo sapiens
KTLDLQSGLKDITGNKSEMIEKP

SEQ ID NO: 2060 - protein, 27 aa, Homo sapiens
KTHMNVLGVLGPLDPQWLVENNITGCP

SEQ ID NO: 2061 - protein, 17 aa, Homo sapiens
KTGTTLNTSIIFGPNLS

SEQ ID NO: 2062 - protein, 28 aa, Homo sapiens
KTFVEVDENGTQAAAATGAVVSERSLRS

SEQ ID NO: 2063 - protein, 20 aa, Homo sapiens
KTFTMMGPSESDNFSHNLRG

SEQ ID NO: 2064 - protein, 15 aa, Homo sapiens
KTFANSSYLAQHIRI

SEQ ID NO: 2065 - protein, 15 aa, Homo sapiens
KTEPMDADDSNNCTG

SEQ ID NO: 2066 - protein, 29 aa, Homo sapiens
KSWNKSQNDCAINNSYLMVIQDITAMVRF

SEQ ID NO: 2067 - protein, 24 aa, Homo sapiens
KSVNVSSNLVTQEPSPEETSTKRS

SEQ ID NO: 2068 - protein, 17 aa, Homo sapiens
KSTNISFTDMVSADERL

SEQ ID NO: 2069 - protein, 29 aa, Homo sapiens
KSTKPIVAAINGSCLGGGLEVAISCQYRI

SEQ ID NO: 2070 - protein, 29 aa, Homo sapiens
KSSSTPFPFRTGLTSGNVTENLQTYIDKS

SEQ ID NO: 2071 - protein, 27 aa, Homo sapiens
KSSSSLGNATSDEDPNTNIMNINENKN

SEQ ID NO: 2072 - protein, 17 aa, Homo sapiens
KSSNLSEHQTLHTGQRP

SEQ ID NO: 2073 - protein, 24 aa, Homo sapiens
KSSLVNESETNQNSSSDSEAERRP

SEQ ID NO: 2074 - protein, 29 aa, Homo sapiens
KSSLSASTNPELGSNVSGTQTYPVVTGRD

SEQ ID NO: 2075 - protein, 28 aa, Homo sapiens
KSPTSPTQNLFPASKTSPVNLPNKSSIP

SEQ ID NO: 2076 - protein, 38 aa, Homo sapiens
KSPIIPECSTNVQTAAGGSNSSQYNSNLTIRLSVSWKG

SEQ ID NO: 2077 - protein, 22 aa, Homo sapiens
KSPDTFMIPMALPNDNGSVSGV

SEQ ID NO: 2078 - protein, 31 aa, Homo sapiens
KSMINTTGAVDSGSSSSSSSSSFVNGATSKN

SEQ ID NO: 2079 - protein, 27 aa, Homo sapiens
KSLTTECHLLDSPGLNCSNPFTQLERR

SEQ ID NO: 2080 - protein, 20 aa, Homo sapiens
KSLTNLSQEEQITKLLILKL

SEQ ID NO: 2081 - protein, 28 aa, Homo sapiens
KSLNDSIQPDPLCLHNSSLFALQNLQPW

SEQ ID NO: 2082 - protein, 26 aa, Homo sapiens
KSLIEGVISGYNATVFAYGPTGCGKT

SEQ ID NO: 2083 - protein, 20 aa, Homo sapiens
KSKSDLAVSNISPPSPDSKS

SEQ ID NO: 2084 - protein, 17 aa, Homo sapiens
KSISWDENGTCIVINEE

SEQ ID NO: 2085 - protein, 18 aa, Homo sapiens
KSIHEQDTNVNNSVLKKV

SEQ ID NO: 2086 - protein, 16 aa, Homo sapiens
KSIGPEHNGSMVRNKC

SEQ ID NO: 2087 - protein, 20 aa, Homo sapiens
KSIENDSDEVEERAENFPRT

SEQ ID NO: 2088 - protein, 25 aa, Homo sapiens
KSHISNHTALENCVSLLCIRADELQ

SEQ ID NO: 2089 - protein, 33 aa, Homo sapiens
KSGKLNIGDQIMSINGTSLVGLPLSTCQSIIKG

SEQ ID NO: 2090 - protein, 21 aa, Homo sapiens
KSFNCNSSLIKHWRVHTGERP

SEQ ID NO: 2091 - protein, 27 aa, Homo sapiens
KSFLNAFSEEINNSMIILSLSPTTFKN

SEQ ID NO: 2092 - protein, 26 aa, Homo sapiens
KSFGSPPLAVSNVSAAVMVLMAPRGR

SEQ ID NO: 2093 - protein, 15 aa, Homo sapiens
KSEVNEMENNLTRRR

SEQ ID NO: 2094 - protein, 19 aa, Homo sapiens
KSEHNPSTSGCSSDQSSKV

SEQ ID NO: 2095 - protein, 15 aa, Homo sapiens
KSEENSTVFSHLMKY

SEQ ID NO: 2096 - protein, 13 aa, Homo sapiens
KSDNNYSTPNERG

SEQ ID NO: 2097 - protein, 24 aa, Homo sapiens
KSCSSHSSSNTLSSNTSSNSDDKH

SEQ ID NO: 2098 - protein, 15 aa, Homo sapiens
KRYNQSMVTAELQRL

SEQ ID NO: 2099 - protein, 24 aa, Homo sapiens
KRYEDGTISSNATHVEHPLCPPKP

SEQ ID NO: 2100 - protein, 23 aa, Homo sapiens
KRTINSSQEPAPGMKPNWPRSRY

SEQ ID NO: 2101 - protein, 30 aa, Homo sapiens
KRSPIFFNYLYSPLEIEALKPNVNVSSLKK

SEQ ID NO: 2102 - protein, 14 aa, Homo sapiens
KRSHNASIIDMGEE

SEQ ID NO: 2103 - protein, 21 aa, Homo sapiens
KRSGVKTSGSEGSAPINNSVI

SEQ ID NO: 2104 - protein, 34 aa, Homo sapiens
KRRTTNRTIPSVDDFQNYLRVAFQEVNSGCTGKT

SEQ ID NO: 2105 - protein, 29 aa, Homo sapiens
KRRKELGAMAFSTTAINFSTVNSSAGFRS

SEQ ID NO: 2106 - protein, 20 aa, Homo sapiens
KRQAEEAEEQSNANLSKFRK

SEQ ID NO: 2107 - protein, 15 aa, Homo sapiens
KRPNENSSADISGKT

SEQ ID NO: 2108 - protein, 34 aa, Homo sapiens
KRPETKLKPLPVAPSQPTLGSSNINGSIDYPAKN

SEQ ID NO: 2109 - protein, 27 aa, Homo sapiens
KRNTELETLLAKLIQTCQHVEVNASRQ

SEQ ID NO: 2110 - protein, 35 aa, Homo sapiens
KRNHMLLLYPREILILDLEVNQTVGVIAIERTGVP

SEQ ID NO: 2111 - protein, 24 aa, Homo sapiens
KRNSSSSSTDSETLRYNHNFEPKS

SEQ ID NO: 2112 - protein, 20 aa, Homo sapiens
KRNASSSSHSSTEGLQELKR

SEQ ID NO: 2113 - protein, 26 aa, Homo sapiens
KRLAYLLQQTDEYVANLTELVPQHKA

SEQ ID NO: 2114 - protein, 23 aa, Homo sapiens
KRFEISCNLSLDAMEEFLNRRKM

SEQ ID NO: 2115 - protein, 26 aa, Homo sapiens
KRADKYWEYTFKVNWSDLSVTTVTKT

SEQ ID NO: 2116 - protein, 12 aa, Homo sapiens
KQVPLIPDLNQT

SEQ ID NO: 2117 - protein, 24 aa, Homo sapiens
KQVLLFNNSHLTYVSFDFHEHCRG

SEQ ID NO: 2118 - protein, 23 aa, Homo sapiens
KQSSNRPAHNISHILGHDCSSAV

SEQ ID NO: 2119 - protein, 27 aa, Homo sapiens
KQQFNTQNQSNVMPGPAQIMRGPTPNM

SEQ ID NO: 2120 - protein, 23 aa, Homo sapiens
KQPVESSEDSTDDSNSSSGEEER

SEQ ID NO: 2121 - protein, 16 aa, Homo sapiens
KQNSDHSNGSFNLKAL

SEQ ID NO: 2122 - protein, 18 aa, Homo sapiens
KQNSAYNMHSILSNTSAE

SEQ ID NO: 2123 - protein, 26 aa, Homo sapiens
KQNPMANYSSIPAEIMDHSISPFMRK

SEQ ID NO: 2124 - protein, 12 aa, Homo sapiens
KQNNTNANKPKK

SEQ ID NO: 2125 - protein, 9 aa, Homo sapiens
KQNNSYWRE

SEQ ID NO: 2126 - protein, 31 aa, Homo sapiens
KQNKSPDTEKINYAGPLEETGISDITKKEKE

SEQ ID NO: 2127 - protein, 29 aa, Homo sapiens
KQMLIVITDGESHDHDQLNDTALELRNKG

SEQ ID NO: 2128 - protein, 18 aa, Homo sapiens
KQLGSFPSNYLSNNNQTS

SEQ ID NO: 2129 - protein, 18 aa, Homo sapiens
KQKSLTNLSFLTDSEKKL

SEQ ID NO: 2130 - protein, 28 aa, Homo sapiens
KQKPSGLTRSTSMLISSGHNKSSNSLKL

SEQ ID NO: 2131 - protein, 23 aa, Homo sapiens
KQKNSSDQEGNNISSSSGHRVRL

SEQ ID NO: 2132 - protein, 18 aa, Homo sapiens
KQIKNSSLLSFDNEDENE

SEQ ID NO: 2133 - protein, 22 aa, Homo sapiens
KQHGVNVSVNASATPFQQPSGY

SEQ ID NO: 2134 - protein, 20 aa, Homo sapiens
KQGAENMTHTCASGTPKERK

SEQ ID NO: 2135 - protein, 27 aa, Homo sapiens
KQENSSNSSPAPEPNSAVPSDGTEAKV

SEQ ID NO: 2136 - protein, 18 aa, Homo sapiens
KPLGPLQTLMENLSSNRF

SEQ ID NO: 2137 - protein, 18 aa, Homo sapiens
KNYNDHENNLSAICLVKL

SEQ ID NO: 2138 - protein, 19 aa, Homo sapiens
KNTNQGFSSANVSEEEERK

SEQ ID NO: 2139 - protein, 43 aa, Homo sapiens
KNSLSGIAMNVPASRGSNLNSSGANRTSLSGGTGSGTQGATKP

SEQ ID NO: 2140 - protein, 29 aa, Homo sapiens
KNSDFYMGAGGPLEHVMETLDNESFYSKA

SEQ ID NO: 2141 - protein, 18 aa, Homo sapiens
KNQQITHANNTVSNFKRF

SEQ ID NO: 2142 - protein, 39 aa, Homo sapiens
KNQELKAGTSIMGSHLTSAETVTLDSLKAVEVVNLSVSC

SEQ ID NO: 2143 - protein, 23 aa, Homo sapiens
KNNYGLLLNENESLFLMVVLWKI

SEQ ID NO: 2144 - protein, 36 aa, Homo sapiens
KNNRSDMMSALGLGQEEDIESPWDSESISENFPQKY

SEQ ID NO: 2145 - protein, 16 aa, Homo sapiens
KNNKSDTLPLATRYNV

SEQ ID NO: 2146 - protein, 37 aa, Homo sapiens
KNMLVLNLSHNSIDTIPNQLFINLTDLLYLDLSENRL

SEQ ID NO: 2147 - protein, 25 aa, Homo sapiens
KNMAQETNQTPGPMLCSTGCGFYGN

SEQ ID NO: 2148 - protein, 23 aa, Homo sapiens
KNLPFLEHLELIGSNFSSAMPRN

SEQ ID NO: 2149 - protein, 36 aa, Homo sapiens
KNKISIEDLLQSSMGSTQQAQNTTSSLMNLVMQFRK

SEQ ID NO: 2150 - protein, 19 aa, Homo sapiens
KNKAQNITAPESEAICWQL

SEQ ID NO: 2151 - protein, 20 aa, Homo sapiens
KNIKHSGNITFDEIVNLARQ

SEQ ID NO: 2152 - protein, 18 aa, Homo sapiens
KNIFVNGTTGEGLSLSVS

SEQ ID NO: 2153 - protein, 36 aa, Homo sapiens
KNGQSLGDLDGIPIAVKDNFSTSGIETTCASNMLKG

SEQ ID NO: 2154 - protein, 24 aa, Homo sapiens
KNFINQGPYENRSMFESLDLSWKL

SEQ ID NO: 2155 - protein, 22 aa, Homo sapiens
KNFHSMQNLCPPQTNGTPEGRQ

SEQ ID NO: 2156 - protein, 39 aa, Homo sapiens
KNFAQNRGAGNTSSLNPLAVGFVQTPPVISSAHIQDERV

SEQ ID NO: 2157 - protein, 38 aa, Homo sapiens
KNENSSEQLDVDGDSSSEVSSEVNFNYEYAQMEVTMKA

SEQ ID NO: 2158 - protein, 24 aa, Homo sapiens
KNENETILNPEEVALLEEYIPTRH

SEQ ID NO: 2159 - protein, 32 aa, Homo sapiens
KNEKNGTDELDNMNSTERISFLQEKLQEIRKY

SEQ ID NO: 2160 - protein, 28 aa, Homo sapiens
KNEIQSFLVSDPENTTWADIEAMVSVTL

SEQ ID NO: 2161 - protein, 14 aa, Homo sapiens
KNCRNKSLLRSRRT

SEQ ID NO: 2162 - protein, 26 aa, Homo sapiens
KNCNTSGIQTEWSPPLTMLFLCATKF

SEQ ID NO: 2163 - protein, 16 aa, Homo sapiens
KNAPQNSTQAHSENKC

SEQ ID NO: 2164 - protein, 25 aa, Homo sapiens
KNYTSVYDKNNLLTNKTVMAHGCYL

SEQ ID NO: 2165 - protein, 27 aa, Homo sapiens
KNWTFGPQDVDELIFMLSDSPGVMCRP

SEQ ID NO: 2166 - protein, 28 aa, Homo sapiens
KNVTLEEDGTRAVRAAGYAHGLVFSTKE

SEQ ID NO: 2167 - protein, 21 aa, Homo sapiens
KNTSNKEISRDTLLTIENNPC

SEQ ID NO: 2168 - protein, 19 aa, Homo sapiens
KNSSSEQLFSSARLQNEKK

SEQ ID NO: 2169 - protein, 22 aa, Homo sapiens
KNSSEFPLFSYNNGVVMTSCRE

SEQ ID NO: 2170 - protein, 25 aa, Homo sapiens
KNQSASPPPKDRSSSPATEQSWTQN

SEQ ID NO: 2171 - protein, 32 aa, Homo sapiens
KNPTDACLDAVMNEAPGPINFTMLLAMFGKKL

SEQ ID NO: 2172 - protein, 12 aa, Homo sapiens
KNNTICPGALRF

SEQ ID NO: 2173 - protein, 10 aa, Homo sapiens
KNNTIAPKKA

SEQ ID NO: 2174 - protein, 21 aa, Homo sapiens
KNMSVTFALDEPMKEGECSRR

SEQ ID NO: 2175 - protein, 29 aa, Homo sapiens
KNLTQSHSTTWKLNNLLLNDYWVHNEMKA

SEQ ID NO: 2176 - protein, 10 aa, Homo sapiens
KNLTFNPPIY

SEQ ID NO: 2177 - protein, 23 aa, Homo sapiens
KNLTAVKSGGTSDSFVKGYLLPD

SEQ ID NO: 2178 - protein, 17 aa, Homo sapiens
KNLSEPSLEATPHCHIN

SEQ ID NO: 2179 - protein, 12 aa, Homo sapiens
KNLSDVNILHRL

SEQ ID NO: 2180 - protein, 23 aa, Homo sapiens
KNISNPPDMSGWNPFGEDNFSKL

SEQ ID NO: 2181 - protein, 17 aa, Homo sapiens
KNISNDTFGTTYGRIHM

SEQ ID NO: 2182 - protein, 25 aa, Homo sapiens
KNHTHQQDIDDLKRQNALLEQQVRA

SEQ ID NO: 2183 - protein, 16 aa, Homo sapiens
KNETVSSNSSNNTGNS

SEQ ID NO: 2184 - protein, 16 aa, Homo sapiens
KNESSPAPPDSDADKL

SEQ ID NO: 2185 - protein, 16 aa, Homo sapiens
KNESNLGDLLLGFLKY

SEQ ID NO: 2186 - protein, 11 aa, Homo sapiens
KNESKEKSNKR

SEQ ID NO: 2187 - protein, 23 aa, Homo sapiens
KNDTAAVQLHFVSGNNVLAHRSL

SEQ ID NO: 2188 - protein, 20 aa, Homo sapiens
KNDSLIQNDSILESLLEVLR

SEQ ID NO: 2189 - protein, 18 aa, Homo sapiens
KNDSDLFGLGLEEAGPKE

SEQ ID NO: 2190 - protein, 14 aa, Homo sapiens
KNDSDCGVFVLQYC

SEQ ID NO: 2191 - protein, 25 aa, Homo sapiens
KNATLVSPPAQTINQTPVTLQVPGL

SEQ ID NO: 2192 - protein, 15 aa, Homo sapiens
KNASGTKAVSVMVKV

SEQ ID NO: 2193 - protein, 25 aa, Homo sapiens
KMWKNHISSRNTTPLPRPPPGLTNP

SEQ ID NO: 2194 - protein, 23 aa, Homo sapiens
KMVAWSSSENMSEESVVLSFPRF

SEQ ID NO: 2195 - protein, 19 aa, Homo sapiens
KMPYIQNLSSLPTRTELRT

SEQ ID NO: 2196 - protein, 21 aa, Homo sapiens
KMNRTALHLACANGHPEVVTL

SEQ ID NO: 2197 - protein, 23 aa, Homo sapiens
KMNLTQNTLGYEGIVKLYKVLKS

SEQ ID NO: 2198 - protein, 20 aa, Homo sapiens
KMMNDSILRLQTWDEAVFRE

SEQ ID NO: 2199 - protein, 16 aa, Homo sapiens
KMLSLNNYSVPQSTRE

SEQ ID NO: 2200 - protein, 28 aa, Homo sapiens
KMFLNNTTTNRHTSGEGPGSKTGDKEEK

SEQ ID NO: 2201 - protein, 21 aa, Homo sapiens
KMFILSDGEGKNGTIELMEPL

SEQ ID NO: 2202 - protein, 21 aa, Homo sapiens
KMFFETNENNDTTYQNLWDAF

SEQ ID NO: 2203 - protein, 21 aa, Homo sapiens
KMEVGIEDCLHIEFEYNKSKY

SEQ ID NO: 2204 - protein, 35 aa, Homo sapiens
KMEQKAKQNQVASPQPPHPGEITNAHNSSCISNKF

SEQ ID NO: 2205 - protein, 36 aa, Homo sapiens
KMENGQQAADNILSAVPPGLINTSEAGIPAMSTNDL

SEQ ID NO: 2206 - protein, 18 aa, Homo sapiens
KMAAANLTFSQEVVWQRG

SEQ ID NO: 2207 - protein, 38 aa, Homo sapiens
KLVGFPAYGHSFLLSNPSNHGIDAPTTGPGPAGPYTRQ

SEQ ID NO: 2208 - protein, 18 aa, Homo sapiens
KLSTLLNHNNDTEEEERL

SEQ ID NO: 2209 - protein, 14 aa, Homo sapiens
KLSSQGNVSGKRKN

SEQ ID NO: 2210 - protein, 23 aa, Homo sapiens
KLSPGNSGNYSSGASSASASGSS

SEQ ID NO: 2211 - protein, 20 aa, Homo sapiens
KLSNNLNVEGGSSENNHSIK

SEQ ID NO: 2212 - protein, 19 aa, Homo sapiens
KLRPVTLTEMNYSKYGAKE

SEQ ID NO: 2213 - protein, 23 aa, Homo sapiens
KLRKEQLKEELNENQSTPKKEKQ

SEQ ID NO: 2214 - protein, 16 aa, Homo sapiens
KLRIFYQFLYNNNTRQ

SEQ ID NO: 2215 - protein, 16 aa, Homo sapiens
KLQINNLTMNLIELEN

SEQ ID NO: 2216 - protein, 19 aa, Homo sapiens
KLQESIEYEDLGKNNSVKT

SEQ ID NO: 2217 - protein, 30 aa, Homo sapiens
KLPLSHSALPSQALGGIASGLGMQNLNSSR

SEQ ID NO: 2218 - protein, 17 aa, Homo sapiens
KLPKNEPQNATGAPGRN

SEQ ID NO: 2219 - protein, 26 aa, Homo sapiens
KLPCSENPRDTEDVPWITLNSSIQKV

SEQ ID NO: 2220 - protein, 15 aa, Homo sapiens
KLNYLPPNASALFRK

SEQ ID NO: 2221 - protein, 27 aa, Homo sapiens
KLNLNVAPDSHGTLIPDTNETITLASH

SEQ ID NO: 2222 - protein, 22 aa, Homo sapiens
KLMLVSAPSILSSGNGTAINMT

SEQ ID NO: 2223 - protein, 18 aa, Homo sapiens
KLLYNLRASLNKNQSSRH

SEQ ID NO: 2224 - protein, 29 aa, Homo sapiens
KLLVNLADHNGNTALHYSVSHSNFSIVKL

SEQ ID NO: 2225 - protein, 16 aa, Homo sapiens
KLLQTTNNSPMNSKPQ

SEQ ID NO: 2226 - protein, 27 aa, Homo sapiens
KLLNSNKSGAAFNQSKSLTLPQTCNRE

SEQ ID NO: 2227 - protein, 15 aa, Homo sapiens
KLLLKIKNGTPPMRK

SEQ ID NO: 2228 - protein, 20 aa, Homo sapiens
KLKMLTNPSTANSNLLLHQS

SEQ ID NO: 2229 - protein, 27 aa, Homo sapiens
KLKLFLNETQTQEITEDIPVKTLNMKT

SEQ ID NO: 2230 - protein, 30 aa, Homo sapiens
KLIPFSPAVNTSVSTVASTVAPMYAGDLRT

SEQ ID NO: 2231 - protein, 17 aa, Homo sapiens
KLINYNNSITNSVYSRF

SEQ ID NO: 2232 - protein, 32 aa, Homo sapiens
KLILSQNHSDEEEEEEENEEENLAMAVGMGER

SEQ ID NO: 2233 - protein, 24 aa, Homo sapiens
KLIKTDESVVDRAKANASLWEARL

SEQ ID NO: 2234 - protein, 25 aa, Homo sapiens
KLHPFGSLQQEMGPVNSTNATQDRS

SEQ ID NO: 2235 - protein, 19 aa, Homo sapiens
KLGVNNISGIEEASNMFTN

SEQ ID NO: 2236 - protein, 33 aa, Homo sapiens
KLFKEVASLQENFEVFLSFEDYSNSSLVADLRE

SEQ ID NO: 2237 - protein, 22 aa, Homo sapiens
KLEVEDLDENFLNSSYQTVFKT

SEQ ID NO: 2238 - protein, 33 aa, Homo sapiens
KLELNPHTVENVTKNEDSMTGIEVEKWTQNKKS

SEQ ID NO: 2239 - protein, 26 aa, Homo sapiens
KLEFLPEEIGQMQKLRVLNLSDNRLK

SEQ ID NO: 2240 - protein, 22 aa, Homo sapiens
KLEEYKEAFAVALKANNSMSKK

SEQ ID NO: 2241 - protein, 18 aa, Homo sapiens
KLDNLMLELDGTENKSKF

SEQ ID NO: 2242 - protein, 18 aa, Homo sapiens
KLDKLLKLRELNLSYNKI

SEQ ID NO: 2243 - protein, 21 aa, Homo sapiens
KLASNGTPMGTFAPLWEVFRV

SEQ ID NO: 2244 - protein, 17 aa, Homo sapiens
KLALRNNSASTTQHLRL

SEQ ID NO: 2245 - protein, 25 aa, Homo sapiens
KLAKIRDNLAISLDNQSSPSPPVLI

SEQ ID NO: 2246 - protein, 18 aa, Homo sapiens
KKYLWENETVGAQDDPLA

SEQ ID NO: 2247 - protein, 23 aa, Homo sapiens
KKWRVENQENVSNLVIEDTELKQ

SEQ ID NO: 2248 - protein, 28 aa, Homo sapiens
KKVTCPPTVTVKDEQSGGGNVSSTLLKQ

SEQ ID NO: 2249 - protein, 14 aa, Homo sapiens
KKVLAPRVNLTFRK

SEQ ID NO: 2250 - protein, 28 aa, Homo sapiens
KKVIFSEEITNLSQMTLNVQGPSCILKK

SEQ ID NO: 2251 - protein, 16 aa, Homo sapiens
KKSNQLENHTIVGTRS

SEQ ID NO: 2252 - protein, 20 aa, Homo sapiens
KKSFACSSCNYTFAKKEQFD

SEQ ID NO: 2253 - protein, 32 aa, Homo sapiens
KKRQEENSQNSSEKVMFQSTHILPDEEKMVKE

SEQ ID NO: 2254 - protein, 21 aa, Homo sapiens
KKRNRSSSVSSSAASSPERKK

SEQ ID NO: 2255 - protein, 26 aa, Homo sapiens
KKQPFSSASSQNGSLSPHYLSSVIKQ

SEQ ID NO: 2256 - protein, 36 aa, Homo sapiens
KKPYVSLAQQMAPPSPSNSTPNSSSGSNGNDQLSKT

SEQ ID NO: 2257 - protein, 14 aa, Homo sapiens
KKPKGINSNSTANL

SEQ ID NO: 2258 - protein, 18 aa, Homo sapiens
KKNTFNFTLISWHSGLKD

SEQ ID NO: 2259 - protein, 24 aa, Homo sapiens
KKNPMVETLGTVLQLKQPLNTTRI

SEQ ID NO: 2260 - protein, 28 aa, Homo sapiens
KKNATMLYTASQAFLRHPDVAATRANRD

SEQ ID NO: 2261 - protein, 17 aa, Homo sapiens
KKMNMMNRSYNVTLKRQ

SEQ ID NO: 2262 - protein, 17 aa, Homo sapiens
KKMLYRDFNMTGWAYKT

SEQ ID NO: 2263 - protein, 13 aa, Homo sapiens
KKLSNFSFLTHRQ

SEQ ID NO: 2264 - protein, 19 aa, Homo sapiens
KKLCGENDRLNHTYSQLLK

SEQ ID NO: 2265 - protein, 18 aa, Homo sapiens
KKLAEILVNTSSENWIRN

SEQ ID NO: 2266 - protein, 35 aa, Homo sapiens
KKKPTPIQLNPAPDGSAVNGTSSAETNLEALQKKL

SEQ ID NO: 2267 - protein, 26 aa, Homo sapiens
KKKPSMPNVSNDLSQKLYATMEKHKE

SEQ ID NO: 2268 - protein, 19 aa, Homo sapiens
KKKKALSSMGANYSSYLAK

SEQ ID NO: 2269 - protein, 20 aa, Homo sapiens
KKKDSLHGSTGAVNATRPTL

SEQ ID NO: 2270 - protein, 17 aa, Homo sapiens
KKINLNHLLNFTFEPRG

SEQ ID NO: 2271 - protein, 19 aa, Homo sapiens
KKHHHHAVGLNLSHVRKRC

SEQ ID NO: 2272 - protein, 13 aa, Homo sapiens
KKHAYCSNLSFRL

SEQ ID NO: 2273 - protein, 22 aa, Homo sapiens
KKEYNVNDDSMKLGGNNTSEKA

SEQ ID NO: 2274 - protein, 18 aa, Homo sapiens
KKEWNDSTSVQNPTRLRE

SEQ ID NO: 2275 - protein, 15 aa, Homo sapiens
KKEDYNETAPMLEQV

SEQ ID NO: 2276 - protein, 36 aa, Homo sapiens
KKAVSPLLLTTTNSSEGLSMGNYMGLINRIAQKKRL

SEQ ID NO: 2277 - protein, 17 aa, Homo sapiens
KITKNFSEVGFPDILKA

SEQ ID NO: 2278 - protein, 19 aa, Homo sapiens
KISNVALDSMHWQNDSVQI

SEQ ID NO: 2279 - protein, 22 aa, Homo sapiens
KISLKIQNCRNVTSLPCLSLRK

SEQ ID NO: 2280 - protein, 24 aa, Homo sapiens
KINLLNLTFCLFVWLTFNLPFLKN

SEQ ID NO: 2281 - protein, 15 aa, Homo sapiens
KIMCLDEKIDNFTRQ

SEQ ID NO: 2282 - protein, 19 aa, Homo sapiens
KILQPNTTDEFVIPLDPRW

SEQ ID NO: 2283 - protein, 20 aa, Homo sapiens
KILHNVSEDPSFVISQHIRK

SEQ ID NO: 2284 - protein, 22 aa, Homo sapiens
KIKNMNSTLTFVTLSGELRARR

SEQ ID NO: 2285 - protein, 30 aa, Homo sapiens
KIKKHFNTGPKPNSTAAGVSVIATTALDKE

SEQ ID NO: 2286 - protein, 37 aa, Homo sapiens
KIGLNIGQAIVNTSGTVPAIPSINILQNVTPKGEDKS

SEQ ID NO: 2287 - protein, 20 aa, Homo sapiens
KIGHPHGLQVTYLKDNSTRN

SEQ ID NO: 2288 - protein, 28 aa, Homo sapiens
KIEEEEEEENGDSVVQNNNTSQMSHKKV

SEQ ID NO: 2289 - protein, 37 aa, Homo sapiens
KIDRLDGTPQEPLCGFSKQMVEIVHKHNISLAVLMSL

SEQ ID NO: 2290 - protein, 30 aa, Homo sapiens
KHVTMDQVGTFAGLLIGLAQLNCSELKLKR

SEQ ID NO: 2291 - protein, 19 aa, Homo sapiens
KHVEVNGSKTAGANTTDKE

SEQ ID NO: 2292 - protein, 29 aa, Homo sapiens
KHTVSGILSMANAGPNANSSQFFICAAKT

SEQ ID NO: 2293 - protein, 22 aa, Homo sapiens
KHTGTIPGAQGLMNSSLLHQDI

SEQ ID NO: 2294 - protein, 29 aa, Homo sapiens
KHTGPGILSMANAGPNMNGSQFFICTAKT

SEQ ID NO: 2295 - protein, 28 aa, Homo sapiens
KHTGPGILSMANAGPNANGSQFFMCPAK

SEQ ID NO: 2296 - protein, 29 aa, Homo sapiens
KHTGPGILSMANAGPITNSSQFFICTAKT

SEQ ID NO: 2297 - protein, 29 aa, Homo sapiens
KHTGPGILSMANAGLNTNGSQFFICTAKT

SEQ ID NO: 2298 - protein, 23 aa, Homo sapiens
KHSSGTSNTSTANRSTHNELEKN

SEQ ID NO: 2299 - protein, 16 aa, Homo sapiens
KHSSGSSNTSTANRRA

SEQ ID NO: 2300 - protein, 17 aa, Homo sapiens
KHSRIVELLNETEKYKL

SEQ ID NO: 2301 - protein, 28 aa, Homo sapiens
KHSKALNTLSSPGQSSFSHGTRNNSAKE

SEQ ID NO: 2302 - protein, 29 aa, Homo sapiens
KHNSSSSALLNSPTVTTSSCAGASEKKKF

SEQ ID NO: 2303 - protein, 15 aa, Homo sapiens
KHMPPPNMTTNERRV

SEQ ID NO: 2304 - protein, 24 aa, Homo sapiens
KHLSDYCIGPNASINVIMQPLEKM

SEQ ID NO: 2305 - protein, 8 aa, Homo sapiens
KHLKNNSS

SEQ ID NO: 2306 - protein, 32 aa, Homo sapiens
KHLEGISDEDIINITLPTGVPILLELDENLRA

SEQ ID NO: 2307 - protein, 27 aa, Homo sapiens
KHKGLIEIPSLSEENEINDTEVNVSKK

SEQ ID NO: 2308 - protein, 25 aa, Homo sapiens
KHGNLRNVLILMDQSAWDSNATLRQ

SEQ ID NO: 2309 - protein, 38 aa, Homo sapiens
KHGIEAAFLAMLGLQGNKQVLDLEAGFGAFYANYSPKV

SEQ ID NO: 2310 - protein, 15 aa, Homo sapiens
KGVSFNESAADNLKL

SEQ ID NO: 2311 - protein, 26 aa, Homo sapiens
KGTQTYSVLEGDPSENYSKYLLSLKE

SEQ ID NO: 2312 - protein, 23 aa, Homo sapiens
KGTKNFSLLSFGEEAEEEEEEVN

SEQ ID NO: 2313 - protein, 29 aa, Homo sapiens
KGSCFHSIIPGFMCQGGDFTLLNGTGGKS

SEQ ID NO: 2314 - protein, 28 aa, Homo sapiens
KGRIGVVISSYMHFTNVSASADQALDRF

SEQ ID NO: 2315 - protein, 18 aa, Homo sapiens
KGRGLNAMANETPDFMRA

SEQ ID NO: 2316 - protein, 28 aa, Homo sapiens
KGRANHSAFLFGFGDGGGGPTQTMLDRL

SEQ ID NO: 2317 - protein, 19 aa, Homo sapiens
KGQSVSSPPNDCNISPARV

SEQ ID NO: 2318 - protein, 27 aa, Homo sapiens
KGQNLNNYSFSTNGFSGSGGSGSHGSS

SEQ ID NO: 2319 - protein, 16 aa, Homo sapiens
KGNSKAGNGTLENQKG

SEQ ID NO: 2320 - protein, 22 aa, Homo sapiens
KGNCEDYLMISCNNSDGIENRN

SEQ ID NO: 2321 - protein, 20 aa, Homo sapiens
KGNMTLSPENGYWVVIMMKE

SEQ ID NO: 2322 - protein, 27 aa, Homo sapiens
KGLSNHFQVNHTVALSTIGESNYHFGV

SEQ ID NO: 2323 - protein, 26 aa, Homo sapiens
KGLRGPGSIGSEPDFWNGSGSSRVKG

SEQ ID NO: 2324 - protein, 21 aa, Homo sapiens
KGLFKGGDMSKNVSQSQMAKL

SEQ ID NO: 2325 - protein, 28 aa, Homo sapiens
KGLAQPPQAYFNGSLPPQTVGHQAHGRE

SEQ ID NO: 2326 - protein, 22 aa, Homo sapiens
KGKNFNDNHSFLTNDELAVLPV

SEQ ID NO: 2327 - protein, 17 aa, Homo sapiens
KGKNLSLSLDALFMGKS

SEQ ID NO: 2328 - protein, 25 aa, Homo sapiens
KGIVVLIDPLAANGTTDMHTSVPRV

SEQ ID NO: 2329 - protein, 20 aa, Homo sapiens
KGIDIIIEMLANVNLSKDLS

SEQ ID NO: 2330 - protein, 12 aa, Homo sapiens
KGFSQLSNLTKH

SEQ ID NO: 2331 - protein, 25 aa, Homo sapiens
KGETWATPNCSEATCEGNNVISLSP

SEQ ID NO: 2332 - protein, 27 aa, Homo sapiens
KGEISEKAKLENSTQAEEGFDVPDCKK

SEQ ID NO: 2333 - protein, 24 aa, Homo sapiens
KGEERSSCISGNNFSWSLQWNGKE

SEQ ID NO: 2334 - protein, 24 aa, Homo sapiens
KGDFESQNSSLESSISQVINLEKN

SEQ ID NO: 2335 - protein, 27 aa, Homo sapiens
KGASSAYLENSKGAPNNSCSEIKMNKK

SEQ ID NO: 2336 - protein, 20 aa, Homo sapiens
KGAMQTGLNTTQNIATGTKD

SEQ ID NO: 2337 - protein, 20 aa, Homo sapiens
KGAEIEVDENGTLDLSMKKN

SEQ ID NO: 2338 - protein, 23 aa, Homo sapiens
KFYTEDGNWDLVGNNTPIFFIRD

SEQ ID NO: 2339 - protein, 18 aa, Homo sapiens
KFSPSDTDENATNTQSTT

SEQ ID NO: 2340 - protein, 26 aa, Homo sapiens
KFRMVYNLTYNTMATHEDVDTTMLRR

SEQ ID NO: 2341 - protein, 29 aa, Homo sapiens
KFQDLLSEENESTALPQVLAQPSTSRKRP

SEQ ID NO: 2342 - protein, 21 aa, Homo sapiens
KFNGGGHINHSIFWTNLSPNG

SEQ ID NO: 2343 - protein, 27 aa, Homo sapiens
KFNLTEDMYAQDSIELLTTSGIQFKKH

SEQ ID NO: 2344 - protein, 15 aa, Homo sapiens
KFNKSLGHGLINKKR

SEQ ID NO: 2345 - protein, 32 aa, Homo sapiens
KFLVHDINELEVLMMCNKSYCAKIAHNVSSKN

SEQ ID NO: 2346 - protein, 21 aa, Homo sapiens
KFIKNQHCTNISELSNTSEND

SEQ ID NO: 2347 - protein, 24 aa, Homo sapiens
KFHHLIPAHTFTNISTKNPQGSKS

SEQ ID NO: 2348 - protein, 21 aa, Homo sapiens
KFEENTSNSQWHVSLSVSFKK

SEQ ID NO: 2349 - protein, 22 aa, Homo sapiens
KFEALKEENMDLNNMNQSLTLE

SEQ ID NO: 2350 - protein, 19 aa, Homo sapiens
KFCDNSSAIQGKEVRFLRP

SEQ ID NO: 2351 - protein, 18 aa, Homo sapiens
KEYPNLSTSLDDAFLLRF

SEQ ID NO: 2352 - protein, 26 aa, Homo sapiens
KEVTQATQPEAIPQGTNITEEKPGRK

SEQ ID NO: 2353 - protein, 26 aa, Homo sapiens
KEVNSCTTGSSNSTIIGSQGSETPKE

SEQ ID NO: 2354 - protein, 35 aa, Homo sapiens
KEVDIEGTTVIEVGLDPSNNMTLAVDCVGILKLRN

SEQ ID NO: 2355 - protein, 17 aa, Homo sapiens
KETPPNGNLSPAPRLRR

SEQ ID NO: 2356 - protein, 18 aa, Homo sapiens
KERVENYSNVSIHLKNPE

SEQ ID NO: 2357 - protein, 22 aa, Homo sapiens
KERIINYANSSDPTSGVSKRKS

SEQ ID NO: 2358 - protein, 29 aa, Homo sapiens
KEQDYLCHVYVRNDSLAGVVIADNEYPSR

SEQ ID NO: 2359 - protein, 23 aa, Homo sapiens
KEPVGCVNNISFLASLAGSTSRN

SEQ ID NO: 2360 - protein, 19 aa, Homo sapiens
KENNLTEDNPNLSMAQRRH

SEQ ID NO: 2361 - protein, 19 aa, Homo sapiens
KENMNLSEAQVQALALSRQ

SEQ ID NO: 2362 - protein, 28 aa, Homo sapiens
KENIPGDFLCISLVNSSVQLRYNLGDRT

SEQ ID NO: 2363 - protein, 17 aa, Homo sapiens
KENSSVEAKDSGLESKK

SEQ ID NO: 2364 - protein, 15 aa, Homo sapiens
KENQSIRAFNSEHKI

SEQ ID NO: 2365 - protein, 15 aa, Homo sapiens
KENNTGYINASHIKV

SEQ ID NO: 2366 - protein, 28 aa, Homo sapiens
KEMNKSDLNTNNLLFKPPVESHIQKNKK

SEQ ID NO: 2367 - protein, 18 aa, Homo sapiens
KELVQVQTLMDNMTLERE

SEQ ID NO: 2368 - protein, 24 aa, Homo sapiens
KELVNAGCNLSTLNITLLSWSKKR

SEQ ID NO: 2369 - protein, 16 aa, Homo sapiens
KELQGPGYTSNSSLKP

SEQ ID NO: 2370 - protein, 36 aa, Homo sapiens
KELLLTLDDSFNDVGSDNSNQSSPRLRLPSPSMDKI

SEQ ID NO: 2371 - protein, 26 aa, Homo sapiens
KELFGDDSEDEGASHHSGSDNHSERS

SEQ ID NO: 2372 - protein, 20 aa, Homo sapiens
KEKIPSPETLQPDTHNISKS

SEQ ID NO: 2373 - protein, 22 aa, Homo sapiens
KEIYHQNVQNLTHLQVVEVLKQ

SEQ ID NO: 2374 - protein, 19 aa, Homo sapiens
KEIQHPNVITLHEVYENKT

SEQ ID NO: 2375 - protein, 24 aa, Homo sapiens
KEIQDKHLTQTVFFSNKTLITERE

SEQ ID NO: 2376 - protein, 36 aa, Homo sapiens
KEIKGIQIGREEVNLSLLADDMILYLENPVVSAQRP

SEQ ID NO: 2377 - protein, 23 aa, Homo sapiens
KEHSEMSNNVSDPKGPPAKIARL

SEQ ID NO: 2378 - protein, 25 aa, Homo sapiens
KEHKAEKVPAVANYIMKIHNFTSKC

SEQ ID NO: 2379 - protein, 24 aa, Homo sapiens
KEGKENTRITNLTVNTGLDCSEKT

SEQ ID NO: 2380 - protein, 30 aa, Homo sapiens
KEGGVFTFGAGGYGQLGHNSTSHEINPRKV

SEQ ID NO: 2381 - protein, 26 aa, Homo sapiens
KEFYLTPNSPAEMLHNVTLALELLKD

SEQ ID NO: 2382 - protein, 21 aa, Homo sapiens
KEEQHANTSANYDVELLHHKD

SEQ ID NO: 2383 - protein, 20 aa, Homo sapiens
KEEENKSSSEGGDAGNDTRN

SEQ ID NO: 2384 - protein, 22 aa, Homo sapiens
KEEEELAYDWSDNNSNISAKRN

SEQ ID NO: 2385 - protein, 27 aa, Homo sapiens
KEEDFMQLSPQELISVISNDSLNVEKE

SEQ ID NO: 2386 - protein, 23 aa, Homo sapiens
KEECRLLNAPPVPPRGGNGSGRL

SEQ ID NO: 2387 - protein, 30 aa, Homo sapiens
KEDSGKIKLLLHWMPEDILPDVWVNESERH

SEQ ID NO: 2388 - protein, 21 aa, Homo sapiens
KEDGKTLYANTINGSGLAIDR

SEQ ID NO: 2389 - protein, 18 aa, Homo sapiens
KECCNAFNQSSALTNHKR

SEQ ID NO: 2390 - protein, 26 aa, Homo sapiens
KEATNTTSEPSAPSQDLLDLSPSPRM

SEQ ID NO: 2391 - protein, 20 aa, Homo sapiens
KEANINSTSISDDNSASLRC

SEQ ID NO: 2392 - protein, 31 aa, Homo sapiens
KEANPTPLTPGASSLSQLGAYLDSDDSNGSN

SEQ ID NO: 2393 - protein, 19 aa, Homo sapiens
KEALRAGLNCSTENMPIKI

SEQ ID NO: 2394 - protein, 36 aa, Homo sapiens
KEALGSVVAHSTFSAMKANTMSNYTLLPPSLLDHRR

SEQ ID NO: 2395 - protein, 17 aa, Homo sapiens
KEAFAAALNANNSMSKK

SEQ ID NO: 2396 - protein, 42 aa, Homo sapiens
KEAASQRPLSSSASNRLSVSSLLAAGAPMSSSASVPNLSSRE

SEQ ID NO: 2397 - protein, 26 aa, Homo sapiens
KDVTALENATVAFEVSVSHDTVPVKW

SEQ ID NO: 2398 - protein, 36 aa, Homo sapiens
KDVISNTSDVIGTCEAADVAQKVDEDSAEDTQSNDG

SEQ ID NO: 2399 - protein, 25 aa, Homo sapiens
KDTNVQVLMVLGAGRGPLVNASLRA

SEQ ID NO: 2400 - protein, 10 aa, Homo sapiens
KDSNASGTTL

SEQ ID NO: 2401 - protein, 30 aa, Homo sapiens
KDSESMSFSDLENWAVANSSEPQLEDAKRE

SEQ ID NO: 2402 - protein, 26 aa, Homo sapiens
KDRGVTRFQENASEGKAPAEDVFKKP

SEQ ID NO: 2403 - protein, 24 aa, Homo sapiens
KDPRNLLANQTLVYSQDLGEMTKL

SEQ ID NO: 2404 - protein, 28 aa, Homo sapiens
KDPPSEANSIQSANATTKTSETNHTSRP

SEQ ID NO: 2405 - protein, 22 aa, Homo sapiens
KDPKEKQIEPAMTSQNSKRNTS

SEQ ID NO: 2406 - protein, 29 aa, Homo sapiens
KDNKYTLNQTSAVFDSIPEVVHYYSNEKL

SEQ ID NO: 2407 - protein, 21 aa, Homo sapiens
KDNSSLNPLDRLISEDKKEKM

SEQ ID NO: 2408 - protein, 20 aa, Homo sapiens
KDNKSPLHLVQMPPVIVETA

SEQ ID NO: 2409 - protein, 23 aa, Homo sapiens
KDMNLTLEPEIMPAATDNRYIRA

SEQ ID NO: 2410 - protein, 16 aa, Homo sapiens
KDKLDETNNTLRCLKL

SEQ ID NO: 2411 - protein, 37 aa, Homo sapiens
KDISSSEMTNPSDTLNIETLLNGSVKRVSENNGNGKN

SEQ ID NO: 2412 - protein, 31 aa, Homo sapiens
KDIKKKNINLQPMWQLLPVEQDTSNVTEMKV

SEQ ID NO: 2413 - protein, 32 aa, Homo sapiens
KDHPVSCCLGLLLESLVPFIVNDNITNNFFRF

SEQ ID NO: 2414 - protein, 23 aa, Homo sapiens
KDGNASGTMLLEALDCILPPTRP

SEQ ID NO: 2415 - protein, 14 aa, Homo sapiens
KDFLNVTTEANILP

SEQ ID NO: 2416 - protein, 18 aa, Homo sapiens
KDENSINGTPDITVEIRE

SEQ ID NO: 2417 - protein, 22 aa, Homo sapiens
KDEHAQSNEIVVNDSGSDNVKK

SEQ ID NO: 2418 - protein, 12 aa, Homo sapiens
KDAAHMLQANKT

SEQ ID NO: 2419 - protein, 26 aa, Homo sapiens
KCVAENNSGAVESVSDLTVEPVTYRE

SEQ ID NO: 2420 - protein, 21 aa, Homo sapiens
KCSVALLNETESVLSYLDKED

SEQ ID NO: 2421 - protein, 36 aa, Homo sapiens
KCSENATMTLPGIHPPTLNQIMDWICLLLDANFTVV

SEQ ID NO: 2422 - protein, 27 aa, Homo sapiens
KCRLDVNTELNSSIEDLLEASMPSSDT

SEQ ID NO: 2423 - protein, 26 aa, Homo sapiens
KCPYSQEAMQRALIGRCQNVSALPKG

SEQ ID NO: 2424 - protein, 21 aa, Homo sapiens
KCPECDQNFSDHSYLVLHQKI

SEQ ID NO: 2425 - protein, 23 aa, Homo sapiens
KCNLCLAMNLQGRHKCIENVSRQ

SEQ ID NO: 2426 - protein, 14 aa, Homo sapiens
KCLKNEYVENRTKS

SEQ ID NO: 2427 - protein, 14 aa, Homo sapiens
KCGSAYEPENQSKD

SEQ ID NO: 2428 - protein, 30 aa, Homo sapiens
KCESDNTTNGCGLESPGNTVTPVNVNEVKP

SEQ ID NO: 2429 - protein, 31 aa, Homo sapiens
KCEQSYGTNSSDESGSFSEADSESCPVQDRG

SEQ ID NO: 2430 - protein, 20 aa, Homo sapiens
KCEFLANLHITALLNVSRRT

SEQ ID NO: 2431 - protein, 15 aa, Homo sapiens
KAYTDFQNNHSSPKP

SEQ ID NO: 2432 - protein, 22 aa, Homo sapiens
KAYIHAQAENCSHTAELVSWKR

SEQ ID NO: 2433 - protein, 21 aa, Homo sapiens
KAYAGRKQHYIAGNCSSNGRG

SEQ ID NO: 2434 - protein, 37 aa, Homo sapiens
KAVQEDEVGVPGSNSADLLRWTTATTMKVLSNTTTTT

SEQ ID NO: 2435 - protein, 22 aa, Homo sapiens
KATMGLLQNKENNNTKDSPSRQ

SEQ ID NO: 2436 - protein, 20 aa, Homo sapiens
KATENGLVNGENSIPNGTRS

SEQ ID NO: 2437 - protein, 27 aa, Homo sapiens
KASPSENNAGGGSPSSGSGGNPTNTSG

SEQ ID NO: 2438 - protein, 23 aa, Homo sapiens
KASASPGENDSGTGGEEPQRDKR

SEQ ID NO: 2439 - protein, 34 aa, Homo sapiens
KARVETQNHWFTYNETMTVESVTQAVSNLALQFG

SEQ ID NO: 2440 - protein, 28 aa, Homo sapiens
KARPNFSNQADHPVLAGTGFWPALPVRG

SEQ ID NO: 2441 - protein, 23 aa, Homo sapiens
KARKSIAQSGVNMCNQNSSPHKN

SEQ ID NO: 2442 - protein, 24 aa, Homo sapiens
KAQLIGPLVFGGMNLTRDELGWKL

SEQ ID NO: 2443 - protein, 17 aa, Homo sapiens
KAQGNITAEVMMGILRD

SEQ ID NO: 2444 - protein, 30 aa, Homo sapiens
KAQAEANATAISNLLPFMEYEVHTQLMNKL

SEQ ID NO: 2445 - protein, 21 aa, Homo sapiens
KAPLSTVSANTTNMDEVPRPQ

SEQ ID NO: 2446 - protein, 17 aa, Homo sapiens
KAPLNETGEVVNEKAKT

SEQ ID NO: 2447 - protein, 27 aa, Homo sapiens
KANQENQALSKKLNDTHNELNDIKQKV

SEQ ID NO: 2448 - protein, 17 aa, Homo sapiens
KANMDNGNATDINDNRS

SEQ ID NO: 2449 - protein, 31 aa, Homo sapiens
KANGLLDFDIFYNVTGCLRNMSSAGADGRKA

SEQ ID NO: 2450 - protein, 24 aa, Homo sapiens
KANLTDMESGSSNAMNMNVQHERE

SEQ ID NO: 2451 - protein, 17 aa, Homo sapiens
KANATGGGGHVQMVQRA

SEQ ID NO: 2452 - protein, 15 aa, Homo sapiens
KANASEKLGVLTSRE

SEQ ID NO: 2453 - protein, 19 aa, Homo sapiens
KAMILLNSSMYPLVTATQD

SEQ ID NO: 2454 - protein, 28 aa, Homo sapiens
KAMEEFFSDSGELVQIMMATANENLSAK

SEQ ID NO: 2455 - protein, 21 aa, Homo sapiens
KALTNGSFSPSGNNGSVNWRT

SEQ ID NO: 2456 - protein, 37 aa, Homo sapiens
KALRTDYNASVSVPDSSGPEHILSISAGIDTIGEILK

SEQ ID NO: 2457 - protein, 26 aa, Homo sapiens
KALQLNELTMDDDTAVLVIDNGSGMC

SEQ ID NO: 2458 - protein, 24 aa, Homo sapiens
KALFLEHEGYFGAVGALLGLPNFS

SEQ ID NO: 2459 - protein, 26 aa, Homo sapiens
KALDPSQPVTFVTNSTYAADKGVNKE

SEQ ID NO: 2460 - protein, 29 aa, Homo sapiens
KALDFSLDGNINLTELTLALEYELLVTKN

SEQ ID NO: 2461 - protein, 32 aa, Homo sapiens
KALATSMLTGEAGSLPSTHMVVAGMANSTPQQ

SEQ ID NO: 2462 - protein, 20 aa, Homo sapiens
KAKEVSENSAGHNSSWFSRR

SEQ ID NO: 2463 - protein, 16 aa, Homo sapiens
KAKAVALDSDNISLKS

SEQ ID NO: 2464 - protein, 25 aa, Homo sapiens
KAKAGFSEWLAVDGLGSPSNNSKED

SEQ ID NO: 2465 - protein, 25 aa, Homo sapiens
KAINNSFAPEKLQELAFQTIQEIRH

SEQ ID NO: 2466 - protein, 12 aa, Homo sapiens
KAIINSTVTPNM

SEQ ID NO: 2467 - protein, 16 aa, Homo sapiens
KAIESGTEWNLSLLKL

SEQ ID NO: 2468 - protein, 26 aa, Homo sapiens
KAIELLMETAEVEQNGGLFIMNGSRR

SEQ ID NO: 2469 - protein, 12 aa, Homo sapiens
KAGVVNGTGAPG

SEQ ID NO: 2470 - protein, 34 aa, Homo sapiens
KAGMNIARLNFSHGSHEYHAESIANVREAVESFA

SEQ ID NO: 2471 - protein, 22 aa, Homo sapiens
KAGKPVVAAPGAGNLTKFEPRA

SEQ ID NO: 2472 - protein, 27 aa, Homo sapiens
KAGHQVMVFVHARNATVRTAMSLIERA

SEQ ID NO: 2473 - protein, 30 aa, Homo sapiens
KAGGVGLNLSAASRVFLMDPAWNPAAEDQC

SEQ ID NO: 2474 - protein, 26 aa, Homo sapiens
KAFSNSSTLANHKITHTEEKPYKCKE

SEQ ID NO: 2475 - protein, 22 aa, Homo sapiens
KAENSAAVQINLSPTMLENVKK

SEQ ID NO: 2476 - protein, 28 aa, Homo sapiens
KAENDENGQAENFSMDPQLERQVETIRN

SEQ ID NO: 2477 - protein, 22 aa, Homo sapiens
KAEDCEISFLPFNSSDDVQERR

SEQ ID NO: 2478 - protein, 33 aa, Homo sapiens
KADNHTAHRIADQTALRVPSQAESSIFSQATNG

SEQ ID NO: 2479 - protein, 26 aa, Homo sapiens
KADILLDCLLDEDPENQTLRKDYEKT

SEQ ID NO: 2480 - protein, 33 aa, Homo sapiens
KADETVTEMNFSNEYNKSELMLQENQMIADGKE

SEQ ID NO: 2481 - protein, 15 aa, Homo sapiens
KAAHNNSENIPLHKS

SEQ ID NO: 2482 - protein, 20 aa, Homo sapiens
KAAAEKLSSLENSSNKNEKE

SEQ ID NO: 2483 - protein, 12 aa, Homo sapiens
IWEKANLTLPRG

SEQ ID NO: 2484 - protein, 17 aa, Homo sapiens
IQIRNVSQLPATWRMKE

SEQ ID NO: 2485 - protein, 23 aa, Homo sapiens
IQAAASTPTNATAASDANTGDRG

SEQ ID NO: 2486 - protein, 15 aa, Homo sapiens
IFPLLYVELNDSAKQ

SEQ ID NO: 2487 - protein, 18 aa, Homo sapiens
IEVDENGTLDLSMHKHRK

SEQ ID NO: 2488 - protein, 15 aa, Homo sapiens
HSDHDNSTSLNGGKR

SEQ ID NO: 2489 - protein, 32 aa, Homo sapiens
HRVLHNSLGNISMLPCSSFTPNWPVQNPDSRK

SEQ ID NO: 2490 - protein, 22 aa, Homo sapiens
HLRQMGVTEWSVNGSPIDTLRE

SEQ ID NO: 2491 - protein, 29 aa, Homo sapiens
HGRYIASIMENGSLNIYSVQALTQEINKE

SEQ ID NO: 2492 - protein, 34 aa, Homo sapiens
GVSLSSYLEGLMASTISSNASKGREAMEWVIHKL

SEQ ID NO: 2493 - protein, 14 aa, Homo sapiens
GVLTLANNVTPAKD

SEQ ID NO: 2494 - protein, 37 aa, Homo sapiens
GNYNNSSNFGTMKVGNFGGRNSGSYGVGGQYFAKPRH

SEQ ID NO: 2495 - protein, 21 aa, Homo sapiens
GLNTTGVPASLPVEFTIDAKD

SEQ ID NO: 2496 - protein, 26 aa, Homo sapiens
GKGFICEFCQNTTVIFPFQTATCRRC

SEQ ID NO: 2497 - protein, 23 aa, Homo sapiens
GIKVKNHSGGGMSLTHNKNFRKL

SEQ ID NO: 2498 - protein, 25 aa, Homo sapiens
GHKQISSSSTGCLSSPNATVQSPKH

SEQ ID NO: 2499 - protein, 29 aa, Homo sapiens
GFDEDMVIQALQKTNNRSIEAAIEFISKM

SEQ ID NO: 2500 - protein, 9 aa, Homo sapiens
GENGTLSRE

SEQ ID NO: 2501 - protein, 18 aa, Homo sapiens
GECGKCFNNNSNLSKHKK

SEQ ID NO: 2502 - protein, 21 aa, Homo sapiens
GDYEPIDATGFINISSLRLKE

SEQ ID NO: 2503 - protein, 24 aa, Homo sapiens
GDSSHCSNASTHSNQEAGPSNKRT

SEQ ID NO: 2504 - protein, 24 aa, Homo sapiens
GCGGGGSYSASSSSAALPVNKSKM

SEQ ID NO: 2505 - protein, 9 aa, Homo sapiens
FTVFTNNTH

SEQ ID NO: 2506 - protein, 18 aa, Homo sapiens
FTQNLLLEYTNQTTQARP

SEQ ID NO: 2507 - protein, 17 aa, Homo sapiens
FSYATAAQNNTVTDPKN

SEQ ID NO: 2508 - protein, 21 aa, Homo sapiens
FNEHMTNSTMSPGTVGQSLKS

SEQ ID NO: 2509 - protein, 21 aa, Homo sapiens
FAPFLNNSPQQNPAAQIPARQ

SEQ ID NO: 2510 - protein, 17 aa, Homo sapiens
EVFENLDGDLGNSTEKQ

SEQ ID NO: 2511 - protein, 27 aa, Homo sapiens
ESFVEMSSSSFMGISNMTQLESSTSKM

SEQ ID NO: 2512 - protein, 15 aa, Homo sapiens
ENNVSKGDNGELAKE

SEQ ID NO: 2513 - protein, 13 aa, Homo sapiens
ENDSEDQDVAMKS

SEQ ID NO: 2514 - protein, 25 aa, Homo sapiens
EILGFNSKGEVHGINGTQWGQTLRM

SEQ ID NO: 2515 - protein, 20 aa, Homo sapiens
EIGDENATLDGTDVLFTGRE

SEQ ID NO: 2516 - protein, 23 aa, Homo sapiens
EGSYTNASTNSTSVTSSTATVVS

SEQ ID NO: 2517 - protein, 29 aa, Homo sapiens
EGEKGAEAANVTGPDGVPVEGSRYAADRR

SEQ ID NO: 2518 - protein, 25 aa, Homo sapiens
EGEKDPWGVSMMNTSFAGGQIHQDI

SEQ ID NO: 2519 - protein, 26 aa, Homo sapiens
EFKNNFLNIDPITMAYSLNSSAQERL

SEQ ID NO: 2520 - protein, 26 aa, Homo sapiens
EENETTTTSAFTIQEYFAKRMAALKN

SEQ ID NO: 2521 - protein, 19 aa, Homo sapiens
EEADVDMEPNVSVYSGLKE

SEQ ID NO: 2522 - protein, 28 aa, Homo sapiens
EAPMFTQPLVNTYAIAGYNATLNCSVRG

SEQ ID NO: 2523 - protein, 19 aa, Homo sapiens
DSFSQASNVTSQLPGFPKY

SEQ ID NO: 2524 - protein, 20 aa, Homo sapiens
DSDMDPNSSGEGVNSVSSSI

SEQ ID NO: 2525 - protein, 10 aa, Homo sapiens
DQYGKNFSQS

SEQ ID NO: 2526 - protein, 25 aa, Homo sapiens
DPLTFNFISSLKAICTEIANCSLKV

SEQ ID NO: 2527 - protein, 20 aa, Homo sapiens
DKMIENHNISTPFSCQFCKE

SEQ ID NO: 2528 - protein, 14 aa, Homo sapiens
DKAPVNGTEQTQKT

SEQ ID NO: 2529 - protein, 21 aa, Homo sapiens
DDSTEAHEGDPTNGSGEQSKT

SEQ ID NO: 2530 - protein, 22 aa, Homo sapiens
DDSGATLLSANQTLRRLHNRRT

SEQ ID NO: 2531 - protein, 34 aa, Homo sapiens
DDRGSYTASIYQNYMGNSFSGYSHSPPLLQVNRS

SEQ ID NO: 2532 - protein, 18 aa, Homo sapiens
DDNSTFNSTQSHMDWGKV

SEQ ID NO: 2533 - protein, 41 aa, Homo sapiens
DDDLIISQDTDIIQDMVAGENTSEAGSEDEGEVSLPEQPKV

SEQ ID NO: 2534 - protein, 17 aa, Homo sapiens
DAKAQLALSSSANQSKE

SEQ ID NO: 2535 - protein, 29 aa, Homo sapiens
CYPDNPANRSLVLPWSFPLEWAPQNLTRW

SEQ ID NO: 2536 - protein, 17 aa, Homo sapiens
CYEYFHQDDHNNLTDKH

SEQ ID NO: 2537 - protein, 28 aa, Homo sapiens
CQAEAAAAANGTGGEEDDGPAAELLEKL

SEQ ID NO: 2538 - protein, 27 aa, Homo sapiens
CLQKGSLTIQQVNDLLDSIASNNSAKR

SEQ ID NO: 2539 - protein, 13 aa, Homo sapiens
CLNLSNTTITNRT

SEQ ID NO: 2540 - protein, 33 aa, Homo sapiens
CLIPNETKTPGVMDHYLVMHQLRCNGVLEGIRI

SEQ ID NO: 2541 - protein, 17 aa, Homo sapiens
CIIQMQGNSTSIINPKN

SEQ ID NO: 2542 - protein, 26 aa, Homo sapiens
CFYNLELGDMSLSDNASMCLMSIIKK

SEQ ID NO: 2543 - protein, 19 aa, Homo sapiens
CFPTLSDFLTEINSTVDKD

SEQ ID NO: 2544 - protein, 35 aa, Homo sapiens
CFENVTSIMFLVALSEYDRVLVESDNENRMEESKA

SEQ ID NO: 2545 - protein, 28 aa, Homo sapiens
CALSLFLMAVNIKTPVVVENITLMCLRI

SEQ ID NO: 2546 - protein, 8 aa, Homo sapiens
AYSNETKV

SEQ ID NO: 2547 - protein, 26 aa, Homo sapiens
AYLMEPLCISSNESSEGCCPPSGTRQ

SEQ ID NO: 2548 - protein, 20 aa, Homo sapiens
AVAAGTPNTSGSIHENPPKA

SEQ ID NO: 2549 - protein, 11 aa, Homo sapiens
ATNETNVNIPQ

SEQ ID NO: 2550 - protein, 23 aa, Homo sapiens
ARTTFNFSIGVLQAECLTSKGRE

SEQ ID NO: 2551 - protein, 15 aa, Homo sapiens
AMIQFAINSTERKRM

SEQ ID NO: 2552 - protein, 21 aa, Homo sapiens
ALLNNSHYYHMAHGTDFASRG

SEQ ID NO: 2553 - protein, 30 aa, Homo sapiens
AKENENSSPVAGAFGVFSTISTAVQSTGKS

SEQ ID NO: 2554 - protein, 14 aa, Homo sapiens
AKEAAGASKALNVT

SEQ ID NO: 2555 - protein, 23 aa, Homo sapiens
AIYFENLQNSSNDLGDHSMKERD

SEQ ID NO: 2556 - protein, 27 aa, Homo sapiens
AHVCNDTNKMTLINPQGAKLNIYKRKV

SEQ ID NO: 2557 - protein, 20 aa, Homo sapiens
AHNMSGPNSSSEWSIEGRRL

SEQ ID NO: 2558 - protein, 23 aa, Homo sapiens
AHAASTEEKEAGVGNGTCAPVRL

SEQ ID NO: 2559 - protein, 27 aa, Homo sapiens
AGQVLENLPPIGVFWDIENCSVPSGRS

SEQ ID NO: 2560 - protein, 14 aa, Homo sapiens
AGFGNNFTTVDNKS

SEQ ID NO: 2561 - protein, 26 aa, Homo sapiens
AEAYLGYPVTNAVITVPAYFNDSQRQ

SEQ ID NO: 2562 - protein, 37 aa, Homo sapiens
ADKASDTSSETVFGKRGHVLGNGSQVTQAANSGCSKA

SEQ ID NO: 2563 - protein, 38 aa, Homo sapiens
AASSIWSPASISPGSAPASVSVPEPLAAPSNTSCMQRS

SEQ ID NO: 2564 - protein, 12 aa, Homo sapiens
AAQNNTVTVPKN

SEQ ID NO: 2565 - protein, 19 aa, Homo sapiens
AAKCIVNNVSAETVQTVRY

SEQ ID NO: 2566 - protein, 26 aa, Homo sapiens
MVYLTSYLLPSLMSNTSLSAKDIKKI

SEQ ID NO: 2567 - protein, 17 aa, Homo sapiens
MVTVTLKDINLSWLDVD

SEQ ID NO: 2568 - protein, 20 aa, Homo sapiens
MVDLLSMSQNISPYKNPMRF

SEQ ID NO: 2569 - protein, 22 aa, Homo sapiens
MTVRNIASICNMGTNASALEKD

SEQ ID NO: 2570 - protein, 18 aa, Homo sapiens
MTGSNMSDALANAVCQRC

SEQ ID NO: 2571 - protein, 25 aa, Homo sapiens
MSRINKYLFSNSDSNFSHFSVSNVS

SEQ ID NO: 2572 - protein, 28 aa, Homo sapiens
MPKPINVRVTTMDAELEFAIQPNTTGKQ

SEQ ID NO: 2573 - protein, 35 aa, Homo sapiens
MNRYTTMRQLGDGTYGSVLMGKSNESGELVAIKRM

SEQ ID NO: 2574 - protein, 34 aa, Homo sapiens
MNQFGPSALINLSNFSSIKPEPASTPPQGSMANS

SEQ ID NO: 2575 - protein, 31 aa, Homo sapiens
MNNPSETSKPSMESGDGNTGTQTNGLDFQKQ

SEQ ID NO: 2576 - protein, 22 aa, Homo sapiens
MNISGSSCGSPNSADTSSDFKD

SEQ ID NO: 2577 - protein, 33 aa, Homo sapiens
MMQESATETISNSSMNQNGMSTLSSQLDAGSRD

SEQ ID NO: 2578 - protein, 23 aa, Homo sapiens
MMATPNQTACNAESPVALEEAKT

SEQ ID NO: 2579 - protein, 28 aa, Homo sapiens
MLTGVLLANGTLNASILNSLYNENLVKE

SEQ ID NO: 2580 - protein, 8 aa, Homo sapiens
MENLTKHS

SEQ ID NO: 2581 - protein, 28 aa, Homo sapiens
MENFTALFGAQADPPPPPTALGFGPGKP

SEQ ID NO: 2582 - protein, 28 aa, Homo sapiens
MENFSLLSISGPPISSSALSAFPDIMFS

SEQ ID NO: 2583 - protein, 28 aa, Homo sapiens
MDSSCHNATTKMLATAPARGNMMSTSKP

SEQ ID NO: 2584 - protein, 23 aa, Homo sapiens
MDPNCSCSTSSSCTCTTSSKSRE

SEQ ID NO: 2585 - protein, 21 aa, Homo sapiens
MDPNCSCSTIGSCACAGSCKC

SEQ ID NO: 2586 - protein, 26 aa, Homo sapiens
MDPNCSCAAGVSCTCASSCKCKECKC

SEQ ID NO: 2587 - protein, 20 aa, Homo sapiens
MDLSNNTMSLSVRTPGLSRR

SEQ ID NO: 2588 - protein, 18 aa, Homo sapiens
MDDLCEANGTFAISLFKI

SEQ ID NO: 2589 - protein, 19 aa, Homo sapiens
MDDDIAALVVDNGSGMCKA

SEQ ID NO: 2590 - protein, 24 aa, Homo sapiens
MAYPGYGGGFGNFSIQVPGMQMGQ

SEQ ID NO: 2591 - protein, 20 aa, Homo sapiens
MASQLQEKCIAFIVDNFSKI

SEQ ID NO: 2592 - protein, 18 aa, Homo sapiens
MASNVTNKMDPHSMNSRV

SEQ ID NO: 2593 - protein, 27 aa, Homo sapiens
MAHSQNSLELPININATQITTAYGHRA

SEQ ID NO: 2594 - protein, 17 aa, Homo sapiens
WTPVNISDNGDHYEQRF

SEQ ID NO: 2595 - protein, 20 aa, Homo sapiens
VQVCSLPACGGNHQNSTVRA

SEQ ID NO: 2596 - protein, 29 aa, Homo sapiens
TTTATFTTNTTTTITSGFTVNQNQLLSRG

SEQ ID NO: 2597 - protein, 24 aa, Homo sapiens
TGNYTACQKDLCCHLTYKMSEKRT

SEQ ID NO: 2598 - protein, 25 aa, Homo sapiens
SGVTHAAEERNQTEPSPTPSSPNRT

SEQ ID NO: 2599 - protein, 18 aa, Homo sapiens
SFSWSGGAFLYPPNMSPT

SEQ ID NO: 2600 - protein, 9 aa, Homo sapiens
SEENSTFRN

SEQ ID NO: 2601 - protein, 25 aa, Homo sapiens
RYDPFPAGDPEPRAAPNNSADPRVR

SEQ ID NO: 2602 - protein, 17 aa, Homo sapiens
RWQIVPNASSPFGFWSQ

SEQ ID NO: 2603 - protein, 24 aa, Homo sapiens
RWQALVQVQPSVDPTNATGLDGRE

SEQ ID NO: 2604 - protein, 17 aa, Homo sapiens
RVVNESTVCLMNHERRQ

SEQ ID NO: 2605 - protein, 16 aa, Homo sapiens
RVRRASCEPANGSGRS

SEQ ID NO: 2606 - protein, 25 aa, Homo sapiens
RVNRSVHEWAGGGGGGGGATYVFKM

SEQ ID NO: 2607 - protein, 26 aa, Homo sapiens
RVEYTGHPLEIAVFLNYCTVCNVTKK

SEQ ID NO: 2608 - protein, 29 aa, Homo sapiens
RTLQQLYEAYASKSNNTAYLIYNDGVPKP

SEQ ID NO: 2609 - protein, 17 aa, Homo sapiens
RTLLLVGSPTWKNASRL

SEQ ID NO: 2610 - protein, 27 aa, Homo sapiens
RTINVSNLYVGGIPEGEGTSLLTMRRS

SEQ ID NO: 2611 - protein, 23 aa, Homo sapiens
RTCYYPTTVCLPGCLNQSCGSSC

SEQ ID NO: 2612 - protein, 21 aa, Homo sapiens
RSVNGTTSDCLVSLVTSVTNV

SEQ ID NO: 2613 - protein, 20 aa, Homo sapiens
RSTEEPTAPASPQPPNDSRL

SEQ ID NO: 2614 - protein, 31 aa, Homo sapiens
RSPAAAILELFEEQNGSLQELHYLMTVMERL

SEQ ID NO: 2615 - protein, 37 aa, Homo sapiens
RSMPEASDQEEHLSPLDFLHSANFSLGSINQRLNKRE

SEQ ID NO: 2616 - protein, 35 aa, Homo sapiens
RSLHNLSTPEVPASVQTVTIESSVTVKIENKESRE

SEQ ID NO: 2617 - protein, 16 aa, Homo sapiens
RSFNQSLHSLTQAIRN

SEQ ID NO: 2618 - protein, 23 aa, Homo sapiens
RSEVELEVLGDTEGLNLSFTAIC

SEQ ID NO: 2619 - protein, 36 aa, Homo sapiens
RSAPSGGGASFNLSLTEEHSGNYSCEANNGLGAQRS

SEQ ID NO: 2620 - protein, 36 aa, Homo sapiens
RRSLEQHGLPWAIISIPVNVTSIPTFELLQPPWTFW

SEQ ID NO: 2621 - protein, 9 aa, Homo sapiens
RRQQSRNRS

SEQ ID NO: 2622 - protein, 20 aa, Homo sapiens
RRLEGTNVTVNVLHPGIVRT

SEQ ID NO: 2623 - protein, 25 aa, Homo sapiens
RRKFVCFVQNSIGNTTQSVQLKEKR

SEQ ID NO: 2624 - protein, 21 aa, Homo sapiens
RRFGILSNCNHTYCLKCIRKW

SEQ ID NO: 2625 - protein, 21 aa, Homo sapiens
RQTNESLLILRAIPEGIRDKG

SEQ ID NO: 2626 - protein, 32 aa, Homo sapiens
RPPSAPQNLIFNINQTTVSLEWSPPADNGGRN

SEQ ID NO: 2627 - protein, 35 aa, Homo sapiens
RNPPAFGNVSVIALELLNSGYEFDEGSIIFNQFKS

SEQ ID NO: 2628 - protein, 23 aa, Homo sapiens
RNNISKLTDGAFWGLSKMHVLHL

SEQ ID NO: 2629 - protein, 16 aa, Homo sapiens
RNMANGQPHSVNITRH

SEQ ID NO: 2630 - protein, 29 aa, Homo sapiens
RNLNHTKQRLLEVANYVDQVVNSAGDAHG

SEQ ID NO: 2631 - protein, 15 aa, Homo sapiens
RNKEVNISAVVWPSQ

SEQ ID NO: 2632 - protein, 20 aa, Homo sapiens
RNVTSNDEVLFNVTVTMKKC

SEQ ID NO: 2633 - protein, 32 aa, Homo sapiens
RNPSDPMPQAPALWIETTAYALLHLLLHEGKA

SEQ ID NO: 2634 - protein, 37 aa, Homo sapiens
RNGSANRNSSHRTAAQPAETPEDVPGSLDDGADCEAV

SEQ ID NO: 2635 - protein, 28 aa, Homo sapiens
RNDSIYEASSLYGISAMDGVPFTLHPRF

SEQ ID NO: 2636 - protein, 15 aa, Homo sapiens
RMLRFIQEVNTTTRS

SEQ ID NO: 2637 - protein, 23 aa, Homo sapiens
RLVVGDFSDYNNSYVGAFADARS

SEQ ID NO: 2638 - protein, 33 aa, Homo sapiens
RLPQDGDNVTVENGQLLLLDTNTSILNLLHIKG

SEQ ID NO: 2639 - protein, 17 aa, Homo sapiens
RLNNITMWLNNSNPPVT

SEQ ID NO: 2640 - protein, 23 aa, Homo sapiens
RLNTTNAWGAAPPSLGSQPLYRS

SEQ ID NO: 2641 - protein, 34 aa, Homo sapiens
RLLPILSQQSTINLSHNPLDCTCSNIHFLTWYKE

SEQ ID NO: 2642 - protein, 12 aa, Homo sapiens
RLKTEYNITLRV

SEQ ID NO: 2643 - protein, 23 aa, Homo sapiens
RLEVHYHNPLVIEGRNDSSGIRL

SEQ ID NO: 2644 - protein, 26 aa, Homo sapiens
RLDLSGNALTEDMAALMLQNLSSLRS

SEQ ID NO: 2645 - protein, 29 aa, Homo sapiens
RKTFPTVNPSTGEVICQVAEGDKEDVDKA

SEQ ID NO: 2646 - protein, 35 aa, Homo sapiens
RKMSAPAQPPAEGTEGTAPGGGPPGPPPNMTSNRR

SEQ ID NO: 2647 - protein, 25 aa, Homo sapiens
RKGNSLDIPVAVTIFFGANDSALKD

SEQ ID NO: 2648 - protein, 10 aa, Homo sapiens
RKDINTTAQN

SEQ ID NO: 2649 - protein, 23 aa, Homo sapiens
RKAVPMAPAPASPGSSNDSSARS

SEQ ID NO: 2650 - protein, 25 aa, Homo sapiens
RINNGGCQDLCLLTHQGHVNCSCRG

SEQ ID NO: 2651 - protein, 25 aa, Homo sapiens
RINKLMNESLMLVTALNPHIGYDKA

SEQ ID NO: 2652 - protein, 24 aa, Homo sapiens
RILVNLSMVENKLVELEHTLLSKG

SEQ ID NO: 2653 - protein, 18 aa, Homo sapiens
RIFVGGIDFKTNESDLRK

SEQ ID NO: 2654 - protein, 28 aa, Homo sapiens
RHPQVLQATQETLQRHGVGAGGTRNISG

SEQ ID NO: 2655 - protein, 17 aa, Homo sapiens
RHLTSLNLVQNNFSPKG

SEQ ID NO: 2656 - protein, 30 aa, Homo sapiens
RGLDVEDVKFVINYDYPNSSEDYVHRIGRT

SEQ ID NO: 2657 - protein, 27 aa, Homo sapiens
RGENAYSTVLNISQSANLQFASLIQKE

SEQ ID NO: 2658 - protein, 21 aa, Homo sapiens
RFSSFVPVTIPHATTANTSVL

SEQ ID NO: 2659 - protein, 17 aa, Homo sapiens
RFANLTPEEFVGDYWRN

SEQ ID NO: 2660 - protein, 22 aa, Homo sapiens
RERTSSSIVFEDSGCDNASSKE

SEQ ID NO: 2661 - protein, 11 aa, Homo sapiens
RENFTQTLPKM

SEQ ID NO: 2662 - protein, 27 aa, Homo sapiens
RELQGNCSRLGCQHHCVPTLDGPTCYC

SEQ ID NO: 2663 - protein, 29 aa, Homo sapiens
RDCADVYQAGFNKSGIYTIYINNMPEPKK

SEQ ID NO: 2664 - protein, 37 aa, Homo sapiens
RDAGGELANLSQAELVDLVQWTDLILFDYLTANFDRL

SEQ ID NO: 2665 - protein, 32 aa, Homo sapiens
RCKNQNTFLLTTFANVVNVCGNPNMTCPSNKT

SEQ ID NO: 2666 - protein, 9 aa, Homo sapiens
RANSTSDEL

SEQ ID NO: 2667 - protein, 17 aa, Homo sapiens
QPQAVPPYASENQTCRD

SEQ ID NO: 2668 - protein, 21 aa, Homo sapiens
QPANSNNGTSTATSTNNNAKR

SEQ ID NO: 2669 - protein, 21 aa, Homo sapiens
MVNNVTPARAVVSLINGGQRY

SEQ ID NO: 2670 - protein, 19 aa, Homo sapiens
MQKAFNSSSFNSNTFLTRL

SEQ ID NO: 2671 - protein, 31 aa, Homo sapiens
MNATNHAILQSLVHLMKPNAVPKACCAPTKL

SEQ ID NO: 2672 - protein, 29 aa, Homo sapiens
MLRNSTDTTPLTGPGTPESTTVEPAARRS

SEQ ID NO: 2673 - protein, 37 aa, Homo sapiens
MGIIAVANDTNSCELSPCALLNGGCHDLCLLTPNGRV

SEQ ID NO: 2674 - protein, 18 aa, Homo sapiens
MGHNFSLPVYKGEIQARN

SEQ ID NO: 2675 - protein, 19 aa, Homo sapiens
MFTMATAEHRSNSSIAGKM

SEQ ID NO: 2676 - protein, 29 aa, Homo sapiens
MFMVKNGNGTACIMANFSAAFSVNYDTKS

SEQ ID NO: 2677 - protein, 13 aa, Homo sapiens
MDTRNLSLAHNRI

SEQ ID NO: 2678 - protein, 36 aa, Homo sapiens
LPPKSLSPESEWLVTFATTNSSGIILAALGGDVEKR

SEQ ID NO: 2679 - protein, 17 aa, Homo sapiens
LFQNITLEDAGSYTLRT

SEQ ID NO: 2680 - protein, 29 aa, Homo sapiens
KYQLLHHSANQLSITVPNVTLQDEGVYKC

SEQ ID NO: 2681 - protein, 27 aa, Homo sapiens
KYMISTSETIIDINGTVMNYSGWSHRD

SEQ ID NO: 2682 - protein, 12 aa, Homo sapiens
KVVNLSIHMVLI

SEQ ID NO: 2683 - protein, 17 aa, Homo sapiens
KVSIIPPIALNSTDSDG

SEQ ID NO: 2684 - protein, 24 aa, Homo sapiens
KVNGTITFIDEIHNDDGVWLRLND

SEQ ID NO: 2685 - protein, 16 aa, Homo sapiens
KVLNGTLLMAPSGCKS

SEQ ID NO: 2686 - protein, 14 aa, Homo sapiens
KVKFGMNVTSSEKV

SEQ ID NO: 2687 - protein, 11 aa, Homo sapiens
KTWNQSIALRL

SEQ ID NO: 2688 - protein, 25 aa, Homo sapiens
KTPASNISTQVSHTKLSVEAPDSKF

SEQ ID NO: 2689 - protein, 23 aa, Homo sapiens
KTDEKLNVSDENTASCPLSPIKM

SEQ ID NO: 2690 - protein, 27 aa, Homo sapiens
KSGNYTVLQVVEALGSSLENPEPRTRA

SEQ ID NO: 2691 - protein, 37 aa, Homo sapiens
KSEMAQIQQNAVQNHTATMLEIGTSLLSQTAEQTRKL

SEQ ID NO: 2692 - protein, 41 aa, Homo sapiens
KSDALVPVSGTSLAVGIDFHAENDTIYWVDMGLSTISRAKR

SEQ ID NO: 2693 - protein, 26 aa, Homo sapiens
KNYEDEPNNYRTMHGRAVNGSQLGKD

SEQ ID NO: 2694 - protein, 18 aa, Homo sapiens
KNVNQSLLELHALASDKG

SEQ ID NO: 2695 - protein, 18 aa, Homo sapiens
KNRNSSVVPSERARVGLA

SEQ ID NO: 2696 - protein, 22 aa, Homo sapiens
KNGQDHLNISSMTAAQEGTYTC

SEQ ID NO: 2697 - protein, 26 aa, Homo sapiens
KNVTESPSFSAGDNPPVLFSSDFRIS

SEQ ID NO: 2698 - protein, 17 aa, Homo sapiens
KNVSEIIATIMETLKMK

SEQ ID NO: 2699 - protein, 21 aa, Homo sapiens
KNITLLPATAATTFTVTPSGQ

SEQ ID NO: 2700 - protein, 23 aa, Homo sapiens
KNCTNNCTFVYAAEQPPEAPGKI

SEQ ID NO: 2701 - protein, 18 aa, Homo sapiens
KMDFLLFNYSAPSYLRLL

SEQ ID NO: 2702 - protein, 20 aa, Homo sapiens
KLLQAENCDIFQNLSAKQRL

SEQ ID NO: 2703 - protein, 11 aa, Homo sapiens
KLANNGTVLRA

SEQ ID NO: 2704 - protein, 10 aa, Homo sapiens
KISNNITLRE

SEQ ID NO: 2705 - protein, 20 aa, Homo sapiens
KISDNNTEFLLNFNEFIDRK

SEQ ID NO: 2706 - protein, 18 aa, Homo sapiens
KINPKNYTENELEKITRR

SEQ ID NO: 2707 - protein, 26 aa, Homo sapiens
KINCIRPDAFQDLQNLSLLSLYDNKI

SEQ ID NO: 2708 - protein, 33 aa, Homo sapiens
KIKGIVENMGINANNMSDFIMKVDALMSSVPKR

SEQ ID NO: 2709 - protein, 20 aa, Homo sapiens
KHSAGSGAEESNSSSTVQKQ

SEQ ID NO: 2710 - protein, 16 aa, Homo sapiens
KGRMSTLTFFNVSEKD

SEQ ID NO: 2711 - protein, 20 aa, Homo sapiens
KGEPGAPGENGTPGQTGARG

SEQ ID NO: 2712 - protein, 24 aa, Homo sapiens
KGEGLNKTVIGDYLGERDEFNIKV

SEQ ID NO: 2713 - protein, 13 aa, Homo sapiens
KFVLNSNITNIPQ

SEQ ID NO: 2714 - protein, 17 aa, Homo sapiens
KEMTNEEKNIITNLSKC

SEQ ID NO: 2715 - protein, 21 aa, Homo sapiens
KEENLSMHQMLDQTLLELNNM

SEQ ID NO: 2716 - protein, 25 aa, Homo sapiens
KDRCNVEKVPSNSQLEIEGNSSGRQ

SEQ ID NO: 2717 - protein, 26 aa, Homo sapiens
KDIDVSPKHVGFATIPRNYTMSFLPR

SEQ ID NO: 2718 - protein, 30 aa, Homo sapiens
KDGSNKSGAEEQGPIDGPSKSGAEEQTSKD

SEQ ID NO: 2719 - protein, 26 aa, Homo sapiens
KCTLHFLTPGVNNSGSYICRPKMIKS

SEQ ID NO: 2720 - protein, 20 aa, Homo sapiens
KCPKPMEENHSVSHKKSKKK

SEQ ID NO: 2721 - protein, 27 aa, Homo sapiens
KAMAETFYLSNIVPQDFDNNSGYWNRI

SEQ ID NO: 2722 - protein, 29 aa, Homo sapiens
KALWNLRSNDTGLLGNVVNIQTGHWVGKQ

SEQ ID NO: 2723 - protein, 17 aa, Homo sapiens
KALTSETNGTDSNGSNS

SEQ ID NO: 2724 - protein, 25 aa, Homo sapiens
KAFHTEISSSDNNTLTSSNAYNSRY

SEQ ID NO: 2725 - protein, 13 aa, Homo sapiens
IVLNNLSVNAENQ

SEQ ID NO: 2726 - protein, 24 aa, Homo sapiens
ITNLSPYTNVSVKLILMNPEGRKE

SEQ ID NO: 2727 - protein, 11 aa, Homo sapiens
INSTLKGRWRV

SEQ ID NO: 2728 - protein, 29 aa, Homo sapiens
IIAAGVAHAITAACTHGNLSDCGCDKEKQ

SEQ ID NO: 2729 - protein, 13 aa, Homo sapiens
IFNETKNPTLTRR

SEQ ID NO: 2730 - protein, 35 aa, Homo sapiens
GRVPVNVTSTALLSVLDIFPTVVALAQASLPQGRR

SEQ ID NO: 2731 - protein, 13 aa, Homo sapiens
GKSVLVNGTKERD

SEQ ID NO: 2732 - protein, 29 aa, Homo sapiens
GGQSPASGNVTGNSNSTFISSGQVMNFKG

SEQ ID NO: 2733 - protein, 27 aa, Homo sapiens
GEDTDLDGWPNENLVCVANATYHCKKD

SEQ ID NO: 2734 - protein, 19 aa, Homo sapiens
FGNFQGLMEANVSLDLGKL

SEQ ID NO: 2735 - protein, 28 aa, Homo sapiens
FENKTNLKNQLILGVMGVDVSLEDIKRL

SEQ ID NO: 2736 - protein, 21 aa, Homo sapiens
FEAFQDALNQETTYVSNLTRS

SEQ ID NO: 2737 - protein, 21 aa, Homo sapiens
DNTLQQNSSSNISYSNAMQKE

SEQ ID NO: 2738 - protein, 24 aa, Homo sapiens
VIVGVPPDSQNLSMNPMLLLTGRT

SEQ ID NO: 2739 - protein, 19 aa, Homo sapiens
RVKNISDADVHNAMDNYEC

SEQ ID NO: 2740 - protein, 35 aa, Homo sapiens
RVGGFGFVATPSPAPGVNESPMMTWGEVENTPLRV

SEQ ID NO: 2741 - protein, 21 aa, Homo sapiens
RSRHENTSQVPLQESRTRKRR

SEQ ID NO: 2742 - protein, 16 aa, Homo sapiens
RRRRPGHGSLTNISRH

SEQ ID NO: 2743 - protein, 18 aa, Homo sapiens
RNTGNGTQSSMGSPLTRP

SEQ ID NO: 2744 - protein, 23 aa, Homo sapiens
RNFDKNGNMMDWWSNFSTQHFRE

SEQ ID NO: 2745 - protein, 32 aa, Homo sapiens
RNGSLQEKLWAILQATYIHSWNLARFVFTYKG

SEQ ID NO: 2746 - protein, 17 aa, Homo sapiens
RNCSHWAVGVASWEMSR

SEQ ID NO: 2747 - protein, 19 aa, Homo sapiens
RIRNISNTVMKVKQILGRS

SEQ ID NO: 2748 - protein, 22 aa, Homo sapiens
RHVLATILAQLSDMDLINVSKV

SEQ ID NO: 2749 - protein, 18 aa, Homo sapiens
RGGSGGGGGGGGGGYNRS

SEQ ID NO: 2750 - protein, 16 aa, Homo sapiens
RGGNNSFTHEALTLKY

SEQ ID NO: 2751 - protein, 34 aa, Homo sapiens
RGENVSTTEVEGVLSRLLGQTDVAVYGVAVPGKL

SEQ ID NO: 2752 - protein, 28 aa, Homo sapiens
RGCASTGVIMSVNNSLYLGPILKFGSKE

SEQ ID NO: 2753 - protein, 8 aa, Homo sapiens
RFLLYNRS

SEQ ID NO: 2754 - protein, 24 aa, Homo sapiens
RETQAINSSLSTLGLVIMALSNKE

SEQ ID NO: 2755 - protein, 31 aa, Homo sapiens
PRMSVLRSAETMQSALAAMQQFYGINMTGKV

SEQ ID NO: 2756 - protein, 25 aa, Homo sapiens
PPTLVPLMNGSATPLPTALGLGGRA

SEQ ID NO: 2757 - protein, 16 aa, Homo sapiens
PNHRPTGRGNNISSHH

SEQ ID NO: 2758 - protein, 21 aa, Homo sapiens
NLTQNLMQNLTQSLSQKENRE

SEQ ID NO: 2759 - protein, 22 aa, Homo sapiens
MVDKYIPNISMCLKDSDPFIRK

SEQ ID NO: 2760 - protein, 25 aa, Homo sapiens
MTAMDNASKNASEMIDKLTLTFNRT

SEQ ID NO: 2761 - protein, 24 aa, Homo sapiens
MGINECQYQFRFGRWNCSALGEKT

SEQ ID NO: 2762 - protein, 29 aa, Homo sapiens
MDRWNETVGLEWELERQLALMNSQFNRRV

SEQ ID NO: 2763 - protein, 19 aa, Homo sapiens
MALVLSNFSTLTLLLGQRF

SEQ ID NO: 2764 - protein, 28 aa, Homo sapiens
KWYLENVYPEMRVYNNTLTYGEVRNSKA

SEQ ID NO: 2765 - protein, 32 aa, Homo sapiens
KSYRNSSYENARENSQMNESAPGTYVVQNPHS

SEQ ID NO: 2766 - protein, 32 aa, Homo sapiens
KSVNKMQEATPSAQATNETQMCYASLDHSVKG

SEQ ID NO: 2767 - protein, 22 aa, Homo sapiens
KNNSYSLAFLAGKLNSKVERSQ

SEQ ID NO: 2768 - protein, 29 aa, Homo sapiens
KLLKSIPLDVVLSNNNHTEIQEISLALRS

SEQ ID NO: 2769 - protein, 19 aa, Homo sapiens
KLLEENETEAVTVPTPSPT

SEQ ID NO: 2770 - protein, 12 aa, Homo sapiens
KKLNCSPDSFRC

SEQ ID NO: 2771 - protein, 28 aa, Homo sapiens
KKHELKPNNPTEEGLASIHSVLFRKDPF

SEQ ID NO: 2772 - protein, 35 aa, Homo sapiens
KKENVAADIPITETEAYQLLKKATLQDNTNQTENR

SEQ ID NO: 2773 - protein, 16 aa, Homo sapiens
KINFENANLSALNLKI

SEQ ID NO: 2774 - protein, 28 aa, Homo sapiens
KHELGITAVMNFQTEWDIVQNSSGCNRY

SEQ ID NO: 2775 - protein, 26 aa, Homo sapiens
KGTVLPVATIQNASTAMLMAASVARK

SEQ ID NO: 2776 - protein, 27 aa, Homo sapiens
KEQQPNDLLSVQFIDYGNVSVVHTNKI

SEQ ID NO: 2777 - protein, 21 aa, Homo sapiens
KDFLDVYYNLTLKTMMGIEWV

SEQ ID NO: 2778 - protein, 19 aa, Homo sapiens
FSYPNGLSENTSVVEKLKH

SEQ ID NO: 2779 - protein, 22 aa, Homo sapiens
MDPNCSCAAAGVSCTCASSCKC

SEQ ID NO: 2780 - protein, 10 aa, Homo sapiens
YVNETLANRT

SEQ ID NO: 2781 - protein, 25 aa, Homo sapiens
YTPTGEPVFGGLPQNASLIAHLART

SEQ ID NO: 2782 - protein, 20 aa, Homo sapiens
YCGTWNNSLSGWVFGGGTKL

SEQ ID NO: 2783 - protein, 28 aa, Homo sapiens
WGKELIETLWNLGDHELLHMYPGNVSKL

SEQ ID NO: 2784 - protein, 22 aa, Homo sapiens
VYYMVVCLVAFTIVMVLNITRL

SEQ ID NO: 2785 - protein, 24 aa, Homo sapiens
VNLTGLDLSQNNLSSVTNINVKKM

SEQ ID NO: 2786 - protein, 25 aa, Homo sapiens
VENLIILANNSLSSNGNVTESGCKE

SEQ ID NO: 2787 - protein, 18 aa, Homo sapiens
VAIVYNITLDADGFSSRV

SEQ ID NO: 2788 - protein, 21 aa, Homo sapiens
TVKGNPSSSVEDHIEYHGHRG

SEQ ID NO: 2789 - protein, 34 aa, Homo sapiens
TTDFCSVSTATPVPTANSTAKPTVQPSPSTTSKT

SEQ ID NO: 2790 - protein, 26 aa, Homo sapiens
TTAQLSWRPGPDNHSPITMYVIQART

SEQ ID NO: 2791 - protein, 25 aa, Homo sapiens
SVTGNPSNSWPSPTEPSSETGNPRH

SEQ ID NO: 2792 - protein, 13 aa, Homo sapiens
SLLCLPKANNSRS

SEQ ID NO: 2793 - protein, 19 aa, Homo sapiens
SLKDNSSCSVMSEEPEGRS

SEQ ID NO: 2794 - protein, 26 aa, Homo sapiens
RYVHDGSETLTDSFVLMANASEMDRQ

SEQ ID NO: 2795 - protein, 28 aa, Homo sapiens
RYTSAGISVTVKELFPAPVLNASVTSPL

SEQ ID NO: 2796 - protein, 26 aa, Homo sapiens
RYSWQCVNQSVLCGPSGNHTDIETKQ

SEQ ID NO: 2797 - protein, 12 aa, Homo sapiens
RYLSLRNNSLRT

SEQ ID NO: 2798 - protein, 27 aa, Homo sapiens
RYLQINNADLGDTANYTCVASNIAGKT

SEQ ID NO: 2799 - protein, 21 aa, Homo sapiens
RYDFDLFANESVPDHVGYAKV

SEQ ID NO: 2800 - protein, 9 aa, Homo sapiens
RWNTTYRRY

SEQ ID NO: 2801 - protein, 29 aa, Homo sapiens
RVQALDPDEGSNGEVQYSLSNSTQAELRH

SEQ ID NO: 2802 - protein, 23 aa, Homo sapiens
RVMYTTQGGGEAWGISVLNPNKT

SEQ ID NO: 2803 - protein, 21 aa, Homo sapiens
RVLDINDNDPVLLNLPMNITI

SEQ ID NO: 2804 - protein, 27 aa, Homo sapiens
RVKVQDLVLEPTQNITTKGVSVRRKRQ

SEQ ID NO: 2805 - protein, 15 aa, Homo sapiens
RVFSNVSIILFLNKT

SEQ ID NO: 2806 - protein, 34 aa, Homo sapiens
RTSHGEPKSAVPFNQYLPNKSNQTAYVPAPLRKK

SEQ ID NO: 2807 - protein, 26 aa, Homo sapiens
RTRSTSSAGSNNSAEGAGLTDNGCRR

SEQ ID NO: 2808 - protein, 35 aa, Homo sapiens
RTLPLILILLALLSPGAADFNISSLSGLLSPALTE

SEQ ID NO: 2809 - protein, 29 aa, Homo sapiens
RSTNHSTQSALNQSLHTVGAQPITAHSRR

SEQ ID NO: 2810 - protein, 17 aa, Homo sapiens
RSTLITVLNISEIESRF

SEQ ID NO: 2811 - protein, 17 aa, Homo sapiens
RSSNLTTHKIIHTGEKP

SEQ ID NO: 2812 - protein, 21 aa, Homo sapiens
RSEGSSVNLSPPLEQCVPDRG

SEQ ID NO: 2813 - protein, 16 aa, Homo sapiens
RRYHIYENGTLQINRT

SEQ ID NO: 2814 - protein, 32 aa, Homo sapiens
RRQRRMHPNVSQGCQGGCATCSDYNGCLSCKP

SEQ ID NO: 2815 - protein, 25 aa, Homo sapiens
RRQISQKAFLFNSSEQVAEFVISRP

SEQ ID NO: 2816 - protein, 25 aa, Homo sapiens
RRGAQSPGVMNGTPSTAGFLVAWPM

SEQ ID NO: 2817 - protein, 29 aa, Homo sapiens
RQVQVLQNLTTTYEIVLWQPVTADLIVKK

SEQ ID NO: 2818 - protein, 27 aa, Homo sapiens
RQMAQNNSRPELLDPEPGGLLTSQGFI

SEQ ID NO: 2819 - protein, 24 aa, Homo sapiens
RQLGNGSLAIYGTVNEDAGDYTCV

SEQ ID NO: 2820 - protein, 17 aa, Homo sapiens
RQGGVNATQVLIQHLRG

SEQ ID NO: 2821 - protein, 21 aa, Homo sapiens
RQALLKQGQDNLSSVKETQKK

SEQ ID NO: 2822 - protein, 22 aa, Homo sapiens
RNLFLTNLDNLHENNTHNQEKK

SEQ ID NO: 2823 - protein, 25 aa, Homo sapiens
RNGIALEILQNTSYLPVLEGQALRL

SEQ ID NO: 2824 - protein, 27 aa, Homo sapiens
RNFDNSSQNTTASVSSKGPMILLQATK

SEQ ID NO: 2825 - protein, 19 aa, Homo sapiens
RNTTSTCIATVVGLTGARL

SEQ ID NO: 2826 - protein, 14 aa, Homo sapiens
RNTTLFIDQVEAKW

SEQ ID NO: 2827 - protein, 26 aa, Homo sapiens
RNSSLGDAINKYDVVIRLNNAPVAGY

SEQ ID NO: 2828 - protein, 12 aa, Homo sapiens
RNRTFVLNFIKI

SEQ ID NO: 2829 - protein, 15 aa, Homo sapiens
RNLSSLQPPPPGFKR

SEQ ID NO: 2830 - protein, 16 aa, Homo sapiens
RNFSSVAASSGNTTLN

SEQ ID NO: 2831 - protein, 17 aa, Homo sapiens
RMLWEHNSTIIVMLTKL

SEQ ID NO: 2832 - protein, 42 aa, Homo sapiens
RLVRVTYVSSEGGHSGQTEAPGNATSAMLGPLSSSTTYTVRV

SEQ ID NO: 2833 - protein, 18 aa, Homo sapiens
RLQNSQCYNWTLLLGNRW

SEQ ID NO: 2834 - protein, 41 aa, Homo sapiens
RLLLTAAHLLFVAPHNDSATGEPEASSGSGPPSGGALGPRA

SEQ ID NO: 2835 - protein, 23 aa, Homo sapiens
RLFPNASQHITPSYNYAPNPDKH

SEQ ID NO: 2836 - protein, 20 aa, Homo sapiens
RLDKSNFQQPYITNRTFMLA

SEQ ID NO: 2837 - protein, 34 aa, Homo sapiens
RKLYKCPACGETLQDSTGNFSSPEYPNGYSAHMH

SEQ ID NO: 2838 - protein, 22 aa, Homo sapiens
RKFAMSPSNFSSSDCQDEEGRK

SEQ ID NO: 2839 - protein, 31 aa, Homo sapiens
RKALPMEFEAYINASGEHGIVVFSLGSMVSE

SEQ ID NO: 2840 - protein, 16 aa, Homo sapiens
RIYTSGSTNYNPSLKS

SEQ ID NO: 2841 - protein, 18 aa, Homo sapiens
RITVHGNGSLDIRSLRKS

SEQ ID NO: 2842 - protein, 22 aa, Homo sapiens
RIQLENVTLLNPDPAEGPKPRP

SEQ ID NO: 2843 - protein, 27 aa, Homo sapiens
RIPSYNLTVSVSDNYGAPPGAAVQARS

SEQ ID NO: 2844 - protein, 29 aa, Homo sapiens
RHSSTDSNKASSGDISPYDNNSPVLSERS

SEQ ID NO: 2845 - protein, 21 aa, Homo sapiens
RHNNITSISTGSFSTTPNLKC

SEQ ID NO: 2846 - protein, 26 aa, Homo sapiens
RHLTLIDLSNNSISMLTNYTFSNMSH

SEQ ID NO: 2847 - protein, 33 aa, Homo sapiens
RGVNASAVVNVTVRALLHVWAGGPWPQGATLRL

SEQ ID NO: 2848 - protein, 19 aa, Homo sapiens
RGVHNASLALSASIGRVRE

SEQ ID NO: 2849 - protein, 35 aa, Homo sapiens
RGTRARLLSSFLSFLNGSSANQAVGQGPEAGEGRG

SEQ ID NO: 2850 - protein, 28 aa, Homo sapiens
RGSVIGNINDVEFGIAFLNATITDSPNS

SEQ ID NO: 2851 - protein, 19 aa, Homo sapiens
RGSSNPLLTTEEANLTEKE

SEQ ID NO: 2852 - protein, 41 aa, Homo sapiens
RGSHAGNLTVAVVLPLANTSYPWSWARVGPAVELALAQVKA

SEQ ID NO: 2853 - protein, 22 aa, Homo sapiens
RGNVNGTFIIHPDSGNLTVARS

SEQ ID NO: 2854 - protein, 34 aa, Homo sapiens
RFQFCGRNASAVPVFYSSMSTAMVIFKSGVVNRN

SEQ ID NO: 2855 - protein, 25 aa, Homo sapiens
RFARHPFYGSAGVNSGVMLMNLTRI

SEQ ID NO: 2856 - protein, 15 aa, Homo sapiens
RETVPEYNLSITARD

SEQ ID NO: 2857 - protein, 23 aa, Homo sapiens
REQECEIISFAETGLSTINQTRL

SEQ ID NO: 2858 - protein, 32 aa, Homo sapiens
RECTCPPGMFQSNATCAPHTVCPVGWGVRKKG

SEQ ID NO: 2859 - protein, 25 aa, Homo sapiens
RDQDPMLNSNGSVTVVALLQASCYL

SEQ ID NO: 2860 - protein, 28 aa, Homo sapiens
RDHGSPTLSANVSLRVLVGDRNDNAPRV

SEQ ID NO: 2861 - protein, 28 aa, Homo sapiens
RDDFRQNPSDVMVAVGEPAVMECQPPRG

SEQ ID NO: 2862 - protein, 21 aa, Homo sapiens
RDDALKNLSHTPVSKFVLDRI

SEQ ID NO: 2863 - protein, 19 aa, Homo sapiens
RCNISLPMENGLNSIEWRL

SEQ ID NO: 2864 - protein, 29 aa, Homo sapiens
RCIPQSWVCDGDVDCTDGYDENQNCTRRT

SEQ ID NO: 2865 - protein, 26 aa, Homo sapiens
RAWPKMHTVNGYVNRSLPGLIGCHRK

SEQ ID NO: 2866 - protein, 22 aa, Homo sapiens
RAWHNLTVLATELDSSAQASRV

SEQ ID NO: 2867 - protein, 38 aa, Homo sapiens
RASVVWMAYMNISFHVGNHVLSELGETGVFGRSSTLKR

SEQ ID NO: 2868 - protein, 26 aa, Homo sapiens
RALKGETVNTTISFSFKGIKFSKGKY

SEQ ID NO: 2869 - protein, 26 aa, Homo sapiens
RAKWDTANNPLYKEATSTFTNITYRG

SEQ ID NO: 2870 - protein, 16 aa, Homo sapiens
RAATAPLLEAVDNLSA

SEQ ID NO: 2871 - protein, 26 aa, Homo sapiens
QHSLNLTESTSLDMLLDDTGECSARK

SEQ ID NO: 2872 - protein, 22 aa, Homo sapiens
PSLLLFINSSSQDFVVVLLCKN

SEQ ID NO: 2873 - protein, 20 aa, Homo sapiens
PLLPKSSTIEEEENMSGHKC

SEQ ID NO: 2874 - protein, 22 aa, Homo sapiens
PDRNCSWALGPPGAALELTFRL

SEQ ID NO: 2875 - protein, 26 aa, Homo sapiens
PDFRNMTGLVDLTLSRNAITRIGARA

SEQ ID NO: 2876 - protein, 20 aa, Homo sapiens
NPPHNLSVINSEELSSILKL

SEQ ID NO: 2877 - protein, 28 aa, Homo sapiens
NISRLDPQTNSSQIKDEFQTLNIVTPRV

SEQ ID NO: 2878 - protein, 29 aa, Homo sapiens
MVSNESVDYRATFPEDQFPNSSQNGSCRQ

SEQ ID NO: 2879 - protein, 36 aa, Homo sapiens
MVSFVSNYSHTANILPDIENEDFIKDCVRIHNKFRS

SEQ ID NO: 2880 - protein, 27 aa, Homo sapiens
MVHMPDSLGGGPEGPCFCPTPCNLTRY

SEQ ID NO: 2881 - protein, 28 aa, Homo sapiens
MTLSITSGMPNNFSEMPQQSTTLNLWRE

SEQ ID NO: 2882 - protein, 19 aa, Homo sapiens
MSSDNDSYHSDEFLTNSKS

SEQ ID NO: 2883 - protein, 32 aa, Homo sapiens
MSEEVTGQFSVHPETPKPSISSNNSNPVEDKD

SEQ ID NO: 2884 - protein, 19 aa, Homo sapiens
MSDEVGCVNVTLCEGPNKF

SEQ ID NO: 2885 - protein, 34 aa, Homo sapiens
MPTFCIPENHCGTHAPVWLNGSHPLEGDGIVQRQ

SEQ ID NO: 2886 - protein, 12 aa, Homo sapiens
MPNSSGLMNRRD

SEQ ID NO: 2887 - protein, 36 aa, Homo sapiens
MNRRNILVMKHNYSQDAADACDIDEIEEVPTTSHRL

SEQ ID NO: 2888 - protein, 22 aa, Homo sapiens
MNLSWDCQENTTFSKCFLTDKK

SEQ ID NO: 2889 - protein, 34 aa, Homo sapiens
MNGTMSQVQGSANDPIFLLHHAFVDSIFEQWLRR

SEQ ID NO: 2890 - protein, 23 aa, Homo sapiens
MMSVQANTGPPWESKNSTAVWRG

SEQ ID NO: 2891 - protein, 32 aa, Homo sapiens
MLFLSMNLTISAGPASTLPTATPAAGELTMRS

SEQ ID NO: 2892 - protein, 28 aa, Homo sapiens
MISNMSEESANMIASALAQIPQKVLWRF

SEQ ID NO: 2893 - protein, 23 aa, Homo sapiens
MGRVLLQNTSFFSSLLNEMAHKF

SEQ ID NO: 2894 - protein, 23 aa, Homo sapiens
MEGTATCNGSGSDTCAQCAHFRD

SEQ ID NO: 2895 - protein, 12 aa, Homo sapiens
MDGNDSDYDPKK

SEQ ID NO: 2896 - protein, 36 aa, Homo sapiens
MATFAGQIEENSNANTLVMILNATDADEPNNLNSKI

SEQ ID NO: 2897 - protein, 25 aa, Homo sapiens
MAPQNLSTFCLLLLYLIGAVIAGRD

SEQ ID NO: 2898 - protein, 30 aa, Homo sapiens
MAELMMIWERNKSVSPTVNPMSTAMQNERR

SEQ ID NO: 2899 - protein, 22 aa, Homo sapiens
LYNDSTYNQQLIIPSIGLPLKT

SEQ ID NO: 2900 - protein, 29 aa, Homo sapiens
LTKRTNMDFSICISNITPADAGTYYCVKF

SEQ ID NO: 2901 - protein, 22 aa, Homo sapiens
LSVIDNASDLPERSVSVPNAKL

SEQ ID NO: 2902 - protein, 27 aa, Homo sapiens
LGDQMLNATVMNHGDTLTATATATARA

SEQ ID NO: 2903 - protein, 30 aa, Homo sapiens
LFNGSLLLQNVSLENEGTYVCIATNALGKA

SEQ ID NO: 2904 - protein, 25 aa, Homo sapiens
KYHVMAPALSFHMSPWSWSNCSRKY

SEQ ID NO: 2905 - protein, 20 aa, Homo sapiens
KYDGSNRQTLVNTTHRPFDI

SEQ ID NO: 2906 - protein, 19 aa, Homo sapiens
KWTNLSDPMPVGQMGTVKY

SEQ ID NO: 2907 - protein, 29 aa, Homo sapiens
KWNGSVIDEDDPVLGEDYYSVENPANKRR

SEQ ID NO: 2908 - protein, 28 aa, Homo sapiens
KWFNNSAASLTMPTLDNIPFSLIVSQDV

SEQ ID NO: 2909 - protein, 26 aa, Homo sapiens
KVSRIPQGTFSNLENLTLLDLQNNKL

SEQ ID NO: 2910 - protein, 36 aa, Homo sapiens
KVSMMEKSELVNETRWQYYGTANTSGNLSLTWHVKS

SEQ ID NO: 2911 - protein, 26 aa, Homo sapiens
KVPWYVLAGNHDHLGNVSAQIAYSKI

SEQ ID NO: 2912 - protein, 36 aa, Homo sapiens
KVNLNSVSKSLTGLSDSVSQYSDAFLAANTSLDERE

SEQ ID NO: 2913 - protein, 16 aa, Homo sapiens
KVNGSHEANMLSQVHR

SEQ ID NO: 2914 - protein, 24 aa, Homo sapiens
KVLSFYNVSQMGALLAGVSTQAFC

SEQ ID NO: 2915 - protein, 20 aa, Homo sapiens
KVLFICTANVTDTIPEPLRD

SEQ ID NO: 2916 - protein, 11 aa, Homo sapiens
KVIHVEENPTS

SEQ ID NO: 2917 - protein, 26 aa, Homo sapiens
KVGMHCSGPLGGLLQLAAEVNVTSRV

SEQ ID NO: 2918 - protein, 33 aa, Homo sapiens
KTYEDDSPEWFKEDNAVQPNSSYTYVWHATERS

SEQ ID NO: 2919 - protein, 27 aa, Homo sapiens
KTSKSEENSAGIPEDNGSQRIEDTQKL

SEQ ID NO: 2920 - protein, 16 aa, Homo sapiens
KTPNGNHTGGNIARFS

SEQ ID NO: 2921 - protein, 25 aa, Homo sapiens
KTLMLNVSLFNAGDDAYETTLHVKL

SEQ ID NO: 2922 - protein, 31 aa, Homo sapiens
KTKLPEYTREALCPPACRGSTTLYNCSTCKG

SEQ ID NO: 2923 - protein, 19 aa, Homo sapiens
KTGHRMERPDNCSEEMYRL

SEQ ID NO: 2924 - protein, 30 aa, Homo sapiens
KTGFTQLGTSCITNHTCSNADETFCEMVKS

SEQ ID NO: 2925 - protein, 21 aa, Homo sapiens
KSSVTPAIISAALQQVVHNKS

SEQ ID NO: 2926 - protein, 18 aa, Homo sapiens
KSSINFTVNCSWFSDTNG

SEQ ID NO: 2927 - protein, 22 aa, Homo sapiens
KSMADVLGDGGNSSLTISEGPI

SEQ ID NO: 2928 - protein, 25 aa, Homo sapiens
KSEEQPMDLENRSTANVLEETTVKK

SEQ ID NO: 2929 - protein, 34 aa, Homo sapiens
KRYGFYNNSVIIFSSDNGGQTFSGGSNWPLRGRK

SEQ ID NO: 2930 - protein, 25 aa, Homo sapiens
KRFNGSESIKSSWNISVVKFLLEKL

SEQ ID NO: 2931 - protein, 19 aa, Homo sapiens
KQQNHTLDYNLAPGPLGRG

SEQ ID NO: 2932 - protein, 14 aa, Homo sapiens
KNGLSNSSILLDKC

SEQ ID NO: 2933 - protein, 35 aa, Homo sapiens
KNGGSILFYTGNEGDIIWFCNNTGFMWDVAEELKA

SEQ ID NO: 2934 - protein, 13 aa, Homo sapiens
KNVTLILDCKKKT

SEQ ID NO: 2935 - protein, 31 aa, Homo sapiens
KNSSTAEINETTTSSTDFLARAYGFEMAKEF

SEQ ID NO: 2936 - protein, 22 aa, Homo sapiens
KNRSTASIQPTSDDLVSSAECS

SEQ ID NO: 2937 - protein, 20 aa, Homo sapiens
KNESGIILLGSGGTPAPPRR

SEQ ID NO: 2938 - protein, 29 aa, Homo sapiens
KMADALLFGNFGVQNITAAIQLYESLAKE

SEQ ID NO: 2939 - protein, 30 aa, Homo sapiens
KLVSSSNAMENASHQASVQVESLQEQLNVV

SEQ ID NO: 2940 - protein, 27 aa, Homo sapiens
KLVQDVANNTNEETGDGPTTATVLARS

SEQ ID NO: 2941 - protein, 16 aa, Homo sapiens
KLPHNGSTGSTPLLRN

SEQ ID NO: 2942 - protein, 27 aa, Homo sapiens
KLPGLANTTLSTPNPDTQASASPDPRP

SEQ ID NO: 2943 - protein, 20 aa, Homo sapiens
KLMSLANSSEGKVDKVLMRN

SEQ ID NO: 2944 - protein, 16 aa, Homo sapiens
KLLKEQAHNLTIEMKN

SEQ ID NO: 2945 - protein, 13 aa, Homo sapiens
KLEKNATDNISKL

SEQ ID NO: 2946 - protein, 14 aa, Homo sapiens
KLCSSVNVSNEIKS

SEQ ID NO: 2947 - protein, 24 aa, Homo sapiens
KLCGMLTITSIFSSSNMTVIYFKS

SEQ ID NO: 2948 - protein, 19 aa, Homo sapiens
KKNADNNSSAFTALSEERD

SEQ ID NO: 2949 - protein, 26 aa, Homo sapiens
KKEKEPAEGNESSEAPSPVNAMNSFV

SEQ ID NO: 2950 - protein, 27 aa, Homo sapiens
KISNISSDVTVNEGSNVTLVCMANGRP

SEQ ID NO: 2951 - protein, 22 aa, Homo sapiens
KGLVEGVYCNLTEAFEIPACKY

SEQ ID NO: 2952 - protein, 25 aa, Homo sapiens
KGLEWIGYIYYSGSTNYNPSLKSRV

SEQ ID NO: 2953 - protein, 14 aa, Homo sapiens
KGFNWSSTLTKHRR

SEQ ID NO: 2954 - protein, 23 aa, Homo sapiens
KGDVSLTIENVTLADSGIYCCRI

SEQ ID NO: 2955 - protein, 23 aa, Homo sapiens
KGACNGSVDCEDTTNHNILQARD

SEQ ID NO: 2956 - protein, 19 aa, Homo sapiens
KFVSDATDYAAGFNLTYKA

SEQ ID NO: 2957 - protein, 29 aa, Homo sapiens
KFDILMTSNEINATGHQQTLLVPSEDGAT

SEQ ID NO: 2958 - protein, 31 aa, Homo sapiens
KFCHSQLSNNSVSFFLYNLDHSHANYYFCNL

SEQ ID NO: 2959 - protein, 35 aa, Homo sapiens
KESYLQIPSAKVRPQTNITLQIATDEDSGILLYKG

SEQ ID NO: 2960 - protein, 35 aa, Homo sapiens
KEQYQVLIQAKDMGGQLGGLAGTTIVNITLTDVND

SEQ ID NO: 2961 - protein, 25 aa, Homo sapiens
KENYAELLEDAFLKNVTAQICIDKK

SEQ ID NO: 2962 - protein, 29 aa, Homo sapiens
KENSTLNCASFTAGIVEAVLTHSGFPAKV

SEQ ID NO: 2963 - protein, 30 aa, Homo sapiens
KEIRVLEFRSPKENDSGVDVYYAVTFNGEA

SEQ ID NO: 2964 - protein, 32 aa, Homo sapiens
KEGEHDLVQGSGQQPQAGLSQANFTLGPVSRS

SEQ ID NO: 2965 - protein, 21 aa, Homo sapiens
KECQHGGQCQVENGSAVCVCQ

SEQ ID NO: 2966 - protein, 26 aa, Homo sapiens
KDGSTTAGNSSQVSDGAAAILLARRS

SEQ ID NO: 2967 - protein, 29 aa, Homo sapiens
KDFHSEYIVSASNFTSQLSSQVEQFLHRN

SEQ ID NO: 2968 - protein, 17 aa, Homo sapiens
KDFANMTSLVDLTLSRN

SEQ ID NO: 2969 - protein, 17 aa, Homo sapiens
KDANISQPETTKEGLRA

SEQ ID NO: 2970 - protein, 16 aa, Homo sapiens
KCQAHSQNVTFVLRKV

SEQ ID NO: 2971 - protein, 33 aa, Homo sapiens
KCKPGYATADGNSSGSITCLQNGWSAQPICIKF

SEQ ID NO: 2972 - protein, 31 aa, Homo sapiens
KAVSLSVTVPVSHPVLNLSSPEDLIFEGAKV

SEQ ID NO: 2973 - protein, 30 aa, Homo sapiens
KAVEVATVVIQPTVLRAAVPKNVSVAEGKE

SEQ ID NO: 2974 - protein, 24 aa, Homo sapiens
KAREDIFMETLNNIMEYYNDSNGQ

SEQ ID NO: 2975 - protein, 28 aa, Homo sapiens
KALWNSSVPVCEQIFCPNPPAILNGRHT

SEQ ID NO: 2976 - protein, 18 aa, Homo sapiens
KAKSDQLLSSNENFTNKV

SEQ ID NO: 2977 - protein, 27 aa, Homo sapiens
KAGHSNKYLKMANNTKELEVCEQANKL

SEQ ID NO: 2978 - protein, 24 aa, Homo sapiens
KAENSHSHSDYINASPIMDHDPRN

SEQ ID NO: 2979 - protein, 23 aa, Homo sapiens
IWCEDFLVRSFYLKNLQTNETRT

SEQ ID NO: 2980 - protein, 26 aa, Homo sapiens
IITEGNGTESLNSVITSMKTGELEKE

SEQ ID NO: 2981 - protein, 25 aa, Homo sapiens
HAATTQYANGTVLSGQTTNIVTHRA

SEQ ID NO: 2982 - protein, 20 aa, Homo sapiens
GQTCNCSTGSLSDIQPCLRE

SEQ ID NO: 2983 - protein, 22 aa, Homo sapiens
FKNFVITYNRTYESKEEARWRL

SEQ ID NO: 2984 - protein, 13 aa, Homo sapiens
FGLFNTTSNIFRG

SEQ ID NO: 2985 - protein, 29 aa, Homo sapiens
DLLRTLNDTLGKLSAIPNDTAAKLQAVKD

SEQ ID NO: 2986 - protein, 26 aa, Homo sapiens
DAYYVYRLQVSSINVSVNAVQTVVRQ

SEQ ID NO: 2987 - protein, 18 aa, Homo sapiens
CNATNAIGSASVVTVLRV

SEQ ID NO: 2988 - protein, 37 aa, Homo sapiens
AQPIEPITAAPSGSGNGSGSSSSGGSSGGSGFCAVRA

SEQ ID NO: 2989 - protein, 13 aa, Homo sapiens
AIMNNMSLIIHRS

SEQ ID NO: 2990 - protein, 25 aa, Homo sapiens
NASLLIQNVTQEDTGSYTLHIIKRG

SEQ ID NO: 2991 - protein, 30 aa, Homo sapiens
YRPPDRSAPSWNTTGEVVVTMEPEVPIKKL

SEQ ID NO: 2992 - protein, 16 aa, Homo sapiens
YNRTDLTTAAPSPPRR

SEQ ID NO: 2993 - protein, 25 aa, Homo sapiens
YNQSTATTLFHSLPLLRYIFVRERV

SEQ ID NO: 2994 - protein, 22 aa, Homo sapiens
WEDTQNASQNKIKIVGLGLLRV

SEQ ID NO: 2995 - protein, 22 aa, Homo sapiens
VNALNFSVNYSEDFVELNAARY

SEQ ID NO: 2996 - protein, 33 aa, Homo sapiens
TQHFYLNFTITNLPYSQDKAQPGTTNYQRNKRN

SEQ ID NO: 2997 - protein, 14 aa, Homo sapiens
TNQTPPTYNKTNKF

SEQ ID NO: 2998 - protein, 15 aa, Homo sapiens
TNCTTEASMAIRPKT

SEQ ID NO: 2999 - protein, 12 aa, Homo sapiens
TMNPLIYNITRV

SEQ ID NO: 3000 - protein, 18 aa, Homo sapiens
TLTHATNFLNVMLQSNKS

SEQ ID NO: 3001 - protein, 39 aa, Homo sapiens
TITMIPNTLTGMQPLHTFNTFSGGQNSTNLPHGHSTTRV

SEQ ID NO: 3002 - protein, 29 aa, Homo sapiens
TDCGHTWNSPNCTDPKLLNGSVLGNHTKY

SEQ ID NO: 3003 - protein, 24 aa, Homo sapiens
SWPCNSSDCIVVDTVMCPNMPNKS

SEQ ID NO: 3004 - protein, 35 aa, Homo sapiens
SQISTSTMTVTHNSSVTSAASSVTITTTMHSEAKK

SEQ ID NO: 3005 - protein, 25 aa, Homo sapiens
SLPMSINVTDDIVYISTHPEASSRT

SEQ ID NO: 3006 - protein, 28 aa, Homo sapiens
SLERFIHGGANVTGFQLVDFNTPMVTKL

SEQ ID NO: 3007 - protein, 32 aa, Homo sapiens
RYSKETNIDPSENSTSNLPNCLINQMLSLNRT

SEQ ID NO: 3008 - protein, 36 aa, Homo sapiens
RYPIIMNKVVYVLLTSVSWLSGGINSTVQTSLAMRW

SEQ ID NO: 3009 - protein, 18 aa, Homo sapiens
RYLINSYDFVNDTLSLKH

SEQ ID NO: 3010 - protein, 24 aa, Homo sapiens
RYIVNPVNDTVVLSENIPLNTKIA

SEQ ID NO: 3011 - protein, 30 aa, Homo sapiens
RWLSSTGPECNCSLGNFDSQVGACGFNSRI

SEQ ID NO: 3012 - protein, 25 aa, Homo sapiens
RWHINFTTFFIDCMAAFGLAYDQKK

SEQ ID NO: 3013 - protein, 19 aa, Homo sapiens
RVYVNISHPDMVDFARGKT

SEQ ID NO: 3014 - protein, 31 aa, Homo sapiens
RVSGYLNLAADLAHNFTDGLAIGASFRGGRG

SEQ ID NO: 3015 - protein, 37 aa, Homo sapiens
RVSGAVATAVLWVLAALLAMPVMVLRTTGDLENTTKV

SEQ ID NO: 3016 - protein, 29 aa, Homo sapiens
RVQPAQNHSSLSNVSQAVASTTPLPPPKP

SEQ ID NO: 3017 - protein, 18 aa, Homo sapiens
RVMVHGRNHTPFLGHHSF

SEQ ID NO: 3018 - protein, 36 aa, Homo sapiens
RVKKMAMFVVAGFNLSSSLFIILLSYLFIFAAIFRI

SEQ ID NO: 3019 - protein, 30 aa, Homo sapiens
RVGVDPDQDPPPNNDSFQVLQGDSPDSARG

SEQ ID NO: 3020 - protein, 24 aa, Homo sapiens
RVGLFCGIFIVLNITLVLAAVFKL

SEQ ID NO: 3021 - protein, 28 aa, Homo sapiens
RVFYFMVGTAFANSTCQLIVCQMSSTRC

SEQ ID NO: 3022 - protein, 19 aa, Homo sapiens
RTSNTTITANTSDAYLNAS

SEQ ID NO: 3023 - protein, 25 aa, Homo sapiens
RTPRPASTHNGSVDTENDSCLQQTH

SEQ ID NO: 3024 - protein, 15 aa, Homo sapiens
RTNGDILVLYNLSKH

SEQ ID NO: 3025 - protein, 17 aa, Homo sapiens
RTMNFTYEVHLVADGKF

SEQ ID NO: 3026 - protein, 25 aa, Homo sapiens
RTITNVSDEVSSEEGPETGYSLRRH

SEQ ID NO: 3027 - protein, 29 aa, Homo sapiens
RTEAPEGTESEMETPSAINGNPSWHLADS

SEQ ID NO: 3028 - protein, 14 aa, Homo sapiens
RSNSSAANLMAKKR

SEQ ID NO: 3029 - protein, 18 aa, Homo sapiens
RSNLTSFGADQVMDLGRD

SEQ ID NO: 3030 - protein, 23 aa, Homo sapiens
RSLVPTLREMVAFLNVSVSEERL

SEQ ID NO: 3031 - protein, 32 aa, Homo sapiens
RSLKEAFSNFSSSTLTEVQAISTHGGSVGDKI

SEQ ID NO: 3032 - protein, 27 aa, Homo sapiens
RSLIASGLYGYNATLVGVLMAVFSDKG

SEQ ID NO: 3033 - protein, 22 aa, Homo sapiens
RSLAITLPEPNGSATGLTVWLH

SEQ ID NO: 3034 - protein, 25 aa, Homo sapiens
RSKDGPSYFTVSFNRTFLMMITNKA

SEQ ID NO: 3035 - protein, 23 aa, Homo sapiens
RSITNASAAIAPKDNLFIRFLKP

SEQ ID NO: 3036 - protein, 35 aa, Homo sapiens
RSEHTGACNPCTEGVDYTNASNNEPSCFPCTVCKS

SEQ ID NO: 3037 - protein, 16 aa, Homo sapiens
RRYTNSSADNEECRVP

SEQ ID NO: 3038 - protein, 24 aa, Homo sapiens
RRVYDFVGLLVSPEMEQFALNMTS

SEQ ID NO: 3039 - protein, 23 aa, Homo sapiens
RRRGRPRGNNLSTISDTSPMKRS

SEQ ID NO: 3040 - protein, 16 aa, Homo sapiens
RRNSNGTTTETEVRKR

SEQ ID NO: 3041 - protein, 18 aa, Homo sapiens
RRNNSIRRNNSSLMVPKV

SEQ ID NO: 3042 - protein, 18 aa, Homo sapiens
RRNCTLVTEFILLGLTSR

SEQ ID NO: 3043 - protein, 15 aa, Homo sapiens
RRIWEETGNYTFSSD

SEQ ID NO: 3044 - protein, 27 aa, Homo sapiens
RRGDNDSHQGDLEPILEASVLSSHHKK

SEQ ID NO: 3045 - protein, 15 aa, Homo sapiens
RRDRDNDSDDVESNL

SEQ ID NO: 3046 - protein, 10 aa, Homo sapiens
RQRNASRDQV

SEQ ID NO: 3047 - protein, 14 aa, Homo sapiens
RQNMCPAHQNRSLA

SEQ ID NO: 3048 - protein, 34 aa, Homo sapiens
RQNIAIEVDAFGTRNGTDDPSYNGAIIVSGDEKD

SEQ ID NO: 3049 - protein, 40 aa, Homo sapiens
RQNNTSLRLGVYAALGILQGFLVMLAAMAMAAGGIQAARV

SEQ ID NO: 3050 - protein, 25 aa, Homo sapiens
RNVNFNGSAGTPVMFNKNGDAPGRY

SEQ ID NO: 3051 - protein, 24 aa, Homo sapiens
RNVDSNLANLIMNEIVDNGTAVKF

SEQ ID NO: 3052 - protein, 14 aa, Homo sapiens
RNSNVSQASMSSRM

SEQ ID NO: 3053 - protein, 26 aa, Homo sapiens
RNSKNCTEPALHEFPNDIFTNEDRRQ

SEQ ID NO: 3054 - protein, 24 aa, Homo sapiens
RNVTVGPPENIEVTPGEGSLIIRF

SEQ ID NO: 3055 - protein, 17 aa, Homo sapiens
RNTSPDTNYTLYYWHRS

SEQ ID NO: 3056 - protein, 33 aa, Homo sapiens
RNRSYVFSSLATSAVSFATGALGMWIPLYLHRA

SEQ ID NO: 3057 - protein, 22 aa, Homo sapiens
RNNSKGYMKLENKEDPMDRLLV

SEQ ID NO: 3058 - protein, 25 aa, Homo sapiens
RNLSVDGKNVDMAGFIANNGTREGC

SEQ ID NO: 3059 - protein, 13 aa, Homo sapiens
RNLSTCFSSGDLF

SEQ ID NO: 3060 - protein, 20 aa, Homo sapiens
RNLSFLDLCFTTSIIPQMLV

SEQ ID NO: 3061 - protein, 21 aa, Homo sapiens
RNGSDDPSYNGAIIVSGDQKD

SEQ ID NO: 3062 - protein, 33 aa, Homo sapiens
RMWRRATVAAGNSVVQVVNVSRLEGDDNPVQLI

SEQ ID NO: 3063 - protein, 24 aa, Homo sapiens
RMKRGYDNPNFILSEVNETDDTKM

SEQ ID NO: 3064 - protein, 18 aa, Homo sapiens
RMFTNPDNGSPAMTHRNL

SEQ ID NO: 3065 - protein, 18 aa, Homo sapiens
RMDKPANCTHDLYMIMRE

SEQ ID NO: 3066 - protein, 17 aa, Homo sapiens
RMCQAGNATVKQSRYRI

SEQ ID NO: 3067 - protein, 36 aa, Homo sapiens
RLYMLSFLPFLVLLVLIRNLRILTIFSMLANISMLV

SEQ ID NO: 3068 - protein, 25 aa, Homo sapiens
RLVSNDSFISIQPSLSSCGQDLPRD

SEQ ID NO: 3069 - protein, 25 aa, Homo sapiens
RLSYNVIPLNLTLDNRVADQLWVPD

SEQ ID NO: 3070 - protein, 18 aa, Homo sapiens
RLMRQLLVINESIESIKW

SEQ ID NO: 3071 - protein, 27 aa, Homo sapiens
RLLNLSLNSEVVLDQDAIDVIIHVARN

SEQ ID NO: 3072 - protein, 23 aa, Homo sapiens
RLCQTCYPLFQQVVSKMDNISRA

SEQ ID NO: 3073 - protein, 30 aa, Homo sapiens
RLAVTNLTAVNLLAYVGDLVYSAHLVFVKV

SEQ ID NO: 3074 - protein, 14 aa, Homo sapiens
RLAENSGNASTERN

SEQ ID NO: 3075 - protein, 24 aa, Homo sapiens
RKTNELPSDSSSSSDLINTSIASS

SEQ ID NO: 3076 - protein, 37 aa, Homo sapiens
RKQPMTLTVTSFNASTGRVNATLSNSNMELLLSGVYK

SEQ ID NO: 3077 - protein, 40 aa, Homo sapiens
RKQAGPLLSGDPHLLPPAASPKGASVSINVNTSLEDMRSN

SEQ ID NO: 3078 - protein, 13 aa, Homo sapiens
RKNKSVWITISST

SEQ ID NO: 3079 - protein, 21 aa, Homo sapiens
RKLLFLSPDLELNSSSSHNTL

SEQ ID NO: 3080 - protein, 21 aa, Homo sapiens
RKGIIDVNLYNETVETLMAGE

SEQ ID NO: 3081 - protein, 22 aa, Homo sapiens
RIYPGPTRLANSTIKDESPPRY

SEQ ID NO: 3082 - protein, 25 aa, Homo sapiens
RIVDGIEDGNSSEESQTFDFGSERI

SEQ ID NO: 3083 - protein, 30 aa, Homo sapiens
RILSNMTFLFVSLSYTAESAIVTAFITFIP

SEQ ID NO: 3084 - protein, 32 aa, Homo sapiens
RIDSQLHTPMYFFLANLSFVDVCNSTTITPKM

SEQ ID NO: 3085 - protein, 27 aa, Homo sapiens
RIAQKGGAEAMLVVNNSVLFPPSGNRS

SEQ ID NO: 3086 - protein, 27 aa, Homo sapiens
RIAENYTAVVSPDIASIDLNTFEFNKP

SEQ ID NO: 3087 - protein, 33 aa, Homo sapiens
RHCSVNGTWTGSDPECLVINCGDPGIPANGLRL

SEQ ID NO: 3088 - protein, 33 aa, Homo sapiens
RGYPGQVCANDSDTLELPDSSRALLLGWVPTRL

SEQ ID NO: 3089 - protein, 24 aa, Homo sapiens
RGSDDGDGESFNGSPTGSINLSLD

SEQ ID NO: 3090 - protein, 26 aa, Homo sapiens
RGQGTASSGNVSDLAQTVKTFDNLKT

SEQ ID NO: 3091 - protein, 19 aa, Homo sapiens
RGNIYPGNDTFDIDPEIET

SEQ ID NO: 3092 - protein, 24 aa, Homo sapiens
RGERHGDIFMNRTENWIGSQYKKV

SEQ ID NO: 3093 - protein, 22 aa, Homo sapiens
RFYKFNTSLAGDLTNLVHGSHC

SEQ ID NO: 3094 - protein, 28 aa, Homo sapiens
RFYISKGAVVDQLGGDLNSTPLHWAIRQ

SEQ ID NO: 3095 - protein, 19 aa, Homo sapiens
RFRDIPNTSSMENPAPNKN

SEQ ID NO: 3096 - protein, 28 aa, Homo sapiens
RFPGVMENLTISAAHWLTAPAPRPRPRR

SEQ ID NO: 3097 - protein, 33 aa, Homo sapiens
RFLIEDINDNAPLFPATVINISIPENSAINSKY

SEQ ID NO: 3098 - protein, 12 aa, Homo sapiens
RFINSTFLEQKE

SEQ ID NO: 3099 - protein, 25 aa, Homo sapiens
RFIDSSNPGLQISLNVNNTEHVVSI

SEQ ID NO: 3100 - protein, 25 aa, Homo sapiens
RFDGILADAGQTVENMSWMLVCDRP

SEQ ID NO: 3101 - protein, 25 aa, Homo sapiens
RFCHEVKINYSPYVNYFTRVYWNRS

SEQ ID NO: 3102 - protein, 16 aa, Homo sapiens
RFAVQLYNTNQNTTEK

SEQ ID NO: 3103 - protein, 13 aa, Homo sapiens
REWNGTYHCIFRY

SEQ ID NO: 3104 - protein, 25 aa, Homo sapiens
RETPPLEDLAANQSEDPRNQRLSKN

SEQ ID NO: 3105 - protein, 21 aa, Homo sapiens
RETGDNFSDVAIQGGIMGIEI

SEQ ID NO: 3106 - protein, 34 aa, Homo sapiens
RERESFLAPSSGVQPTLAMPNIAVGQNVTVTERV

SEQ ID NO: 3107 - protein, 20 aa, Homo sapiens
REQLSSANHSLQLASQIQKA

SEQ ID NO: 3108 - protein, 19 aa, Homo sapiens
REPGTSSTSNLSSTSHERL

SEQ ID NO: 3109 - protein, 28 aa, Homo sapiens
REPAQGLFGTVTVQFIVTEVNSSNESKD

SEQ ID NO: 3110 - protein, 10 aa, Homo sapiens
RENETEIIKC

SEQ ID NO: 3111 - protein, 32 aa, Homo sapiens
RELGGAIDFGAAYVLEQASSHIGNSTQATVRD

SEQ ID NO: 3112 - protein, 25 aa, Homo sapiens
RELDLPSQDNVSLTSTETPPPLYVG

SEQ ID NO: 3113 - protein, 28 aa, Homo sapiens
RELAITDSEHSDAEVSCTDNGTFNLSRG

SEQ ID NO: 3114 - protein, 22 aa, Homo sapiens
REHMESNLFLSCATNQSPVEKD

SEQ ID NO: 3115 - protein, 27 aa, Homo sapiens
REGDNRERALNTTQPGSLQLTVGNLKP

SEQ ID NO: 3116 - protein, 33 aa, Homo sapiens
REDFHYNDTAGYFIIGGSRYVAGIEGFFGPLKY

SEQ ID NO: 3117 - protein, 24 aa, Homo sapiens
REDCNGIFRINVSVSKNLNLKLRP

SEQ ID NO: 3118 - protein, 21 aa, Homo sapiens
REALNISSSISESGGLNWKMT

SEQ ID NO: 3119 - protein, 29 aa, Homo sapiens
RDRLALANESGVTLMPDGSLHLAALPSRR

SEQ ID NO: 3120 - protein, 32 aa, Homo sapiens
RDLDGFLAQASIVLNETATSLDNVLRTMLRRF

SEQ ID NO: 3121 - protein, 40 aa, Homo sapiens
RDGTLEYAPVDITVNLDASGSQCGLHSPLQSDNATDSPKS

SEQ ID NO: 3122 - protein, 24 aa, Homo sapiens
RCPQCDCITLQNVSAGLNHHQTFS

SEQ ID NO: 3123 - protein, 27 aa, Homo sapiens
RCITCAVVGNGGILNNSHIGQEIDSHD

SEQ ID NO: 3124 - protein, 19 aa, Homo sapiens
RCEALCGGNITAMNGTIYS

SEQ ID NO: 3125 - protein, 26 aa, Homo sapiens
RAVFIQGAEEHPAAFCYQVNGSCPRT

SEQ ID NO: 3126 - protein, 23 aa, Homo sapiens
RANASFTWVASDGWGAQESIIKG

SEQ ID NO: 3127 - protein, 24 aa, Homo sapiens
RALQWNAGSGGLPENETTFARILQ

SEQ ID NO: 3128 - protein, 16 aa, Homo sapiens
QVGIYNGTHVIPNDRK

SEQ ID NO: 3129 - protein, 31 aa, Homo sapiens
QSTMLDTNSWIFACINSTSMCLQGVDLSWKA

SEQ ID NO: 3130 - protein, 14 aa, Homo sapiens
QNITEEIPMEVFKE

SEQ ID NO: 3131 - protein, 26 aa, Homo sapiens
QKAMFDHLSYLLENSSVGLASPAMRG

SEQ ID NO: 3132 - protein, 10 aa, Homo sapiens
PTNETTFAKL

SEQ ID NO: 3133 - protein, 30 aa, Homo sapiens
PSSLIQANVTVGTCSGFCSQKEFPLAILRG

SEQ ID NO: 3134 - protein, 27 aa, Homo sapiens
PSSEVMNKSRCESLLFNESMLWENAKM

SEQ ID NO: 3135 - protein, 34 aa, Homo sapiens
PRFSILPMSHEIMPGGNVNITCVAVGSPMPYVKW

SEQ ID NO: 3136 - protein, 27 aa, Homo sapiens
PHMLPEDGANLSSARGILSLIQSSTRR

SEQ ID NO: 3137 - protein, 19 aa, Homo sapiens
PGNLPPSMNLSQLLGLRKN

SEQ ID NO: 3138 - protein, 16 aa, Homo sapiens
PDNASGCGEQINYGRV

SEQ ID NO: 3139 - protein, 9 aa, Homo sapiens
NVGQNTTRF

SEQ ID NO: 3140 - protein, 20 aa, Homo sapiens
NTSAPPAVSPNITVLAPGKG

SEQ ID NO: 3141 - protein, 14 aa, Homo sapiens
NQAGDTSNQSSGPH

SEQ ID NO: 3142 - protein, 35 aa, Homo sapiens
NPDASYNLGVLHLDGIFPGVPGRNQTLAGEIFHKA

SEQ ID NO: 3143 - protein, 15 aa, Homo sapiens
NNYTAVFLGTVNGRL

SEQ ID NO: 3144 - protein, 19 aa, Homo sapiens
NNATNESYVDTAAMEAERL

SEQ ID NO: 3145 - protein, 15 aa, Homo sapiens
NEINNMSFLTADNKS

SEQ ID NO: 3146 - protein, 26 aa, Homo sapiens
NDQLSEIEEFFYINLTSVEIRGLQKF

SEQ ID NO: 3147 - protein, 25 aa, Homo sapiens
NCTCVGIAASKSGNSSGIVGRCQKD

SEQ ID NO: 3148 - protein, 23 aa, Homo sapiens
MYFFLANLSLADACFVSTTVPKM

SEQ ID NO: 3149 - protein, 26 aa, Homo sapiens
MWSHMQPHLFHNQSVLAEQMALNKKF

SEQ ID NO: 3150 - protein, 38 aa, Homo sapiens
MVVTLTELPSGNDTSGLENKTVVVTTILESPYVMMKKN

SEQ ID NO: 3151 - protein, 26 aa, Homo sapiens
MVVLCASTLPDWRNAAADNRSLDDRS

SEQ ID NO: 3152 - protein, 27 aa, Homo sapiens
MTVKVDGVAQDGTTMYIHNKVHNRTRT

SEQ ID NO: 3153 - protein, 20 aa, Homo sapiens
MTSWISPAVNNSDFWTYRKN

SEQ ID NO: 3154 - protein, 29 aa, Homo sapiens
MTMALSVLVTIEMCNALNSLSENQSLLRM

SEQ ID NO: 3155 - protein, 27 aa, Homo sapiens
MTLTNLSGPYSYCNTTLDQIGTCWPRS

SEQ ID NO: 3156 - protein, 25 aa, Homo sapiens
MTIWILKVMNFTIDGMGNLRITEKG

SEQ ID NO: 3157 - protein, 26 aa, Homo sapiens
MTGVADNGSVLEITPDVAEVYLVRKN

SEQ ID NO: 3158 - protein, 37 aa, Homo sapiens
MTATHHFSVDLNASRSLSQVAMDLHEAVSMKLHRVRE

SEQ ID NO: 3159 - protein, 28 aa, Homo sapiens
MSGTLVMLLNDSADLRDLATSMDSIVKL

SEQ ID NO: 3160 - protein, 23 aa, Homo sapiens
MRPHEDLSEDNSSGEVVMRVTSV

SEQ ID NO: 3161 - protein, 18 aa, Homo sapiens
MQTCGNVSNQFQLGTCRL

SEQ ID NO: 3162 - protein, 34 aa, Homo sapiens
MQAPAFRDKKQGVSAKNQGAHDPDYENITLAFKN

SEQ ID NO: 3163 - protein, 15 aa, Homo sapiens
MPRPNQTILVDVARN

SEQ ID NO: 3164 - protein, 31 aa, Homo sapiens
MNNVTLGNAHMGYYETVAGGAGAGPSWHGRS

SEQ ID NO: 3165 - protein, 31 aa, Homo sapiens
MNNNSGAPATAPDSAGQPPALGPVFELVSKE

SEQ ID NO: 3166 - protein, 27 aa, Homo sapiens
MNIMSTLQWAVNSSIDVDSLMRSVSRV

SEQ ID NO: 3167 - protein, 20 aa, Homo sapiens
MNYSVSAGLVVGIFIGFQKK

SEQ ID NO: 3168 - protein, 17 aa, Homo sapiens
MNVSGGPITREASKEIP

SEQ ID NO: 3169 - protein, 30 aa, Homo sapiens
MNNSESHFVPNSLIGMGVLSCVFNSLAGKI

SEQ ID NO: 3170 - protein, 24 aa, Homo sapiens
MKNKRNVTEFVLTGLTQNPKMEKV

SEQ ID NO: 3171 - protein, 28 aa, Homo sapiens
MIYIPNATASLNLALSLLLFLEIYNERV

SEQ ID NO: 3172 - protein, 22 aa, Homo sapiens
MITMVCCAHSTNEPSNMSYVKE

SEQ ID NO: 3173 - protein, 32 aa, Homo sapiens
MIQTAHVGVGISGNEGLQAANSSDYSIAQFKY

SEQ ID NO: 3174 - protein, 19 aa, Homo sapiens
MINFSAFLGAATMYTRYKI

SEQ ID NO: 3175 - protein, 32 aa, Homo sapiens
MIILAGINFTYSLTVIIISYLFILIAILRMRS

SEQ ID NO: 3176 - protein, 33 aa, Homo sapiens
MIHNCSLIASALTISNIQAGSTGNWGCHVQTKR

SEQ ID NO: 3177 - protein, 14 aa, Homo sapiens
MIFDFYKQNKTTRD

SEQ ID NO: 3178 - protein, 16 aa, Homo sapiens
MHAVVFGNVTAIIQRM

SEQ ID NO: 3179 - protein, 27 aa, Homo sapiens
MGNSTDPGPMLAIPAMATNPQNAASRR

SEQ ID NO: 3180 - protein, 14 aa, Homo sapiens
MGDVNQSVASDFIL

SEQ ID NO: 3181 - protein, 21 aa, Homo sapiens
MFPKNFTNCTWTLENPDPTKY

SEQ ID NO: 3182 - protein, 25 aa, Homo sapiens
MFCINICTVYCNNSFPIHSSNSTKK

SEQ ID NO: 3183 - protein, 13 aa, Homo sapiens
MEEVRKVNESIKY

SEQ ID NO: 3184 - protein, 13 aa, Homo sapiens
MDNVTGGMETSRQ

SEQ ID NO: 3185 - protein, 21 aa, Homo sapiens
MDLTLNSSTATPVSPGSVTKE

SEQ ID NO: 3186 - protein, 31 aa, Homo sapiens
MDFGDSSGVEMRLHNMSEAMAVTAYHQYSKG

SEQ ID NO: 3187 - protein, 19 aa, Homo sapiens
MCVETFSNYSLLGHFAVRH

SEQ ID NO: 3188 - protein, 32 aa, Homo sapiens
MCPMLLKNGYNGNATPVTTTAPWASLGLSAKT

SEQ ID NO: 3189 - protein, 27 aa, Homo sapiens
MAPMNQSQVLMSGSPLELNSLGEEQRI

SEQ ID NO: 3190 - protein, 35 aa, Homo sapiens
MAILFNNMLSGQWTMTNTTNQYSSLMIMMAMAMKL

SEQ ID NO: 3191 - protein, 33 aa, Homo sapiens
MAAGPLLVPFTLNFTITNLQYGEDMGHPGSRKF

SEQ ID NO: 3192 - protein, 25 aa, Homo sapiens
LWLALDYVVSNASVMNLLIISFDRY

SEQ ID NO: 3193 - protein, 21 aa, Homo sapiens
LTSLSVTNTNLSTVPFLAFKH

SEQ ID NO: 3194 - protein, 24 aa, Homo sapiens
LSSLSPVNSSNHGPVSTGSLTNRS

SEQ ID NO: 3195 - protein, 13 aa, Homo sapiens
LQVEQQLANITVS

SEQ ID NO: 3196 - protein, 22 aa, Homo sapiens
LNRIPGVPGSMPNASWTGNLRA

SEQ ID NO: 3197 - protein, 20 aa, Homo sapiens
LMNSSGLWVLGGSIAQGFRS

SEQ ID NO: 3198 - protein, 24 aa, Homo sapiens
LLEGQDSGNSNGNASINITDISRN

SEQ ID NO: 3199 - protein, 36 aa, Homo sapiens
LKLGVVPVYYGSPSITDWLPSNKSAILVSEFSHPRE

SEQ ID NO: 3200 - protein, 31 aa, Homo sapiens
LGNTKDFIISFDLKFLTNGSVSVVLETTEKN

SEQ ID NO: 3201 - protein, 16 aa, Homo sapiens
LGLNLSEGDGEEVYHF

SEQ ID NO: 3202 - protein, 29 aa, Homo sapiens
LFDNAAQPYSNLSNLDVLNQVIRERDTKL

SEQ ID NO: 3203 - protein, 26 aa, Homo sapiens
LEEDSVVHSVENDSQNMMESLSPKKY

SEQ ID NO: 3204 - protein, 38 aa, Homo sapiens
LDLSMNNISQLLPNPLPSLRFLEELRLAGNALTYIPKG

SEQ ID NO: 3205 - protein, 22 aa, Homo sapiens
LDCPSSIIGMGLGNASTGYGKI

SEQ ID NO: 3206 - protein, 16 aa, Homo sapiens
KYNVTVIQYIGELLRY

SEQ ID NO: 3207 - protein, 37 aa, Homo sapiens
KYKSVYVGEETNITLNDLKPAMDYHAKVQAEYNSIKG

SEQ ID NO: 3208 - protein, 26 aa, Homo sapiens
KYHFSNLVSPTNLSQFNLPGPSMMRS

SEQ ID NO: 3209 - protein, 16 aa, Homo sapiens
KYFWNDTIHNFDFLKG

SEQ ID NO: 3210 - protein, 23 aa, Homo sapiens
KVWKKIGIWNSNSGLNMTDSNKD

SEQ ID NO: 3211 - protein, 26 aa, Homo sapiens
KVVNPQEYSSNCTEPFPNSTNLLPTE

SEQ ID NO: 3212 - protein, 25 aa, Homo sapiens
KVSQQLGLDAPNGSDSSPQAPPPRR

SEQ ID NO: 3213 - protein, 44 aa, Homo sapiens
KVSLGAVYFFMNGTYGLAFWYGTSLILNGEPGYTIGTVLAVKRK

SEQ ID NO: 3214 - protein, 14 aa, Homo sapiens
KVSKNDTEEESNKS

SEQ ID NO: 3215 - protein, 31 aa, Homo sapiens
KVSGYLNLLANTIDNFTHGLAVAASFLVSKK

SEQ ID NO: 3216 - protein, 28 aa, Homo sapiens
KVPPTVCPFHSLNNVTKAGEGSWLESKR

SEQ ID NO: 3217 - protein, 18 aa, Homo sapiens
KVFISNSTNSSNPCERRS

SEQ ID NO: 3218 - protein, 30 aa, Homo sapiens
KVDNLVVNGTGTNSTNSTTAVPSLVALEKI

SEQ ID NO: 3219 - protein, 25 aa, Homo sapiens
KVAKNAQNINPSSSQNSQNFATYKE

SEQ ID NO: 3220 - protein, 30 aa, Homo sapiens
KTVRTTEEAPSAPPQSVTVLTVGSYNSTSI

SEQ ID NO: 3221 - protein, 26 aa, Homo sapiens
KTSATSVNLSLLTADLYSLFCGLFLF

SEQ ID NO: 3222 - protein, 26 aa, Homo sapiens
KTRYQAGMRNSENLTANNTLSKPTRY

SEQ ID NO: 3223 - protein, 16 aa, Homo sapiens
KTPSVSPNITQLFQKQ

SEQ ID NO: 3224 - protein, 26 aa, Homo sapiens
KTNRTNKPSTPTTATRKKKDLKNFRN

SEQ ID NO: 3225 - protein, 25 aa, Homo sapiens
KTNDTYMKFSWLTVPEESLDKEHRC

SEQ ID NO: 3226 - protein, 19 aa, Homo sapiens
KTLEELHLTGNLSAENNRY

SEQ ID NO: 3227 - protein, 23 aa, Homo sapiens
KTFLHYDCGNKTVTPVSPLGKKL

SEQ ID NO: 3228 - protein, 33 aa, Homo sapiens
KTFKNESENTCQDMTFSTWTPPPGVHSQTLSRF

SEQ ID NO: 3229 - protein, 20 aa, Homo sapiens
KSVTIQAPGEPLLDNESTRG

SEQ ID NO: 3230 - protein, 29 aa, Homo sapiens
KSVGIFLGIFSGSFTMGAVTGVNANVTKF

SEQ ID NO: 3231 - protein, 36 aa, Homo sapiens
KSSLLLAILGEMQTLEGKVHWSNVNESEPSFEATRS

SEQ ID NO: 3232 - protein, 36 aa, Homo sapiens
KSPMQWDNSSNAGFSEASNTWLPTNSDYHTVNVDVQ

SEQ ID NO: 3233 - protein, 33 aa, Homo sapiens
KSKEQNVSDDPESTGFLYPYNDLLVWAVLMKRQ

SEQ ID NO: 3234 - protein, 27 aa, Homo sapiens
KSHSNLSTKMSTLSYRPSDNVSSSTKK

SEQ ID NO: 3235 - protein, 28 aa, Homo sapiens
KSCVSNIESTLSALQYVSSIVVSLENRS

SEQ ID NO: 3236 - protein, 33 aa, Homo sapiens
KRYNGSDPASGPSVQDKYVTALYFTFSSLTSVG

SEQ ID NO: 3237 - protein, 33 aa, Homo sapiens
KRQPATLTVDWFNATSSKVNATFSEASPVELKL

SEQ ID NO: 3238 - protein, 18 aa, Homo sapiens
KRNETLVFSHNAVIAMRD

SEQ ID NO: 3239 - protein, 34 aa, Homo sapiens
KRLVSMNMPLNSDGTVMFNATLFALVRTALRIKT

SEQ ID NO: 3240 - protein, 21 aa, Homo sapiens
KRKEAELRSGIIRNNSLWDRL

SEQ ID NO: 3241 - protein, 30 aa, Homo sapiens
KRGRGNFGGQSEQENTLNQLLVEMDGFNTT

SEQ ID NO: 3242 - protein, 12 aa, Homo sapiens
KRGNTTLESTDT

SEQ ID NO: 3243 - protein, 21 aa, Homo sapiens
KQTESSFMAGDINSTPTLNRG

SEQ ID NO: 3244 - protein, 24 aa, Homo sapiens
KQTDVINASWWVMSNKTRDELERS

SEQ ID NO: 3245 - protein, 25 aa, Homo sapiens
KQSESSFITGDINSSASLNREGLLN

SEQ ID NO: 3246 - protein, 29 aa, Homo sapiens
KQRMEPLYSLNVSVSDGLFTSTAQVHIRV

SEQ ID NO: 3247 - protein, 21 aa, Homo sapiens
KQPSSPLANTTYNIFIMDGKT

SEQ ID NO: 3248 - protein, 30 aa, Homo sapiens
KQNSSPPSSLNKNNSAIDSGINLTTDTSKS

SEQ ID NO: 3249 - protein, 24 aa, Homo sapiens
KQISESTNHIYSNLANCSPNRQKP

SEQ ID NO: 3250 - protein, 14 aa, Homo sapiens
KNYNTNITTETSKI

SEQ ID NO: 3251 - protein, 26 aa, Homo sapiens
KNNGFFQKLNVTEGAMQDLLKEIIKV

SEQ ID NO: 3252 - protein, 15 aa, Homo sapiens
KNNYSPTAAGTERRK

SEQ ID NO: 3253 - protein, 35 aa, Homo sapiens
KNMALFEEEMDTSPMVSSLLSGLANYTNLPQGSRE

SEQ ID NO: 3254 - protein, 27 aa, Homo sapiens
KNLDLILPTLRNYTVINSKIIVVTIRP

SEQ ID NO: 3255 - protein, 20 aa, Homo sapiens
KNIGDDGGGDDNTFNFSWKV

SEQ ID NO: 3256 - protein, 25 aa, Homo sapiens
KNGRYQPSIPPHAAVAANQSRARRG

SEQ ID NO: 3257 - protein, 17 aa, Homo sapiens
KNWTAALFTGNLLLARD

SEQ ID NO: 3258 - protein, 32 aa, Homo sapiens
KNWSALLTAVVIILTIAGNILVIMAVSLEKKL

SEQ ID NO: 3259 - protein, 34 aa, Homo sapiens
KNSTFTYFTSDHGGHLEARDGHSQLGGWNGIYKG

SEQ ID NO: 3260 - protein, 27 aa, Homo sapiens
KNLSEMQDLEEIRKITGVCPQFNVQFD

SEQ ID NO: 3261 - protein, 30 aa, Homo sapiens
KNKTTCLRGSDTAALVPVPLATPLLLEGRS

SEQ ID NO: 3262 - protein, 17 aa, Homo sapiens
KNISNPEAYDHCFEKKE

SEQ ID NO: 3263 - protein, 22 aa, Homo sapiens
KNGTIFTISPVLLLDTISTTRF

SEQ ID NO: 3264 - protein, 26 aa, Homo sapiens
KNGSGNAIIIVVGGAAESLSSMPGKN

SEQ ID NO: 3265 - protein, 26 aa, Homo sapiens
KMSHPPNIPKEQTPAGTSNTTSVSVK

SEQ ID NO: 3266 - protein, 32 aa, Homo sapiens
KMPGDIKNWVDAHMNCEDIAMNFLVANVTGKA

SEQ ID NO: 3267 - protein, 28 aa, Homo sapiens
KMNELENKAEPGTHLCIDVEDAMNITRK

SEQ ID NO: 3268 - protein, 19 aa, Homo sapiens
KMNCNNRNVSSLADLKPKL

SEQ ID NO: 3269 - protein, 23 aa, Homo sapiens
KMLMGINVTPIAALLYTPVLIRF

SEQ ID NO: 3270 - protein, 25 aa, Homo sapiens
KMAAVTLLALAYTQGPVLFNLTFKI

SEQ ID NO: 3271 - protein, 39 aa, Homo sapiens
KLVPSSSYVAVAPVKSSPTTSVPAVSSPPMGNQSGQSVP

SEQ ID NO: 3272 - protein, 17 aa, Homo sapiens
KLVPLGVFTGLSNLTKL

SEQ ID NO: 3273 - protein, 32 aa, Homo sapiens
KLREQVNSMVDISKMHMILYDLQQNLSSSHRA

SEQ ID NO: 3274 - protein, 23 aa, Homo sapiens
KLQNAENDYINASLVDIEEAQRS

SEQ ID NO: 3275 - protein, 18 aa, Homo sapiens
KLNQLYNCSSSLSFMDSC

SEQ ID NO: 3276 - protein, 20 aa, Homo sapiens
KLNNTMNACAAIAALERVKI

SEQ ID NO: 3277 - protein, 13 aa, Homo sapiens
KLMQNSTSPPLKL

SEQ ID NO: 3278 - protein, 22 aa, Homo sapiens
KLMISSYSGSVDIVNTTDGCHE

SEQ ID NO: 3279 - protein, 18 aa, Homo sapiens
KLLYLTTTNESGVFITGH

SEQ ID NO: 3280 - protein, 22 aa, Homo sapiens
KLLLIRAGKLLVINHSSPLPGD

SEQ ID NO: 3281 - protein, 19 aa, Homo sapiens
KLKTNVTFPLDILLLSFKA

SEQ ID NO: 3282 - protein, 38 aa, Homo sapiens
KLHCNSACLTNTTHCPEEASVGNPEGAFMKVLQARKNY

SEQ ID NO: 3283 - protein, 30 aa, Homo sapiens
KLGVSSVPSCYLIYPNGSHGLINVVKPLRA

SEQ ID NO: 3284 - protein, 23 aa, Homo sapiens
KLENSKNGTAGLIPSPELQEWRV

SEQ ID NO: 3285 - protein, 36 aa, Homo sapiens
KKVLVAPPPDEEANATSAVVSLLNETVTEVPEETKM

SEQ ID NO: 3286 - protein, 45 aa, Homo sapiens
KKQPGQPRPTSKPPASGAAANVSTSGITPGQAAAIASTTIMVPFG

SEQ ID NO: 3287 - protein, 16 aa, Homo sapiens
KKQNDSVIAECSNRRL

SEQ ID NO: 3288 - protein, 23 aa, Homo sapiens
KKNSDGMEAAGVQIQMVNESLGY

SEQ ID NO: 3289 - protein, 16 aa, Homo sapiens
KKNNLPFLTNVTLPRS

SEQ ID NO: 3290 - protein, 27 aa, Homo sapiens
KKNKNSSKPQKNNGSTWANVPLPPPPV

SEQ ID NO: 3291 - protein, 22 aa, Homo sapiens
KKEIYMHTGNSSTPRGEGGSCY

SEQ ID NO: 3292 - protein, 26 aa, Homo sapiens
KKDLSCSNFSLLAYQFDHFSHEKIKD

SEQ ID NO: 3293 - protein, 31 aa, Homo sapiens
KKAADTAVGWALGYMLNLTNLIPADPPGLRK

SEQ ID NO: 3294 - protein, 18 aa, Homo sapiens
KINRTLETANCMSSQTKN

SEQ ID NO: 3295 - protein, 14 aa, Homo sapiens
KINNSTNEGMNVKK

SEQ ID NO: 3296 - protein, 27 aa, Homo sapiens
KIKLRSAMYLSNTTVTILANLVPFTLT

SEQ ID NO: 3297 - protein, 30 aa, Homo sapiens
KIILNALVAQQKNGSPAGGDAKELDSKSKG

SEQ ID NO: 3298 - protein, 39 aa, Homo sapiens
KIIKSLQKNGSVVAMTGDGVNDAVALKAADIGVAMGQTG

SEQ ID NO: 3299 - protein, 34 aa, Homo sapiens
KIHQGTLTILSLNSSLLGYYQCLANNSIGAIVSG

SEQ ID NO: 3300 - protein, 32 aa, Homo sapiens
KIHHIPDYAFGNLSSLVVLHLHNNRIHSLGKK

SEQ ID NO: 3301 - protein, 25 aa, Homo sapiens
KIFQIYKGNFTGSVEPEPSTLTPRT

SEQ ID NO: 3302 - protein, 18 aa, Homo sapiens
KIENYINESTEAQSEQKE

SEQ ID NO: 3303 - protein, 29 aa, Homo sapiens
KIARLGNGSQDLNHGVDNENGGRRGPNRT

SEQ ID NO: 3304 - protein, 30 aa, Homo sapiens
KHQVEALKNMQHQNQSLSMLDEILEDVRKA

SEQ ID NO: 3305 - protein, 27 aa, Homo sapiens
KHPMANITWMANHTGWSDFILLGLFRQ

SEQ ID NO: 3306 - protein, 36 aa, Homo sapiens
KHAAFFADAEGYFAACTTDTTMNSSLSEPLYVPVKF

SEQ ID NO: 3307 - protein, 20 aa, Homo sapiens
KGTNVSAPDQLSLALAWNRV

SEQ ID NO: 3308 - protein, 27 aa, Homo sapiens
KGTGSWTQLYLITDYHENGSLYDYLKS

SEQ ID NO: 3309 - protein, 26 aa, Homo sapiens
KGPIGPGEPLELLCNVSGALPPAGRH

SEQ ID NO: 3310 - protein, 19 aa, Homo sapiens
KGPGEVIPGGNHSLYSLKG

SEQ ID NO: 3311 - protein, 19 aa, Homo sapiens
KGLYQGFNMSVQGIIIYRA

SEQ ID NO: 3312 - protein, 18 aa, Homo sapiens
KGKPVNMTKATVNYRQEK

SEQ ID NO: 3313 - protein, 23 aa, Homo sapiens
KGILYGTMTLELGGTVNITCQKT

SEQ ID NO: 3314 - protein, 23 aa, Homo sapiens
KGIAILNTSVAPMLNPFIYTLRN

SEQ ID NO: 3315 - protein, 26 aa, Homo sapiens
KFSIAILPFSIKAMAEANVSLRRMKK

SEQ ID NO: 3316 - protein, 17 aa, Homo sapiens
  VARIANT 7, 14, 16: Xaa = Any Amino Acid
KFNTTEXVLQGLLXPXF

SEQ ID NO: 3317 - protein, 12 aa, Homo sapiens
KFNPSLNVVDKI

SEQ ID NO: 3318 - protein, 19 aa, Homo sapiens
KFLALVTMNQSGWGTSGRR

SEQ ID NO: 3319 - protein, 33 aa, Homo sapiens
KFIENIGYVLYGVYNVTMVVVLLNMLIAMINNS

SEQ ID NO: 3320 - protein, 29 aa, Homo sapiens
KFCVVLLHWEFIYVITAFNLSYPITPWRF

SEQ ID NO: 3321 - protein, 26 aa, Homo sapiens
KEYVKSEVIKLLPNANGSNVQLQLKF

SEQ ID NO: 3322 - protein, 21 aa, Homo sapiens
KEVNSSLHLGHAGSSPHALAS

SEQ ID NO: 3323 - protein, 26 aa, Homo sapiens
KENSTASEVLDSLSQSVHVKPENLRL

SEQ ID NO: 3324 - protein, 26 aa, Homo sapiens
KENITDPPRGCVGNTNIWKTGPLFKR

SEQ ID NO: 3325 - protein, 15 aa, Homo sapiens
KENETESLQILNAKT

SEQ ID NO: 3326 - protein, 14 aa, Homo sapiens
KELQEGNETDEAKT

SEQ ID NO: 3327 - protein, 27 aa, Homo sapiens
KEKVENGSETGPLPPELQPLLEGEVKG

SEQ ID NO: 3328 - protein, 13 aa, Homo sapiens
KEKGNSTTDNSDQ

SEQ ID NO: 3329 - protein, 29 aa, Homo sapiens
KEGLLANTMSKMYGHENGNSSSPSPEEKG

SEQ ID NO: 3330 - protein, 24 aa, Homo sapiens
KEFAEFLSKEALNASADQFVTQKR

SEQ ID NO: 3331 - protein, 27 aa, Homo sapiens
KDRIATINYTVLTSVLNPFIYSLRNKD

SEQ ID NO: 3332 - protein, 23 aa, Homo sapiens
KDMVVMLLSMLEGNVVNGTIGKQ

SEQ ID NO: 3333 - protein, 27 aa, Homo sapiens
KDGYDLVQELCPGFFFGNVSLCCDVRQ

SEQ ID NO: 3334 - protein, 34 aa, Homo sapiens
KDDWIRPALLSGPVAANVLNFSDHHVIPMPLLKG

SEQ ID NO: 3335 - protein, 32 aa, Homo sapiens
KCVPVTLWHLGYWLCYVNSTVNPICYALCNRT

SEQ ID NO: 3336 - protein, 15 aa, Homo sapiens
KCTNLSEGVLSVRKR

SEQ ID NO: 3337 - protein, 21 aa, Homo sapiens
KCPGPTSGPSPGTNLSGCIRM

SEQ ID NO: 3338 - protein, 25 aa, Homo sapiens
KCECVAPDTVNTTVFNASAPLAPDT

SEQ ID NO: 3339 - protein, 18 aa, Homo sapiens
KCAPESEPSNSTEGETPC

SEQ ID NO: 3340 - protein, 11 aa, Homo sapiens
KATNATLDPRS

SEQ ID NO: 3341 - protein, 24 aa, Homo sapiens
KATFVKVVPTPNNGSTELVALHRN

SEQ ID NO: 3342 - protein, 23 aa, Homo sapiens
KASLCLPTTSAPASAPSNGNCSS

SEQ ID NO: 3343 - protein, 18 aa, Homo sapiens
KANFSIGPLMPVLAGTYR

SEQ ID NO: 3344 - protein, 33 aa, Homo sapiens
KAAIQGNGDVGAAAATAHNGFSCSNCSMLSERK

SEQ ID NO: 3345 - protein, 18 aa, Homo sapiens
ISNPLHCNMTMTPGTCRV

SEQ ID NO: 3346 - protein, 21 aa, Homo sapiens [sequence omitted]

SEQ ID NO: 3347 - protein, 19 aa, Homo sapiens
ILESLMCNESSMQSLRQRK

SEQ ID NO: 3348 - protein, 16 aa, Homo sapiens
IFKNATFTFTWAFQRT

SEQ ID NO: 3349 - protein, 21 aa, Homo sapiens
IERILNSVGSRMGSTDSLNKT

SEQ ID NO: 3350 - protein, 13 aa, Homo sapiens
IDNTTNSMKKTKS

SEQ ID NO: 3351 - protein, 38 aa, Homo sapiens
HSFLVHLIGLLVWQCDISVSPVAAIVTDIFNTSDGGRF

SEQ ID NO: 3352 - protein, 27 aa, Homo sapiens
HDVTNISTPTHVVFSSSTASTTVGFEW

SEQ ID NO: 3353 - protein, 26 aa, Homo sapiens
GLEAVVIGEVHENVTLHCGNISGLRG

SEQ ID NO: 3354 - protein, 19 aa, Homo sapiens
GIDTTSLHSHNGSPLTSKN

SEQ ID NO: 3355 - protein, 16 aa, Homo sapiens
GDQLSNLSNLLQQYKT

SEQ ID NO: 3356 - protein, 27 aa, Homo sapiens
GAASYFLILDSTNTVPDSAGSGNVTRC

SEQ ID NO: 3357 - protein, 23 aa, Homo sapiens
FNQIMHAFSVAPFDQNLSIDGKI

SEQ ID NO: 3358 - protein, 18 aa, Homo sapiens
FHGLYEEKNLSPGFNFRF

SEQ ID NO: 3359 - protein, 25 aa, Homo sapiens
FFLTTPAIIMNTIDMYNVTRPIEKL

SEQ ID NO: 3360 - protein, 22 aa, Homo sapiens
EQLNQTLAEMKAQEVAELKRKK

SEQ ID NO: 3361 - protein, 11 aa, Homo sapiens
ENITIVDISRK

SEQ ID NO: 3362 - protein, 10 aa, Homo sapiens
ENCTKIFEKN

SEQ ID NO: 3363 - protein, 35 aa, Homo sapiens
EKNKNANSSPVASTTPSASATTNPASATTLDQSKA

SEQ ID NO: 3364 - protein, 18 aa, Homo sapiens
EEYKNYLDAANMSMRVRR

SEQ ID NO: 3365 - protein, 25 aa, Homo sapiens
EDGLYGAPEPNGSWTGMVGELINRK

SEQ ID NO: 3366 - protein, 12 aa, Homo sapiens
DYNVQTSNWTRT

SEQ ID NO: 3367 - protein, 34 aa, Homo sapiens
DVNLSKTEKMGNTVESEHLSELTEEEYEAHYIRR

SEQ ID NO: 3368 - protein, 20 aa, Homo sapiens
DSSPEHNLTKIANGVPNSKG

SEQ ID NO: 3369 - protein, 22 aa, Homo sapiens
DMVVMLLSLLEGNVVNGTIGKQ

SEQ ID NO: 3370 - protein, 25 aa, Homo sapiens
DEAKNNITIFTRILDRLLDGYDNRL

SEQ ID NO: 3371 - protein, 25 aa, Homo sapiens
DDVNVEIVFLHNISPNLELEALFKR

SEQ ID NO: 3372 - protein, 21 aa, Homo sapiens
CTADNSYGPVQSMVLNVTVRE

SEQ ID NO: 3373 - protein, 22 aa, Homo sapiens
CDKYNAQPVGNWSDCILPEGKV

SEQ ID NO: 3374 - protein, 28 aa, Homo sapiens
AVSQNWTFHGPGASGQAAANWLAGFGRG

SEQ ID NO: 3375 - protein, 23 aa, Homo sapiens
ASSFKGYIENCSTPNTYICMQRT

SEQ ID NO: 3376 - protein, 21 aa, Homo sapiens
ASGPVILSELHPICNKSILRQ

SEQ ID NO: 3377 - protein, 14 aa, Homo sapiens
ANASGYMYETSYRR

SEQ ID NO: 3378 - protein, 20 aa, Homo sapiens
AMNEPQCFYNESIAFFYNRS

SEQ ID NO: 3379 - protein, 14 aa, Homo sapiens
AHNHHGENKTVLRK

SEQ ID NO: 3380 - protein, 13 aa, Homo sapiens
AFNCPPNSTMNRG

SEQ ID NO: 3381 - protein, 36 aa, Homo sapiens
AENRNPSCEVHQEPVTYTAIDPGLQDALHQCVNSRC

SEQ ID NO: 3382 - protein, 22 aa, Homo sapiens
ADGAAASNAADSANASLVNAKQ

SEQ ID NO: 3383 - protein, 16 aa, Homo sapiens
NNFSTEINTTSILVGP

SEQ ID NO: 3384 - protein, 27 aa, Homo sapiens
MVLASGNSSSHPVSFILLGIPGLESFQ

SEQ ID NO: 3385 - protein, 25 aa, Homo sapiens
MTLVSFFSFLSKPLIMLLSNSSWRL

SEQ ID NO: 3386 - protein, 18 aa, Homo sapiens
MSYQLYNYPNKTLLFSKH

SEQ ID NO: 3387 - protein, 17 aa, Homo sapiens
MSTLSNFTQTLEDVFRR

SEQ ID NO: 3388 - protein, 31 aa, Homo sapiens
MSSKPEPKDVHQLNGTGPSASPCSSDGPGRE

SEQ ID NO: 3389 - protein, 19 aa, Homo sapiens
MSNNSPEYALVFTISGAMA

SEQ ID NO: 3390 - protein, 24 aa, Homo sapiens
MSFLNGTSLTPASFILNGIPGLED

SEQ ID NO: 3391 - protein, 20 aa, Homo sapiens
MSAGNGTPWGSAAGEEVWAG

SEQ ID NO: 3392 - protein, 24 aa, Homo sapiens
MRQNNNITEFVLLGFSQDLDVQKA

SEQ ID NO: 3393 - protein, 25 aa, Homo sapiens
MNLDSFFSFLLKSLIMALSNSSWRL

SEQ ID NO: 3394 - protein, 20 aa, Homo sapiens
MNVSGCPGAGNASQAGGGGG

SEQ ID NO: 3395 - protein, 14 aa, Homo sapiens
MHRLMGVNSTAAAA

SEQ ID NO: 3396 - protein, 21 aa, Homo sapiens
MGLNTSASTFQLTGFPGMEKA

SEQ ID NO: 3397 - protein, 28 aa, Homo sapiens
MFPNGTASSPSSSPSPSPGSCGEGGGSR

SEQ ID NO: 3398 - protein, 17 aa, Homo sapiens
MENLQTNFSLVQGSTKK

SEQ ID NO: 3399 - protein, 26 aa, Homo sapiens
MDGDNQSENSQFLLLGISESPEQQRI

SEQ ID NO: 3400 - protein, 16 aa, Homo sapiens
RVLPVNVTDYCQLVRY

SEQ ID NO: 3401 - protein, 28 aa, Homo sapiens
KVYDPLYCESVHNFTLPSWATEDTMTKL

SEQ ID NO: 3402 - protein, 9 aa, Homo sapiens
KFLNESYKH

SEQ ID NO: 3403 - protein, 21 aa, Homo sapiens
RTAGWNIPMGLLFNQTGSCKF

SEQ ID NO: 3404 - protein, 34 aa, Homo sapiens
RGEGPIFFYTGNEGDVWAFANNSGFVAELAAERG

SEQ ID NO: 3405 - protein, 22 aa, Homo sapiens
RALAGLVYNASGSEHCYDIYRL

SEQ ID NO: 3406 - protein, 19 aa, Homo sapiens
KDYGSQEDFTQVWNTTMKG

SEQ ID NO: 3407 - protein, 19 aa, Homo sapiens
KCCGFTNYTDFEDSPYFKE

SEQ ID NO: 3408 - protein, 24 aa, Homo sapiens
RSLTQGSLIVGDLAPVNGTSQGKF

SEQ ID NO: 3409 - protein, 19 aa, Homo sapiens
RTLAGENQTAFEIEELNRK

SEQ ID NO: 3410 - protein, 32 aa, Homo sapiens
RVPNNALEGLENLTALYLQHNEIQEVGSSMRG

SEQ ID NO: 3411 - protein, 11 aa, Homo sapiens
RNCTDIDECRI

SEQ ID NO: 3412 - protein, 11 aa, Homo sapiens
RFNGSVSFFRG

SEQ ID NO: 3413 - protein, 18 aa, Homo sapiens
KTAVNCSSDFDACLITKA

SEQ ID NO: 3414 - protein, 31 aa, Homo sapiens
RGLETFSQLVYQDSYGTFTINESTIIDSPRF

SEQ ID NO: 3415 - protein, 30 aa, Homo sapiens
RGTWSTAESGAECTNWNSSALAQKPYSGRR

SEQ ID NO: 3416 - protein, 24 aa, Homo sapiens
KILAPAYFILGGNQSGEGCVITRD

SEQ ID NO: 3417 - protein, 21 aa, Homo sapiens
RNYYADNQTCDGELLFNMTKK

SEQ ID NO: 3418 - protein, 14 aa, Homo sapiens
KEVNDTLLVNELKS

SEQ ID NO: 3419 - protein, 23 aa, Homo sapiens
RAQQLLANSTALEEAMLQEQQRL

SEQ ID NO: 3420 - protein, 15 aa, Homo sapiens
RFENQTGFPPPDSRF

SEQ ID NO: 3421 - protein, 17 aa, Homo sapiens
RNLQVYNATSNSLTVKW

SEQ ID NO: 3422 - protein, 17 aa, Homo sapiens
KTANDTSTEAYNLLLRT

SEQ ID NO: 3423 - protein, 20 aa, Homo sapiens
ASNNVTDMFPDLPFTDELRQ

SEQ ID NO: 3424 - protein, 19 aa, Homo sapiens
KGQSYSVNVTFTSNIQSKS

SEQ ID NO: 3425 - protein, 34 aa, Homo sapiens
KSQGLNLHTLLYLGGVEPSVPLSPATNMSAHFRG

SEQ ID NO: 3426 - protein, 20 aa, Homo sapiens
RLNTTGVSAGCTADLLVGRA

SEQ ID NO: 3427 - protein, 16 aa, Homo sapiens
KIPAINQTITEANEKT

SEQ ID NO: 3428 - protein, 25 aa, Homo sapiens
INLTFASNNVTDMFPDLPFTDELRQ

SEQ ID NO: 3429 - protein, 20 aa, Homo sapiens
RIQNYSVMDICDYDESSGRW

SEQ ID NO: 3430 - protein, 20 aa, Homo sapiens
KAWGTPCEMCPAVNTSEYKI

SEQ ID NO: 3431 - protein, 16 aa, Homo sapiens
RLGALNSSLQLLEDRL

SEQ ID NO: 3432 - protein, 27 aa, Homo sapiens
RIQGEEIVFHDLNLTAHGISHCPTCRD

SEQ ID NO: 3433 - protein, 34 aa, Homo sapiens
RNALLLLADDGGFESGAYNNSAIATPHLDALARR

SEQ ID NO: 3434 - protein, 23 aa, Homo sapiens
KIIISPEENVTLTCTAENQLERT

SEQ ID NO: 3435 - protein, 17 aa, Homo sapiens
RSFMVNWTHAPGNVEKY

SEQ ID NO: 3436 - protein, 20 aa, Homo sapiens
ISAQYANFTGCISNAYFTRV

SEQ ID NO: 3437 - protein, 21 aa, Homo sapiens
KLDAFFALEGFPTEPNSSSRA

SEQ ID NO: 3438 - protein, 20 aa, Homo sapiens
RVPVSHSFPHPLYNMSLLKH

SEQ ID NO: 3439 - protein, 17 aa, Homo sapiens
KEAGNITTDGYEILGKL

SEQ ID NO: 3440 - protein, 15 aa, Homo sapiens
KIVVYNQPYINYSRT

SEQ ID NO: 3441 - protein, 32 aa, Homo sapiens
RLVEAAEAHAQQLGQLALNLSSIILDVNQDRL

SEQ ID NO: 3442 - protein, 11 aa, Homo sapiens
KLLNNLTSIKI

SEQ ID NO: 3443 - protein, 21 aa, Homo sapiens
KLGDCISEDSYPDGNITWYRN

SEQ ID NO: 3444 - protein, 25 aa, Homo sapiens
RVAQQDSGQYICNATSPAGHAEATI

SEQ ID NO: 3445 - protein, 29 aa, Homo sapiens
KAINQGNYGWQAGNHSAFWGMTLDEGIRY

SEQ ID NO: 3446 - protein, 16 aa, Homo sapiens
RNLTEVVPQLLDQLRT

SEQ ID NO: 3447 - protein, 30 aa, Homo sapiens
KVAAANVSVTQPESTGDPNNMTLLAEEARK

SEQ ID NO: 3448 - protein, 13 aa, Homo sapiens
RIHQNITYQVCRH

SEQ ID NO: 3449 - protein, 37 aa, Homo sapiens
KMTPNLLHLAPENFYISHSPNSTAGPSCTLLEEAFRR

SEQ ID NO: 3450 - protein, 23 aa, Homo sapiens
REQMEVVNMSLSTSADSLTTPRL

SEQ ID NO: 3451 - protein, 33 aa, Homo sapiens
KALDASNVYENIVNYVSEANETAEFALNTTDRI

SEQ ID NO: 3452 - protein, 16 aa, Homo sapiens
KDNATEEEILVYLEKT

SEQ ID NO: 3453 - protein, 13 aa, Homo sapiens
RVNNTLSSQISRL

SEQ ID NO: 3454 - protein, 18 aa, Homo sapiens
ANAPYNQTLTGYNDYIKM

SEQ ID NO: 3455 - protein, 11 aa, Homo sapiens
RDACGNGTCRN

SEQ ID NO: 3456 - protein, 20 aa, Homo sapiens
RTATESFPHPGFNNSLPNKD

SEQ ID NO: 3457 - protein, 28 aa, Homo sapiens
KLNNLTFLYLDHNALESVPLNLPESLRV

SEQ ID NO: 3458 - protein, 20 aa, Homo sapiens
NAPLVNVTLYYEALCGGCRA

SEQ ID NO: 3459 - protein, 18 aa, Homo sapiens
RGTFTDCALANMTEQIRQ

SEQ ID NO: 3460 - protein, 15 aa, Homo sapiens
RDNATLQATLHAARD

SEQ ID NO: 3461 - protein, 38 aa, Homo sapiens
KGVNVTMPAQPGTPPLSSTQLQIDPSLHEFQLVDLSRR

SEQ ID NO: 3462 - protein, 17 aa, Homo sapiens
RGVFITNETGQPLIGKV

SEQ ID NO: 3463 - protein, 20 aa, Homo sapiens
KILLTCSLNDSATEVTGHRW

SEQ ID NO: 3464 - protein, 18 aa, Homo sapiens
KLDLPVNTSIPNVTEVKE

SEQ ID NO: 3465 - protein, 29 aa, Homo sapiens
KENMTFGSTLVTNPNGGFLACGPLYAYRC

SEQ ID NO: 3466 - protein, 26 aa, Homo sapiens
RFVNVTVTPEDQCRPNNVCTGVLTRR

SEQ ID NO: 3467 - protein, 19 aa, Homo sapiens
RAELDREDFEHVKNSTYTA

SEQ ID NO: 3468 - protein, 11 aa, Homo sapiens
TLYLNVTDLKT

SEQ ID NO: 3469 - protein, 20 aa, Homo sapiens
RNHTCNLQQTCYNLQGGFKC

SEQ ID NO: 3470 - protein, 12 aa, Homo sapiens
KLNYTLSQGHRV

SEQ ID NO: 3471 - protein, 29 aa, Homo sapiens
RTLSELMSQTGHLGLANASAPSGEQLLRT

SEQ ID NO: 3472 - protein, 26 aa, Homo sapiens
KGFYLDGSDTIVCDSNSTWDPPVPKC

SEQ ID NO: 3473 - protein, 15 aa, Homo sapiens
RLNASIADLQSQLRS

SEQ ID NO: 3474 - protein, 17 aa, Homo sapiens
RSGGNCTDVNECLDPTT

SEQ ID NO: 3475 - protein, 35 aa, Homo sapiens
KQADEDIQGTQNLLTSIESETAASEETLFNASQRI

SEQ ID NO: 3476 - protein, 32 aa, Homo sapiens
RIIVHPQFYIIQTGADIALLELEEPVNISSRV

SEQ ID NO: 3477 - protein, 25 aa, Homo sapiens
RNETQHEPYPLMLPGCSPSCPLERF

SEQ ID NO: 3478 - protein, 15 aa, Homo sapiens
RTVLENSTSYEEAKN

SEQ ID NO: 3479 - protein, 18 aa, Homo sapiens
KTPMTNSSIQFLDNAFRK

SEQ ID NO: 3480 - protein, 22 aa, Homo sapiens
RVPDSCCINVTVGCGINFNEKA

SEQ ID NO: 3481 - protein, 13 aa, Homo sapiens
QQIGYLPLNGTRL

SEQ ID NO: 3482 - protein, 21 aa, Homo sapiens
KTGEANLTQIYLQEALDFIKR

SEQ ID NO: 3483 - protein, 33 aa, Homo sapiens
KLSNLSNLSHDLVQEAIDHAQDLQQEANELSRK

SEQ ID NO: 3484 - protein, 17 aa, Homo sapiens
VANFSQIETLTSVFQKK

SEQ ID NO: 3485 - protein, 11 aa, Homo sapiens
RNKSVILLGRH

SEQ ID NO: 3486 - protein, 18 aa, Homo sapiens
RNPCTSEQNCTSPFSYKN

SEQ ID NO: 3487 - protein, 12 aa, Homo sapiens
KNNHTASILDRM

SEQ ID NO: 3488 - protein, 10 aa, Homo sapiens
VLQIFNATRE

SEQ ID NO: 3489 - protein, 16 aa, Homo sapiens
KQVLSYGQNLSFSFRV

SEQ ID NO: 3490 - protein, 15 aa, Homo sapiens
RRPYVSYVNNSIARN

SEQ ID NO: 3491 - protein, 26 aa, Homo sapiens
RLTLSELDDIIKNASGIYAEIDGAKS

SEQ ID NO: 3492 - protein, 21 aa, Homo sapiens
RTPADNGLILLMVNGSMFFRL

SEQ ID NO: 3493 - protein, 16 aa, Homo sapiens
RVTNDTESDINYLLKM

SEQ ID NO: 3494 - protein, 14 aa, Homo sapiens
KRPASNVSASIQRI

SEQ ID NO: 3495 - protein, 25 aa, Homo sapiens
KAIIQGLMPDQNYTVQIIAYNKDKE

SEQ ID NO: 3496 - protein, 19 aa, Homo sapiens
KDVANITIYDEEAMVEAVA

SEQ ID NO: 3497 - protein, 20 aa, Homo sapiens
RALAYGEKNLTFEGPLPEKI

SEQ ID NO: 3498 - protein, 14 aa, Homo sapiens
RCDQCEENYFYNRS

SEQ ID NO: 3499 - protein, 21 aa, Homo sapiens
KMSIQGCVAQPSSFLLNHTRQ

SEQ ID NO: 3500 - protein, 18 aa, Homo sapiens
RSDLNPANGSYPFKALRQ

SEQ ID NO: 3501 - protein, 12 aa, Homo sapiens
KSAEGTFFINKT

SEQ ID NO: 3502 - protein, 15 aa, Homo sapiens
KDTGELNVTSILDRE

SEQ ID NO: 3503 - protein, 32 aa, Homo sapiens
KVTVLGVATAPQQVLSNGVPVSNFTYSPDTKA

SEQ ID NO: 3504 - protein, 19 aa, Homo sapiens
RGNFSTEGCGCVCEPGWKG

SEQ ID NO: 3505 - protein, 36 aa, Homo sapiens
KSAVGTLSANSSNVIQLIIDAYNSLSSEVILENGKL

SEQ ID NO: 3506 - protein, 19 aa, Homo sapiens
RLNYSLPTGQWVGVQLPRN

SEQ ID NO: 3507 - protein, 28 aa, Homo sapiens
RIADTNITSIPQGLPPSLTELHLDGNKI

SEQ ID NO: 3508 - protein, 24 aa, Homo sapiens
KTNIQGQVPYVPANFTAHISPYKE

SEQ ID NO: 3509 - protein, 29 aa, Homo sapiens
KYSSEFCSTPACSEGNSDCYFGNGSAYRG

SEQ ID NO: 3510 - protein, 21 aa, Homo sapiens
VSLVNGRPGAMNFSYSPLLRE

SEQ ID NO: 3511 - protein, 20 aa, Homo sapiens
RIASAVQKNATSTKAEAERT

SEQ ID NO: 3512 - protein, 30 aa, Homo sapiens
KVNGTWLQAGVVSWGEGCAQPNRPGIYTRV

SEQ ID NO: 3513 - protein, 23 aa, Homo sapiens
KMPFPIDQDFYVSPTFQDLLNRT

SEQ ID NO: 3514 - protein, 21 aa, Homo sapiens
KENGTDTVQEEEESPAEGSKD

SEQ ID NO: 3515 - protein, 9 aa, Homo sapiens
KNQTNLERK

SEQ ID NO: 3516 - protein, 19 aa, Homo sapiens
RHENTSSSPIQYEFSLTRE

SEQ ID NO: 3517 - protein, 23 aa, Homo sapiens
RMDPPCTNTTAASTYLNNPYVRK

SEQ ID NO: 3518 - protein, 19 aa, Homo sapiens
KLENLSSSEMGYTATLTRT

SEQ ID NO: 3519 - protein, 21 aa, Homo sapiens
KVTTYCNETMTGWVHDVLGRN

SEQ ID NO: 3520 - protein, 16 aa, Homo sapiens
RVVLGANGTYSCLVRN

SEQ ID NO: 3521 - protein, 15 aa, Homo sapiens
RSHNRSEEFLIAGKL

SEQ ID NO: 3522 - protein, 24 aa, Homo sapiens
KLGIYADMGNFTCMGYPGTTLDKV

SEQ ID NO: 3523 - protein, 14 aa, Homo sapiens
KMAAALNATGRPIA

SEQ ID NO: 3524 - protein, 27 aa, Homo sapiens
RDLQGNPIANATISVEGIDHDVTSAKD

SEQ ID NO: 3525 - protein, 20 aa, Homo sapiens
KMEMPSTPQQLQNLTEDIRE

SEQ ID NO: 3526 - protein, 39 aa, Homo sapiens
RVTDEAGHPVPSQIQNSTETPSAYDLLILTTIPGLSYRH

SEQ ID NO: 3527 - protein, 22 aa, Homo sapiens
KTPLVQEVHQNFSAWCSQVVRL

SEQ ID NO: 3528 - protein, 16 aa, Homo sapiens
RVNYSLLADICNLWRN

SEQ ID NO: 3529 - protein, 15 aa, Homo sapiens
RKFDVNQLQNTTIKR

SEQ ID NO: 3530 - protein, 14 aa, Homo sapiens
ISLDNGTVIMDVKG

SEQ ID NO: 3531 - protein, 12 aa, Homo sapiens
RNSTVEYTLNKL

SEQ ID NO: 3532 - protein, 36 aa, Homo sapiens
RIIVHPQFYTAQIGADIALLELEEPVNVSSHVHTVT

SEQ ID NO: 3533 - protein, 31 aa, Homo sapiens
RGYSGVFPDCTPCHQCFALWDVIIAELTNRT

SEQ ID NO: 3534 - protein, 30 aa, Homo sapiens
KVNGTWLQAGVVSWDEGCAQPNRPGIYTRV

SEQ ID NO: 3535 - protein, 13 aa, Homo sapiens
RSCINESAIDSRG

SEQ ID NO: 3536 - protein, 17 aa, Homo sapiens
RTQNFTLLVQGSPELKT

SEQ ID NO: 3537 - protein, 15 aa, Homo sapiens
KGSQWSDIEEFCNRS

SEQ ID NO: 3538 - protein, 12 aa, Homo sapiens
RLYLDHNNLTRM

SEQ ID NO: 3539 - protein, 18 aa, Homo sapiens
KLTSCATNASICGDEARC

SEQ ID NO: 3540 - protein, 13 aa, Homo sapiens
KNELMLNSSLMRI

SEQ ID NO: 3541 - protein, 16 aa, Homo sapiens
KNLTVCPDGALFEQKG

SEQ ID NO: 3542 - protein, 22 aa, Homo sapiens
KIESINQQLLPLGNISDNMDRI

SEQ ID NO: 3543 - protein, 16 aa, Homo sapiens
KTVGILPSNCSDIWQV

SEQ ID NO: 3544 - protein, 12 aa, Homo sapiens
RVLLNTTVAPLF

SEQ ID NO: 3545 - protein, 33 aa, Homo sapiens
RELFPTWLLVMEILNVTLVPYGNAQEQNVSGRW

SEQ ID NO: 3546 - protein, 30 aa, Homo sapiens
KNKDYYIISTSNGSLEGLDNQEGGVCQTRA

SEQ ID NO: 3547 - protein, 22 aa, Homo sapiens
RDAGVGFPEYQEEDNSTYNFRW

SEQ ID NO: 3548 - protein, 20 aa, Homo sapiens
RVINQTTCENLLPQQITPRM

SEQ ID NO: 3549 - protein, 22 aa, Homo sapiens
LATGNVSGGVCDDCQHNTMGRN

SEQ ID NO: 3550 - protein, 26 aa, Homo sapiens
RDAGVLNDTLVIFTSDNGIPFPSGRT

SEQ ID NO: 3551 - protein, 11 aa, Homo sapiens
LNLNVTGYYRV

SEQ ID NO: 3552 - protein, 25 aa, Homo sapiens
RDGYEPCVNEGMCVTYHNGTGYCKC

SEQ ID NO: 3553 - protein, 16 aa, Homo sapiens
RLNLTSPDLFWLVFRY

SEQ ID NO: 3554 - protein, 34 aa, Homo sapiens
RITLDFNLTDPENGPVLDDSLPNSVHEYIPFAKD

SEQ ID NO: 3555 - protein, 22 aa, Homo sapiens
HNNNISVVGSSDFCPPGHNTKK

SEQ ID NO: 3556 - protein, 14 aa, Homo sapiens
KFTPPVVNVTWLRN

SEQ ID NO: 3557 - protein, 27 aa, Homo sapiens
RVYSLPGRENYSSVDANGIQSQMLSRW

SEQ ID NO: 3558 - protein, 15 aa, Homo sapiens
IDSSGYVNPNYTGRI

SEQ ID NO: 3559 - protein, 25 aa, Homo sapiens
KKADILDVVGMLYVGGLPINYTTRR

SEQ ID NO: 3560 - protein, 28 aa, Homo sapiens
AALAGAPLPNVTLDGFDLSPLLLGTGKS

SEQ ID NO: 3561 - protein, 33 aa, Homo sapiens
KYGCCPMPNATCCSDHLHCCPQDTVCDLIQSKC

SEQ ID NO: 3562 - protein, 17 aa, Homo sapiens
RETNTTSQMQAALLEKL

SEQ ID NO: 3563 - protein, 15 aa, Homo sapiens
VGYLPSSQNITAMRE

SEQ ID NO: 3564 - protein, 11 aa, Homo sapiens
RFGNKTFPQRF

SEQ ID NO: 3565 - protein, 16 aa, Homo sapiens
RLHNKLLPNVTTVERN

SEQ ID NO: 3566 - protein, 12 aa, Homo sapiens
KMLEAYNLTEKN

SEQ ID NO: 3567 - protein, 31 aa, Homo sapiens
RASEDQDIEFQMQIPAAAFITNFTMLIGDKV

SEQ ID NO: 3568 - protein, 21 aa, Homo sapiens
INYNTDLYNCTFPALIEDWRE

SEQ ID NO: 3569 - protein, 28 aa, Homo sapiens
RLLLGGLPESGTIYNFSGCISNVFVQRL

SEQ ID NO: 3570 - protein, 23 aa, Homo sapiens
RADDCALPYLGAICYCDLFCNRT

SEQ ID NO: 3571 - protein, 31 aa, Homo sapiens
RFGYQMDESNQCVDVDECATDSHQCNPTQIC

SEQ ID NO: 3572 - protein, 25 aa, Homo sapiens
RCSGDGLDSDGNQTLHWQAIGNPRC

SEQ ID NO: 3573 - protein, 25 aa, Homo sapiens
RCAPNFWNLTSGHGCQPCACHPSRA

SEQ ID NO: 3574 - protein, 27 aa, Homo sapiens
RLGLTPEATNASLLGCMEDLSVNGQRR

SEQ ID NO: 3575 - protein, 21 aa, Homo sapiens
RLEQMVMSINLTGPLPAPYKM

SEQ ID NO: 3576 - protein, 21 aa, Homo sapiens
RGLEYNEVNVTLDLGQVFHVA

SEQ ID NO: 3577 - protein, 19 aa, Homo sapiens
LLTVNATDPDSLQHQTIRY

SEQ ID NO: 3578 - protein, 14 aa, Homo sapiens
KVISLLPKENKTRG

SEQ ID NO: 3579 - protein, 29 aa, Homo sapiens
KGNGTILKGDTGNNNWIPDVGSTWWPPKT

SEQ ID NO: 3580 - protein, 22 aa, Homo sapiens
KFGRNGSDCPDKFCLFQSETKN

SEQ ID NO: 3581 - protein, 29 aa, Homo sapiens
KDITAQDSADIIFLIDGSNNTGSVNFAVI

SEQ ID NO: 3582 - protein, 25 aa, Homo sapiens
KCENAYPGNITDTMVCASVQEGGKD

SEQ ID NO: 3583 - protein, 17 aa, Homo sapiens
RLPFQCSASYLGNDTRI

SEQ ID NO: 3584 - protein, 18 aa, Homo sapiens
REEEAIQLDGLNASQIRE

SEQ ID NO: 3585 - protein, 13 aa, Homo sapiens
KYYNYTLSINGKA

SEQ ID NO: 3586 - protein, 23 aa, Homo sapiens
RMHIFQNGSLVIHDVAPEDSGRY

SEQ ID NO: 3587 - protein, 17 aa, Homo sapiens
KSCVAVTSAQPQNMSRR

SEQ ID NO: 3588 - protein, 14 aa, Homo sapiens
KAVLVNNITTGERL

SEQ ID NO: 3589 - protein, 16 aa, Homo sapiens
KELGVVMYNCSCLARD

SEQ ID NO: 3590 - protein, 14 aa, Homo sapiens
KCCGAANYTDWEKI

SEQ ID NO: 3591 - protein, 21 aa, Homo sapiens
RHLYTTTGGETDFTNVTSLRG

SEQ ID NO: 3592 - protein, 13 aa, Homo sapiens
RYHGFLNTSYHRQ

SEQ ID NO: 3593 - protein, 15 aa, Homo sapiens
RSCPACPGSNITIRN

SEQ ID NO: 3594 - protein, 20 aa, Homo sapiens
KLEWLGNCSGLNDETYGYKE

SEQ ID NO: 3595 - protein, 17 aa, Homo sapiens
KGLLNLTYYQQIQVQKK

SEQ ID NO: 3596 - protein, 10 aa, Homo sapiens
KLNLTTDPKF

SEQ ID NO: 3597 - protein, 13 aa, Homo sapiens
KEVIDTNLTTLRD

SEQ ID NO: 3598 - protein, 18 aa, Homo sapiens
VDVAMPLNFTGGQLHSRM

SEQ ID NO: 3599 - protein, 24 aa, Homo sapiens
RTEKEPLSDPVGTCYLSTDNFTRI

SEQ ID NO: 3600 - protein, 10 aa, Homo sapiens
RGASNLTWRS

SEQ ID NO: 3601 - protein, 21 aa, Homo sapiens
RSSCGKENTSDPSLVIAFGRG

SEQ ID NO: 3602 - protein, 22 aa, Homo sapiens
RYFQNYSYGGVIQDDHIPFLRR

SEQ ID NO: 3603 - protein, 33 aa, Homo sapiens
RGPTFAPLPPVAPLHCAQTPYGCCQDNITAARG

SEQ ID NO: 3604 - protein, 18 aa, Homo sapiens
RDYSLTFGAINQTWSYRI

SEQ ID NO: 3605 - protein, 12 aa, Homo sapiens
KVGNNTIHVHRE

SEQ ID NO: 3606 - protein, 25 aa, Homo sapiens
KKECYYNLNDASLCDNVLAPNVTKQ

SEQ ID NO: 3607 - protein, 35 aa, Homo sapiens
KASSEVNLANLPPSYHNETNTDTKVGNNTIHVHRE

SEQ ID NO: 3608 - protein, 18 aa, Homo sapiens
KNGIYNITVLASDQGGRT

SEQ ID NO: 3609 - protein, 18 aa, Homo sapiens
RDPCSNVTCSFGSTCARS

SEQ ID NO: 3610 - protein, 20 aa, Homo sapiens
TNNCYSNETVILTPTMDSRL

SEQ ID NO: 3611 - protein, 20 aa, Homo sapiens
TGSGSVINQTEESPYINGRY

SEQ ID NO: 3612 - protein, 17 aa, Homo sapiens
RHPDAVAWANLTNAIRE

SEQ ID NO: 3613 - protein, 11 aa, Homo sapiens
KQYNSTGDYRS

SEQ ID NO: 3614 - protein, 19 aa, Homo sapiens
KVFDADEIGSDNWLANFTF

SEQ ID NO: 3615 - protein, 29 aa, Homo sapiens
KTGPVVEDSGSLLLEYVNGSACTTSDGRQ

SEQ ID NO: 3616 - protein, 14 aa, Homo sapiens
KELDLTCNITTDRA

SEQ ID NO: 3617 - protein, 30 aa, Homo sapiens
KGTSPFMDALTANGTTNIQTSVTGVTASKR

SEQ ID NO: 3618 - protein, 12 aa, Homo sapiens
MDKQNSQMNASH

SEQ ID NO: 3619 - protein, 11 aa, Homo sapiens
MDALTANGTTN

SEQ ID NO: 3620 - protein, 15 aa, Homo sapiens
YFMNYNSSVSFEERL

SEQ ID NO: 3621 - protein, 19 aa, Homo sapiens
RTCEDIDECVNNTVCDSHG

SEQ ID NO: 3622 - protein, 19 aa, Homo sapiens
RGSSVILNCSAYSEPSPKI

SEQ ID NO: 3623 - protein, 18 aa, Homo sapiens
VNNSLSFFDLSELGMGKS

SEQ ID NO: 3624 - protein, 23 aa, Homo sapiens
RDPLNGQAVPANGTYEFGYQMHF

SEQ ID NO: 3625 - protein, 17 aa, Homo sapiens
RVTGLNCTTNHPINPKG

SEQ ID NO: 3626 - protein, 12 aa, Homo sapiens
KVYVYALNQTRF

SEQ ID NO: 3627 - protein, 20 aa, Homo sapiens
RALLPFDNLHDDPCLLTNRS

SEQ ID NO: 3628 - protein, 34 aa, Homo sapiens
RCECPFGYTLAGNECVDTDECSVGNPCGNGTCKN

SEQ ID NO: 3629 - protein, 20 aa, Homo sapiens
RLLGTKNASCLVLAAQHASA

SEQ ID NO: 3630 - protein, 16 aa, Homo sapiens
RGIASVLQELNVTVVT

SEQ ID NO: 3631 - protein, 22 aa, Homo sapiens
RAQEALSMGNATFYEVESILKN

SEQ ID NO: 3632 - protein, 30 aa, Homo sapiens
KSTEGQSSLTVTNVTEEHYGNYTCVAANKL

SEQ ID NO: 3633 - protein, 28 aa, Homo sapiens
KACNCSTVGSLDFQCNVNTGQCNCHPKF

SEQ ID NO: 3634 - protein, 13 aa, Homo sapiens
RYLYLASNHSNKW

SEQ ID NO: 3635 - protein, 25 aa, Homo sapiens
KLGLSFNSISAVDNGSLANTPHLRE

SEQ ID NO: 3636 - protein, 28 aa, Homo sapiens
KDVDECALGTHNCSEAETCHNIQGSFRC

SEQ ID NO: 3637 - protein, 22 aa, Homo sapiens
KMYNHSWPESLACDELPVYDRG

SEQ ID NO: 3638 - protein, 24 aa, Homo sapiens
REACQGTSPPVVSCYNASDHVYKG

SEQ ID NO: 3639 - protein, 34 aa, Homo sapiens
RLTLPQLADTYETLAIEGAQAFYNGSLTAQIVKD

SEQ ID NO: 3640 - protein, 32 aa, Homo sapiens
KGANASNPGPFGDVLCDSPYQLILSAFDFIKN

SEQ ID NO: 3641 - protein, 16 aa, Homo sapiens
RLHNQLLPNVTTVERN

SEQ ID NO: 3642 - protein, 18 aa, Homo sapiens
VIINPSGVVMWYLYPIKN

SEQ ID NO: 3643 - protein, 22 aa, Homo sapiens
SALNLPYHMPENKTIHDFFKRK

SEQ ID NO: 3644 - protein, 28 aa, Homo sapiens
RSPYASTHVNVSWESASGIATLWANGKL

SEQ ID NO: 3645 - protein, 28 aa, Homo sapiens
RSMVYLTIKPLNLSQVEGKPSPWLSVDT

SEQ ID NO: 3646 - protein, 16 aa, Homo sapiens
RRDNASGDAAKGKVKA

SEQ ID NO: 3647 - protein, 35 aa, Homo sapiens
RPFPGNMSSMPPSSPGMSQQGGPGMGPPMPTVNRK

SEQ ID NO: 3648 - protein, 14 aa, Homo sapiens
RNSELIANGSSHRI

SEQ ID NO: 3649 - protein, 19 aa, Homo sapiens
RNMMNHSQVGQGIGIPSRT

SEQ ID NO: 3650 - protein, 22 aa, Homo sapiens
RNLNHSLPSDFTFQNMNSKRKA

SEQ ID NO: 3651 - protein, 24 aa, Homo sapiens
RNCEDWGAGNSTLASLQPVLQVRA

SEQ ID NO: 3652 - protein, 23 aa, Homo sapiens
RNSSVASDLHGEDMIVTPFAQVL

SEQ ID NO: 3653 - protein, 35 aa, Homo sapiens
RNNSPDGNTDSSALDCYNPMTNQWSPCAPMSVPRN

SEQ ID NO: 3654 - protein, 15 aa, Homo sapiens
RMKYYELIVNGSYTP

SEQ ID NO: 3655 - protein, 14 aa, Homo sapiens
RINDSQEGGCNSRQ

SEQ ID NO: 3656 - protein, 26 aa, Homo sapiens
RGSCQRSGPLGDQPFAGLLPKNLSRE

SEQ ID NO: 3657 - protein, 25 aa, Homo sapiens
RGHNSSNSPSLQAGGAEGAGDRGRD

SEQ ID NO: 3658 - protein, 33 aa, Homo sapiens
RALCTPGYNARAPLHYLAPLLSNLSQRPAARAF

SEQ ID NO: 3659 - protein, 28 aa, Homo sapiens
PGPDPSLDRMLSSSSSVSSLNSSTVRRE

SEQ ID NO: 3660 - protein, 23 aa, Homo sapiens
NHTNMGNLAVLSQGNTSSSRRKT

SEQ ID NO: 3661 - protein, 35 aa, Homo sapiens
MTPNPGYQPSMNTSDMMGRMSYEPNKDPYGSMRKA

SEQ ID NO: 3662 - protein, 18 aa, Homo sapiens
MMLLQQNMTQIQHNHHRV

SEQ ID NO: 3663 - protein, 20 aa, Homo sapiens
MLVAASLSINATGSTMLLRE

SEQ ID NO: 3664 - protein, 26 aa, Homo sapiens
MGQIAIVSFQNSTPKVIECFNVESRI

SEQ ID NO: 3665 - protein, 37 aa, Homo sapiens
MGDSNISSPGLQPSTQLSNLGSTETLEEMPSGSQDKS

SEQ ID NO: 3666 - protein, 33 aa, Homo sapiens
MFTRLSNCANRTILYDMYSYVWDIKSIMSMVKS

SEQ ID NO: 3667 - protein, 23 aa, Homo sapiens
MEIFSPMPGESCENANTSLGRRM

SEQ ID NO: 3668 - protein, 40 aa, Homo sapiens
LPLAATQDTMSQSGAVSCCPGATNGSLGRSDGVAKMSPKD

SEQ ID NO: 3669 - protein, 20 aa, Homo sapiens
LCMNETGFVSGLWALDLSKN

SEQ ID NO: 3670 - protein, 18 aa, Homo sapiens
KVKIVACDGKNTGSNTTE

SEQ ID NO: 3671 - protein, 18 aa, Homo sapiens
KSVSIQNITGVGNDENMS

SEQ ID NO: 3672 - protein, 17 aa, Homo sapiens
KSNQSYPTPVTVEKDRI

SEQ ID NO: 3673 - protein, 18 aa, Homo sapiens
KSFSETSSENDTEGVSVA

SEQ ID NO: 3674 - protein, 14 aa, Homo sapiens
KSFRQNSTLIQHKK

SEQ ID NO: 3675 - protein, 16 aa, Homo sapiens
KSALANLSDETETLKN

SEQ ID NO: 3676 - protein, 20 aa, Homo sapiens
KQVTNSSSVDRGWVTHSVCG

SEQ ID NO: 3677 - protein, 26 aa, Homo sapiens
KNLAQTYLARNMSERSAMAAVLAMRD

SEQ ID NO: 3678 - protein, 21 aa, Homo sapiens
KMEDLTNVSSLLNMERARDKA

SEQ ID NO: 3679 - protein, 30 aa, Homo sapiens
KLVLSLLSGLPNEVDFAINVCTLLSNESKH

SEQ ID NO: 3680 - protein, 27 aa, Homo sapiens
KLTHLNFSSNKLGMTVPLILKALRHSA

SEQ ID NO: 3681 - protein, 20 aa, Homo sapiens
KLQRAQAELENVSGALNEAE

SEQ ID NO: 3682 - protein, 34 aa, Homo sapiens
KLEWMNNGYSGVGNSSVSGHGILPSYQELVEDRF

SEQ ID NO: 3683 - protein, 23 aa, Homo sapiens
KKNASSRPASAISGQNNNHSGNK

SEQ ID NO: 3684 - protein, 27 aa, Homo sapiens
KKKLERFNSTRFNLDNLADLENLVQRR

SEQ ID NO: 3685 - protein, 25 aa, Homo sapiens
KKINQTKGLVPECLNTLCSPMHSRL

SEQ ID NO: 3686 - protein, 19 aa, Homo sapiens
KKFKDDSNHTIGVEFGSKI

SEQ ID NO: 3687 - protein, 18 aa, Homo sapiens
KKENETLKSDLNNLMELL

SEQ ID NO: 3688 - protein, 18 aa, Homo sapiens
KISLDNLSEDGAQLLYKT

SEQ ID NO: 3689 - protein, 21 aa, Homo sapiens
KFQNCSVLPGGVYVSETQNRV

SEQ ID NO: 3690 - protein, 27 aa, Homo sapiens
KENIGLNVFLSNQSCFPAACENPQRKS

SEQ ID NO: 3691 - protein, 17 aa, Homo sapiens
KECDEAINNCSHFNIRE

SEQ ID NO: 3692 - protein, 21 aa, Homo sapiens
KDGQAQTLQNHSGLSAPVPRG

SEQ ID NO: 3693 - protein, 17 aa, Homo sapiens
KCGKAFNISSMFTKCKI

SEQ ID NO: 3694 - protein, 29 aa, Homo sapiens
HSMDTNSSGMSSLINPLSSPPSCNNNPKI

SEQ ID NO: 3695 - protein, 39 aa, Homo sapiens
GTTSAYPSHPMPYSSVLTQNSLGNNHSFSTANGLSVDRL

SEQ ID NO: 3696 - protein, 37 aa, Homo sapiens
MPLSSPNAAATASDMDKNSGSNSSSASSGSSKGQQPP

SEQ ID NO: 3697 - protein, 27 aa, Homo sapiens
TVFNASGLQALVAQYGDWFSYDGSPRA

SEQ ID NO: 3698 - protein, 19 aa, Homo sapiens
SEAQQRAQAALDKANASRG

SEQ ID NO: 3699 - protein, 22 aa, Homo sapiens
RRANTSALAVPSPVSNSASARH

SEQ ID NO: 3700 - protein, 31 aa, Homo sapiens
RQTTAMDFSYANETVCWVHVGDSAAQTQLKC

SEQ ID NO: 3701 - protein, 10 aa, Homo sapiens
RLEDRFNSTL

SEQ ID NO: 3702 - protein, 23 aa, Homo sapiens
RGLNVSCLSVQGSASIVAPLLLR

SEQ ID NO: 3703 - protein, 33 aa, Homo sapiens
RCINGTCYCEEGFTGEDCGKPTCPHACHTQGRC

SEQ ID NO: 3704 - protein, 17 aa, Homo sapiens
MRRSESTYSVNSTGRRG

SEQ ID NO: 3705 - protein, 29 aa, Homo sapiens
KNSSCLPNPCVNGGTCVGSGASFSCICRD

SEQ ID NO: 3706 - protein, 20 aa, Homo sapiens
KNISQENAPGPAHNGRETIY

SEQ ID NO: 3707 - protein, 35 aa, Homo sapiens
KLVDPQGPLKDCIFDLCLGGGNLSILCSNIHAYVS

SEQ ID NO: 3708 - protein, 20 aa, Homo sapiens
KHSVLWNAMIHPLCNMTLKG

SEQ ID NO: 3709 - protein, 26 aa, Homo sapiens
KGSVVLTCHTNNTGTSFQWIFNNQRL

SEQ ID NO: 3710 - protein, 25 aa, Homo sapiens
ITLQSECDAFPNISSDESYTLLVKE

SEQ ID NO: 3711 - protein, 25 aa, Homo sapiens
AAGVAHAITAACTQGNLSDCGCDKE

SEQ ID NO: 3712 - protein, 30 aa, Homo sapiens
MGSGWVPWVVALLVNLTRLDSSMTQGTDSP

SEQ ID NO: 3713 - protein, 26 aa, Homo sapiens
KGASLDGLPPVILQGPANQTLVLGSS

SEQ ID NO: 3714 - protein, 20 aa, Homo sapiens
TISWNVNGTASEQDQDPQRV

SEQ ID NO: 3715 - protein, 14 aa, Homo sapiens
RYNCTATNHIGTRF

SEQ ID NO: 3716 - protein, 32 aa, Homo sapiens
RVSAPDGPCPTGFERVNGSCEDVDECATGGRC

SEQ ID NO: 3717 - protein, 24 aa, Homo sapiens
RVNLTTNTIAVTQTLPNAAYNNRF

SEQ ID NO: 3718 - protein, 11 aa, Homo sapiens
RVNCSVPEEKA

SEQ ID NO: 3719 - protein, 33 aa, Homo sapiens
RVFDLQQNLGSVNVSTGCAPALQAQTPGLGPRG

SEQ ID NO: 3720 - protein, 25 aa, Homo sapiens
RSILTVTNVTQEHFGNYTCVAANKL

SEQ ID NO: 3721 - protein, 19 aa, Homo sapiens
RQCNQTSVCWCVNSVGVRR

SEQ ID NO: 3722 - protein, 19 aa, Homo sapiens
RNQELEDNVHISPNGSIIT

SEQ ID NO: 3723 - protein, 34 aa, Homo sapiens
RLHEAHAQVGNLSQAIENVLSVLLFYPEDEAAKR

SEQ ID NO: 3724 - protein, 25 aa, Homo sapiens
RKCVCNYLGTVQEHCNGSDCQCDKA

SEQ ID NO: 3725 - protein, 26 aa, Homo sapiens
RGNPPHSAPCVPNGSALLLSNPAYRL

SEQ ID NO: 3726 - protein, 18 aa, Homo sapiens
RGKANSTGTLVITDPTRI

SEQ ID NO: 3727 - protein, 18 aa, Homo sapiens
RDCSMPPPFSYNGTYRPV

SEQ ID NO: 3728 - protein, 22 aa, Homo sapiens
RCEICAPGFYGNALLPGNCTRC

SEQ ID NO: 3729 - protein, 32 aa, Homo sapiens
RAAAQVLGSSGLFNNHGLQVQQQQQRNLSLHE

SEQ ID NO: 3730 - protein, 33 aa, Homo sapiens
MVGNTDISCCYNSSTGSDIHGDPGFPGPPGERG

SEQ ID NO: 3731 - protein, 22 aa, Homo sapiens
KVNISNYSLVMESDAGTFLPTG

SEQ ID NO: 3732 - protein, 17 aa, Homo sapiens
KTVNSSILQYGLESLKR

SEQ ID NO: 3733 - protein, 29 aa, Homo sapiens
KMQMAVSLRLALPPPTENSSLSSITLLDP

SEQ ID NO: 3734 - protein, 22 aa, Homo sapiens
KMCAQQLGDNCTEAAICDPHRG

SEQ ID NO: 3735 - protein, 16 aa, Homo sapiens
KIWWQSENGVENVTIQ

SEQ ID NO: 3736 - protein, 32 aa, Homo sapiens
KIVYKPVGSNEPMEAFVGEMTSYTLHNLNPST

SEQ ID NO: 3737 - protein, 28 aa, Homo sapiens
KGVVTDEQGIPIANATISVSGINHGVKT

SEQ ID NO: 3738 - protein, 31 aa, Homo sapiens
KFFPPVLNVTWLCNGELVTEGVAESLFLPRT

SEQ ID NO: 3739 - protein, 27 aa, Homo sapiens
KAQVSNEDCLQVENCTQLGEQCWTARI

SEQ ID NO: 3740 - protein, 21 aa, Homo sapiens
GIDCSTPCPLGTYGINCSSRC

SEQ ID NO: 3741 - protein, 19 aa, Homo sapiens
ANLSVEAQPPWLPGLEARY

SEQ ID NO: 3742 - protein, 18 aa, Homo sapiens
RILQNLTTLATNNGYIKF

SEQ ID NO: 3743 - protein, 26 aa, Homo sapiens
RHQNVSILYADIVGFTQLASDCSPKE

SEQ ID NO: 3744 - protein, 27 aa, Homo sapiens
RGFVVLPITEFLVGDLVVTQNTSLPWP

SEQ ID NO: 3745 - protein, 23 aa, Homo sapiens
MYMFLGNFSFLEIWYVSSTVPKM

SEQ ID NO: 3746 - protein, 26 aa, Homo sapiens
MLMLLLAVPNIILTNQSVREVTQIKC

SEQ ID NO: 3747 - protein, 29 aa, Homo sapiens
MFFILLNMFLAIINDTYSEVKSDLAQQKA

SEQ ID NO: 3748 - protein, 19 aa, Homo sapiens
LNSTVNPIIYALRSKDLRH

SEQ ID NO: 3749 - protein, 10 aa, Homo sapiens
LELKNNASKL

SEQ ID NO: 3750 - protein, 19 aa, Homo sapiens
KVPYNVGPGFTGNFSTQKV

SEQ ID NO: 3751 - protein, 10 aa, Homo sapiens
KSNSSFMSRE

SEQ ID NO: 3752 - protein, 23 aa, Homo sapiens
KRCNVSDEVQRGMPGNVTPCTRL

SEQ ID NO: 3753 - protein, 12 aa, Homo sapiens
KQNTAVNSSSRN

SEQ ID NO: 3754 - protein, 11 aa, Homo sapiens
KNFSASSIAKI

SEQ ID NO: 3755 - protein, 17 aa, Homo sapiens
KESNFSDVNTNRSAFKY

SEQ ID NO: 3756 - protein, 23 aa, Homo sapiens
KEADDFFTSLGLLPVPPEFWNKS

SEQ ID NO: 3757 - protein, 36 aa, Homo sapiens
KAMNGNLSNMYEVLNNNEESLTCGIEQHTGENVSRR

SEQ ID NO: 3758 - protein, 31 aa, Homo sapiens
EKSNETNGYLDSAQAGPAAGPGAPGTAAGRA

SEQ ID NO: 3759 - protein, 20 aa, Homo sapiens
MTRKRTYWVPNSSGGLVNRG

SEQ ID NO: 3760 - protein, 19 aa, Homo sapiens
MDNASFSEPWPANASGPDP

SEQ ID NO: 3761 - protein, 15 aa, Homo sapiens
MDLGNSGNDSVVTKF

SEQ ID NO: 3762 - protein, 19 aa, Homo sapiens
RTMVFPVMYLNESVHIDKE

SEQ ID NO: 3763 - protein, 13 aa, Homo sapiens
RVFGSQNLTTVKL

SEQ ID NO: 3764 - protein, 21 aa, Homo sapiens
RYHYNGTLLDGTSFDTSYSKG

SEQ ID NO: 3765 - protein, 11 aa, Homo sapiens
KALMNGSESRF

SEQ ID NO: 3766 - protein, 17 aa, Homo sapiens
RDLGPTLANSTHHNVRL

SEQ ID NO: 3767 - protein, 24 aa, Homo sapiens
RTEAGAFEYVPDPTFENFTGGVKK

SEQ ID NO: 3768 - protein, 25 aa, Homo sapiens
KHNNDTQHIWESDSNEFSVIADPRG

SEQ ID NO: 3769 - protein, 24 aa, Homo sapiens
RTAADTTGLQPILNQFTPANISRQ

SEQ ID NO: 3770 - protein, 23 aa, Homo sapiens
RFTFTSHTPGEHQICLHSNSTKF

SEQ ID NO: 3771 - protein, 19 aa, Homo sapiens
RIAPASNVSHTVVLRPLKA

SEQ ID NO: 3772 - protein, 21 aa, Homo sapiens
KFLSSSPHLPPSSYFNASGRA

SEQ ID NO: 3773 - protein, 22 aa, Homo sapiens
RTSLELWMHTDPVSQKNESVRN

SEQ ID NO: 3774 - protein, 22 aa, Homo sapiens
KYLQPLLAVQFTNLTMDTEIRI

SEQ ID NO: 3775 - protein, 36 aa, Homo sapiens
RAFSNSSYVLNPTTGELVFDPLSASDTGEYSCEARN

SEQ ID NO: 3776 - protein, 22 aa, Homo sapiens
RLLNTTDVYLLPSLNPDGFERA

SEQ ID NO: 3777 - protein, 18 aa, Homo sapiens
REAGNHTSGAGLVQINKS

SEQ ID NO: 3778 - protein, 23 aa, Homo sapiens
RVLGFKPKPPKNESLETYPVMKY

SEQ ID NO: 3779 - protein, 17 aa, Homo sapiens
RAEPPLNASASDQGEKV

SEQ ID NO: 3780 - protein, 21 aa, Homo sapiens
RYHYNGTLLDGTLFDSSYSRN

SEQ ID NO: 3781 - protein, 24 aa, Homo sapiens
KNGTNDGDYVFLTGEDSYLNFTKI

SEQ ID NO: 3782 - protein, 14 aa, Homo sapiens
KIVTPEEYYNVTVQ

SEQ ID NO: 3783 - protein, 24 aa, Homo sapiens
KQVALQTFGNQTTIIPAGGAGYKV

SEQ ID NO: 3784 - protein, 21 aa, Homo sapiens
RYHYNGTFLDGTLFDSSHNRM

SEQ ID NO: 3785 - protein, 21 aa, Homo sapiens
RYHYNGSLMDGTLFDSSYSRN

SEQ ID NO: 3786 - protein, 13 aa, Homo sapiens
RYHYNGTFEDGKK

SEQ ID NO: 3787 - protein, 18 aa, Homo sapiens
KNMTFDLPSDATVVLNRS

SEQ ID NO: 3788 - protein, 21 aa, Homo sapiens
KFLNDSIVDPVDSEWFGFYRS

SEQ ID NO: 3789 - protein, 15 aa, Homo sapiens
KVVANGTGTQGQLKV

SEQ ID NO: 3790 - protein, 11 aa, Homo sapiens
KLENWTDASRV

SEQ ID NO: 3791 - protein, 14 aa, Homo sapiens
KIFIFNQTGIEAKK

SEQ ID NO: 3792 - protein, 24 aa, Homo sapiens
RGLVMNYPHITNLTNLGQSTEYRH

SEQ ID NO: 3793 - protein, 14 aa, Homo sapiens
KTCNQTTGQCPCKD

SEQ ID NO: 3794 - protein, 27 aa, Homo sapiens
RYPQDYQFYIQNFTALPLNTVVPPQRQ

SEQ ID NO: 3795 - protein, 22 aa, Homo sapiens
RGILNATISVAEINHPVTTYKT

SEQ ID NO: 3796 - protein, 14 aa, Homo sapiens
KEIANATAKPEDRN

SEQ ID NO: 3797 - protein, 36 aa, Homo sapiens
RIQNILSEKPTVTTVYANNGSVLQGSSVASVYDGKL

SEQ ID NO: 3798 - protein, 24 aa, Homo sapiens
TTVYANNGSVLQGSSVASVYDGKL

SEQ ID NO: 3799 - protein, 26 aa, Homo sapiens
RAACAVKPQEVQMVNGTITNPINGKS

SEQ ID NO: 3800 - protein, 33 aa, Homo sapiens
RYHYNCSLLDGTQLFTSHDYGAPQEATLGANKV

SEQ ID NO: 3801 - protein, 23 aa, Homo sapiens
RNELLGTASVNLSNVLKNNGGKM

SEQ ID NO: 3802 - protein, 20 aa, Homo sapiens
RDCNDTLEEDNTNLETPTKR

SEQ ID NO: 3803 - protein, 23 aa, Homo sapiens
KMKELPLVSLFCSCFLADPLNKS

SEQ ID NO: 3804 - protein, 20 aa, Homo sapiens
KRFPTHYMPYNESVSFEDRV

SEQ ID NO: 3805 - protein, 14 aa, Homo sapiens
KLVLPAKNTTNLKT

SEQ ID NO: 3806 - protein, 37 aa, Homo sapiens
KGCGINECHDPSISGCDHNCTDTLTSFYCSCRPGYKL

SEQ ID NO: 3807 - protein, 29 aa, Homo sapiens
RNVSTGDVNVEMNAAPGVDLTQLLNNMRS

SEQ ID NO: 3808 - protein, 18 aa, Homo sapiens
QTQISETNVILSMDNNRS

SEQ ID NO: 3809 - protein, 28 aa, Homo sapiens
RGYYNQSEAGSHTLQSMYGCDVGPDGRL

SEQ ID NO: 3810 - protein, 28 aa, Homo sapiens
RGYYNQSEAGSHTIQIMYGCDVGSDGRF

SEQ ID NO: 3811 - protein, 12 aa, Homo sapiens
RILTNNSQTPIL

SEQ ID NO: 3812 - protein, 15 aa, Homo sapiens
KVIEEFYNQTWVHRY

SEQ ID NO: 3813 - protein, 16 aa, Homo sapiens
KLTNNSNQFQTEVGKQ

SEQ ID NO: 3814 - protein, 21 aa, Homo sapiens
KSDAVSHTGNYTCEVTELTRE

SEQ ID NO: 3815 - protein, 13 aa, Homo sapiens
FSYVNGSGAYAKD

SEQ ID NO: 3816 - protein, 16 aa, Homo sapiens
KDTCTQECSYFNITKV

SEQ ID NO: 3817 - protein, 17 aa, Homo sapiens
RNVTHLLQQELTEAQKG

SEQ ID NO: 3818 - protein, 15 aa, Homo sapiens
KLNFTGPGDPDSIRC

SEQ ID NO: 3819 - protein, 17 aa, Homo sapiens
KNMSFVNDLTVTQDGRK

SEQ ID NO: 3820 - protein, 33 aa, Homo sapiens
RDLQAPLGQSFSCSNSSIILSPAVHLDLLSLRL

SEQ ID NO: 3821 - protein, 10 aa, Homo sapiens
RNPNPSAPRE

SEQ ID NO: 3822 - protein, 13 aa, Homo sapiens
RDIYTFDGALNKS

SEQ ID NO: 3823 - protein, 19 aa, Homo sapiens
KVAYSNDSANWTEYQDPRT

SEQ ID NO: 3824 - protein, 22 aa, Homo sapiens
KDLCGPDAGPIGNATGQADCKA

SEQ ID NO: 3825 - protein, 16 aa, Homo sapiens
KDMSDGFISNLTIQRQ

SEQ ID NO: 3826 - protein, 26 aa, Homo sapiens
RTYTYADTPDDFQLHNFSLPEEDTKL

SEQ ID NO: 3827 - protein, 27 aa, Homo sapiens
RDTAVEGEEIEVNCTAMASKPATTIRW

SEQ ID NO: 3828 - protein, 20 aa, Homo sapiens
RGQTAESLAVHNITVCEQKI

SEQ ID NO: 3829 - protein, 16 aa, Homo sapiens
KNACCSTNTSQEAHKD

SEQ ID NO: 3830 - protein, 17 aa, Homo sapiens
KHLLENSTASVSEAERK

SEQ ID NO: 3831 - protein, 22 aa, Homo sapiens
RSTYNDTEDVSQASPSESEARF

SEQ ID NO: 3832 - protein, 26 aa, Homo sapiens
RSNYTPITNVPPEVTVLTNSPVELRE

SEQ ID NO: 3833 - protein, 22 aa, Homo sapiens
RTELDLRPQGLELFENTSAPYQ

SEQ ID NO: 3834 - protein, 19 aa, Homo sapiens
KNCSAACPGLQLSNNPVKG

SEQ ID NO: 3835 - protein, 16 aa, Homo sapiens
YLRPGQAAAFNVTFRR

SEQ ID NO: 3836 - protein, 29 aa, Homo sapiens
KGFQDVEAQAATCNHTVMALMASLDAEKA

SEQ ID NO: 3837 - protein, 33 aa, Homo sapiens
KSVEFTFCNDTVVIPCFVTNMEAQNTTEVYVKW

SEQ ID NO: 3838 - protein, 14 aa, Homo sapiens
KDITDLINNTFIRT

SEQ ID NO: 3839 - protein, 26 aa, Homo sapiens
RLQDEQEEVLNVNLEGNLTLEGVTRG

SEQ ID NO: 3840 - protein, 32 aa, Homo sapiens
KSCGECIQAGPNCGWCTNSTFLQEGMPTSARC

SEQ ID NO: 3841 - protein, 13 aa, Homo sapiens
RIVDVNLTSEGKV

SEQ ID NO: 3842 - protein, 19 aa, Homo sapiens
KGQTEIQVNCPPAVTENKT

SEQ ID NO: 3843 - protein, 22 aa, Homo sapiens
KQLVLNLTGNTLCAGGASDEKL

SEQ ID NO: 3844 - protein, 28 aa, Homo sapiens
RIHYLYLQNNFITELPVESFQNATGLRW

SEQ ID NO: 3845 - protein, 25 aa, Homo sapiens
KHSNCTHQQDAGVTCSDGSNLEMRL

SEQ ID NO: 3846 - protein, 12 aa, Homo sapiens
RELFNITNGARK

SEQ ID NO: 3847 - protein, 17 aa, Homo sapiens
RGYYNQSEDGSHTLQRM

SEQ ID NO: 3848 - protein, 28 aa, Homo sapiens
RGYYNQSEDGSHTIQIMYGCDVGPDGRF

SEQ ID NO: 3849 - protein, 17 aa, Homo sapiens
RGYYNQSEDGSHTIQRM

SEQ ID NO: 3850 - protein, 20 aa, Homo sapiens
RQAIHVGNQTFNDGTIVEKY

SEQ ID NO: 3851 - protein, 13 aa, Homo sapiens
LNVYYNYSGQVKC

SEQ ID NO: 3852 - protein, 12 aa, Homo sapiens
KNITIVTGAPRH

SEQ ID NO: 3853 - protein, 23 aa, Homo sapiens
RFTFTSHTPGDHQICLHSNSTRM

SEQ ID NO: 3854 - protein, 16 aa, Homo sapiens
RGNITEYQCHQYITKM

SEQ ID NO: 3855 - protein, 12 aa, Homo sapiens
KGWNWTSGFNKC

SEQ ID NO: 3856 - protein, 29 aa, Homo sapiens
KCFDAMEVDALNSSHPVSTPVENPAQIRE

SEQ ID NO: 3857 - protein, 16 aa, Homo sapiens
RLQVPVEAVNMSLGLS

SEQ ID NO: 3858 - protein, 18 aa, Homo sapiens
ISVVVHLADFNSSWRDAM

SEQ ID NO: 3859 - protein, 23 aa, Homo sapiens
REDAQINTTIGSVTAQDPDAARN

SEQ ID NO: 3860 - protein, 18 aa, Homo sapiens
KANTTQPGIVEGGQVLKC

SEQ ID NO: 3861 - protein, 25 aa, Homo sapiens
KALIYQFSPIYTGNISSFQQCYIFD

SEQ ID NO: 3862 - protein, 15 aa, Homo sapiens
RVTPACNTSLPAQRW

SEQ ID NO: 3863 - protein, 24 aa, Homo sapiens
RKENSSEICSNNGECVCGQCVCRK

SEQ ID NO: 3864 - protein, 19 aa, Homo sapiens
ALPEICTQCPGSVQNLSKV

SEQ ID NO: 3865 - protein, 24 aa, Homo sapiens
KFYATNDTEVAQSNFEALQDFFRL

SEQ ID NO: 3866 - protein, 12 aa, Homo sapiens
RLANYTGGIYAE

SEQ ID NO: 3867 - protein, 18 aa, Homo sapiens
RTILVDNNTWNNTHISRV

SEQ ID NO: 3868 - protein, 17 aa, Homo sapiens
RSYSTTYEERNITGTRV

SEQ ID NO: 3869 - protein, 13 aa, Homo sapiens
RIHNVTASDSGKY

SEQ ID NO: 3870 - protein, 17 aa, Homo sapiens
RQNIVNATANLGQSVTL

SEQ ID NO: 3871 - protein, 25 aa, Homo sapiens
YWTLTNNDTHTQEPSAQQGEEVLRQ

SEQ ID NO: 3872 - protein, 20 aa, Homo sapiens
RNHTMVTEFILLGIPETEGL

SEQ ID NO: 3873 - protein, 18 aa, Homo sapiens
KNSTFGSVEVHNLQPEKV

SEQ ID NO: 3874 - protein, 16 aa, Homo sapiens
RYFFNVSDEAALLEKA

SEQ ID NO: 3875 - protein, 16 aa, Homo sapiens
RNMSNQLGLLAVNQRF

SEQ ID NO: 3876 - protein, 21 aa, Homo sapiens
RVGAHDPPAQVLQELNVTVVT

SEQ ID NO: 3877 - protein, 19 aa, Homo sapiens
RASPPSSSCNISSGEMQKV

SEQ ID NO: 3878 - protein, 15 aa, Homo sapiens
RITSASVNDSGEYRC

SEQ ID NO: 3879 - protein, 13 aa, Homo sapiens
KSNSSMHITDCRL

SEQ ID NO: 3880 - protein, 17 aa, Homo sapiens
MKAGNFSDTPEFFLLGL

SEQ ID NO: 3881 - protein, 32 aa, Homo sapiens
RIQNLRQMNETSPDNVCYEGQSAYDVADLLKQ

SEQ ID NO: 3882 - protein, 23 aa, Homo sapiens
RELQCQISDTSAVLSMDNSSLDM

SEQ ID NO: 3883 - protein, 23 aa, Homo sapiens
KNASPAGDEDSSDSPDSEVGVKA

SEQ ID NO: 3884 - protein, 16 aa, Homo sapiens
QIQALNMSSCPLDSKG

SEQ ID NO: 3885 - protein, 17 aa, Homo sapiens
RLGFLGNQSQGCLPART

SEQ ID NO: 3886 - protein, 18 aa, Homo sapiens
RHHMYTNVSGLTSFGEKV

SEQ ID NO: 3887 - protein, 14 aa, Homo sapiens
KYLNFTASENTSRV

SEQ ID NO: 3888 - protein, 13 aa, Homo sapiens
KRECHFFNGTERV

SEQ ID NO: 3889 - protein, 26 aa, Homo sapiens
KGPYTLQGLLGCELGPDNTSVPTAKF

SEQ ID NO: 3890 - protein, 27 aa, Homo sapiens
KANNNDSGEYTCQTGQTSLSDPVHLTV

SEQ ID NO: 3891 - protein, 17 aa, Homo sapiens
RLLLTANVSSENNTPRT

SEQ ID NO: 3892 - protein, 12 aa, Homo sapiens
SGSNFTIQDNKD

SEQ ID NO: 3893 - protein, 12 aa, Homo sapiens
FNVTNPEEILRG

SEQ ID NO: 3894 - protein, 11 aa, Homo sapiens
RYEQLQNETRQ

SEQ ID NO: 3895 - protein, 15 aa, Homo sapiens
RLNNITIIGPLDMKQ

SEQ ID NO: 3896 - protein, 16 aa, Homo sapiens
KENGMPMDIVNTSGRF

SEQ ID NO: 3897 - protein, 11 aa, Homo sapiens
IDLVQNSSQKT

SEQ ID NO: 3898 - protein, 16 aa, Homo sapiens
RLAFQNMNGSEYFVKI

SEQ ID NO: 3899 - protein, 29 aa, Homo sapiens
KCGALQGLYTTVDFGTGSNITDAFLSQRK

SEQ ID NO: 3900 - protein, 26 aa, Homo sapiens
RYSVQLMSFVYNLSDTHLFPNASSKE

SEQ ID NO: 3901 - protein, 14 aa, Homo sapiens
RTQDEILFSNSTRL

SEQ ID NO: 3902 - protein, 16 aa, Homo sapiens
RLAVTNTTMTGTVLKM

SEQ ID NO: 3903 - protein, 13 aa, Homo sapiens
RELAVPDGYTNRT

SEQ ID NO: 3904 - protein, 13 aa, Homo sapiens
KEIFVANGTQGKL

SEQ ID NO: 3905 - protein, 16 aa, Homo sapiens
KLANNTHQHVFDDLRG

SEQ ID NO: 3906 - protein, 15 aa, Homo sapiens
REASIVGENETYPRA

SEQ ID NO: 3907 - protein, 12 aa, Homo sapiens
RYVQNGTYTVKI

SEQ ID NO: 3908 - protein, 11 aa, Homo sapiens
KVNVTVEDERT

SEQ ID NO: 3909 - protein, 18 aa, Homo sapiens
RDINSQQELQNITTDTRF

SEQ ID NO: 3910 - protein, 19 aa, Homo sapiens
RATVFANGSLLLTQVRPRN

SEQ ID NO: 3911 - protein, 16 aa, Homo sapiens
KTCNPETFPSSNESRQ

SEQ ID NO: 3912 - protein, 12 aa, Homo sapiens
RFINYNQTVSRM

SEQ ID NO: 3913 - protein, 18 aa, Homo sapiens
YISVMVNNGSLSYDHSKD

SEQ ID NO: 3914 - protein, 24 aa, Homo sapiens
RVPPMVNVTRSEASEGNITVTCRA

SEQ ID NO: 3915 - protein, 14 aa, Homo sapiens
RSEASEGNITVTCR

SEQ ID NO: 3916 - protein, 20 aa, Homo sapiens
AALPPAPGTELSYLNGTFRL

SEQ ID NO: 3917 - protein, 17 aa, Homo sapiens
KDYYPINESLASLPLRV

SEQ ID NO: 3918 - protein, 13 aa, Homo sapiens
KDEGLCSANVTRY

SEQ ID NO: 3919 - protein, 21 aa, Homo sapiens
KISSLQTTEKNDTVAGQGERD

SEQ ID NO: 3920 - protein, 16 aa, Homo sapiens
YFMNLSQANAQGTPRW

SEQ ID NO: 3921 - protein, 21 aa, Homo sapiens
RDDAGNYTCIASNGPQGQIRA

SEQ ID NO: 3922 - protein, 12 aa, Homo sapiens
KNITDLVEGAKK

SEQ ID NO: 3923 - protein, 12 aa, Homo sapiens
KGEYFVNVTTRI

SEQ ID NO: 3924 - protein, 12 aa, Homo sapiens
RSAEFFNYTVRT

SEQ ID NO: 3925 - protein, 11 aa, Homo sapiens
RYNCSIESPRK

SEQ ID NO: 3926 - protein, 12 aa, Homo sapiens
RASQNITYHCKN

SEQ ID NO: 3927 - protein, 11 aa, Homo sapiens
QNATVEAGTRC

SEQ ID NO: 3928 - protein, 9 aa, Homo sapiens
RALVNFTRS

SEQ ID NO: 3929 - protein, 19 aa, Homo sapiens
REQQLESCACNETDNSCKV

SEQ ID NO: 3930 - protein, 15 aa, Homo sapiens
KFVNSTGYLTEAEKF

SEQ ID NO: 3931 - protein, 18 aa, Homo sapiens
RRPPLAELAALNLSGSRL

SEQ ID NO: 3932 - protein, 12 aa, Homo sapiens
KTYNASVLPVRV

SEQ ID NO: 3933 - protein, 32 aa, Homo sapiens
RVLQQGAPGCALVLDTMANSSSSAYGAYFERL

SEQ ID NO: 3934 - protein, 16 aa, Homo sapiens
RTNQDIPAPANFSQRG

SEQ ID NO: 3935 - protein, 9 aa, Homo sapiens
KYFNYTVKV

SEQ ID NO: 3936 - protein, 22 aa, Homo sapiens
RTELDMQPQGLGLFVNTSAPRQ

SEQ ID NO: 3937 - protein, 32 aa, Homo sapiens
RVQVTLDGVPAAAPGQPAQLQLNATESDDGRS

SEQ ID NO: 3938 - protein, 15 aa, Homo sapiens
KNLNNSQSDVVSFRL

SEQ ID NO: 3939 - protein, 12 aa, Homo sapiens
KNINGTDPIQKY

SEQ ID NO: 3940 - protein, 13 aa, Homo sapiens
KLDNYSTQELGKT

SEQ ID NO: 3941 - protein, 13 aa, Homo sapiens
KDLVVQQAGTNKT

SEQ ID NO: 3942 - protein, 14 aa, Homo sapiens
REIVCNVTLGGERR

SEQ ID NO: 3943 - protein, 23 aa, Homo sapiens
KTFKNESENTCQDVDECQQNPRL

SEQ ID NO: 3944 - protein, 19 aa, Homo sapiens
RDFVNCSTLPALNLASWRE

SEQ ID NO: 3945 - protein, 12 aa, Homo sapiens
KVLNNITNDLRL

SEQ ID NO: 3946 - protein, 16 aa, Homo sapiens
RLLETVEYNISGAERT

SEQ ID NO: 3947 - protein, 10 aa, Homo sapiens
RHMPWNITRM

SEQ ID NO: 3948 - protein, 12 aa, Homo sapiens
RGTANLSETIRV

SEQ ID NO: 3949 - protein, 13 aa, Homo sapiens
KSECHFFNGTERV

SEQ ID NO: 3950 - protein, 13 aa, Homo sapiens
RIVNETLYENTKL

SEQ ID NO: 3951 - protein, 13 aa, Homo sapiens
RVLEAVNGTDARL

SEQ ID NO: 3952 - protein, 13 aa, Homo sapiens
AKNYSVLYFQQKV

SEQ ID NO: 3953 - protein, 11 aa, Homo sapiens
VPYANHSSFRS

SEQ ID NO: 3954 - protein, 22 aa, Homo sapiens
SYNDFGNYNNQSSNFGPMMGGN

SEQ ID NO: 3955 - protein, 19 aa, Homo sapiens
RVGLIGSCTNSSYEDMGRS

SEQ ID NO: 3956 - protein, 12 aa, Homo sapiens
RRNSSSSMSSRL

SEQ ID NO: 3957 - protein, 28 aa, Homo sapiens
RFSNLLNVSTWGILCNLCNSPRSFPKKG

SEQ ID NO: 3958 - protein, 21 aa, Homo sapiens
QSNLTDMRCRTTFYTALGRLL

SEQ ID NO: 3959 - protein, 20 aa, Homo sapiens
MLKSPFAGSGILAATNSTEL

SEQ ID NO: 3960 - protein, 17 aa, Homo sapiens
MLDTWNESIFSNIKNRL

SEQ ID NO: 3961 - protein, 10 aa, Homo sapiens
KWPTNTTMRT

SEQ ID NO: 3962 - protein, 32 aa, Homo sapiens
KVFLATNSSYNYTNAIMTYLFSISEAEASGRP

SEQ ID NO: 3963 - protein, 15 aa, Homo sapiens
KNGDAYGFYNNSVKT

SEQ ID NO: 3964 - protein, 20 aa, Homo sapiens
KNMSNLRTWLARIESELSKP

SEQ ID NO: 3965 - protein, 18 aa, Homo sapiens
KNFSEIHPGMLLIGFVKS

SEQ ID NO: 3966 - protein, 18 aa, Homo sapiens
KMLMELSAGAANFTDQKE

SEQ ID NO: 3967 - protein, 15 aa, Homo sapiens
KIYNWSGYPLLVQKL

SEQ ID NO: 3968 - protein, 31 aa, Homo sapiens
KDSLNEMFPSAILNGTGSPTKFKMPFNNAKK

SEQ ID NO: 3969 - protein, 24 aa, Homo sapiens
KAKSEENQGDNSSENGNGKEKIRI

SEQ ID NO: 3970 - protein, 19 aa, Homo sapiens
KAIFSHAAGDNSTLLSFKE

SEQ ID NO: 3971 - protein, 18 aa, Homo sapiens
GMEGDFNASSGWLTRFKQ

SEQ ID NO: 3972 - protein, 19 aa, Homo sapiens
DFKLSGPSNSSMEDFTKRS

SEQ ID NO: 3973 - protein, 12 aa, Homo sapiens
VMIPPNDSRARS

SEQ ID NO: 3974 - protein, 17 aa, Homo sapiens
RVQCSPGHFYNTTTHRC

SEQ ID NO: 3975 - protein, 26 aa, Homo sapiens
RSACNCTAGAACDAVNGSCLCPAGRR

SEQ ID NO: 3976 - protein, 18 aa, Homo sapiens
RDQLMTVLANVTHLLIRA

SEQ ID NO: 3977 - protein, 12 aa, Homo sapiens
MSSSPNITISCQ

SEQ ID NO: 3978 - protein, 33 aa, Homo sapiens
FMLENGTSDCNLPENPLFIACGGQQNHTQGSKM

SEQ ID NO: 3979 - protein, 15 aa, Homo sapiens
RVQNVSVLSICDFRE

SEQ ID NO: 3980 - protein, 30 aa, Homo sapiens
LTGELHDGVSKANFSIGRMTQDLAGTYRCY

SEQ ID NO: 3981 - protein, 28 aa, Homo sapiens
KRGTFIEFRNGMLNVSPIGRSCSQEERI

SEQ ID NO: 3982 - protein, 27 aa, Homo sapiens
YPPEVSVIWTFINGSGTLLCAASGYPQ

SEQ ID NO: 3983 - protein, 22 aa, Homo sapiens
WIVGNWSECSTTCGLGAYWKRV

SEQ ID NO: 3984 - protein, 23 aa, Homo sapiens
TLGPFILNVTSGALLCSQALCSG

SEQ ID NO: 3985 - protein, 12 aa, Homo sapiens
RWKSANFSGVKY

SEQ ID NO: 3986 - protein, 12 aa, Homo sapiens
RVVLGAHNLSRR

SEQ ID NO: 3987 - protein, 30 aa, Homo sapiens
RSHCEDIDECDFPAACIGGDCINTNGSYRC

SEQ ID NO: 3988 - protein, 24 aa, Homo sapiens
RMCASYSELELVTSAEGLNSSQKL

SEQ ID NO: 3989 - protein, 19 aa, Homo sapiens
RFLQQDKYECHFFNGTERV

SEQ ID NO: 3990 - protein, 15 aa, Homo sapiens
KYVGATFPGTVCNKS

SEQ ID NO: 3991 - protein, 29 aa, Homo sapiens
KTLTNQTEAELATPEGIYERPVDYLPERD

SEQ ID NO: 3992 - protein, 10 aa, Homo sapiens
KSTFINMTRV

SEQ ID NO: 3993 - protein, 24 aa, Homo sapiens
KNNSELLNNLGNFINRAGMFVSKF

SEQ ID NO: 3994 - protein, 13 aa, Homo sapiens
KHECHFFNGTERV

SEQ ID NO: 3995 - protein, 15 aa, Homo sapiens
KFNLTNCCLQIDDQG

SEQ ID NO: 3996 - protein, 16 aa, Homo sapiens
KCHEGNGTFECGACRC

SEQ ID NO: 3997 - protein, 30 aa, Homo sapiens
AFYMGNFSIPSGIPDLPQDTFIQFPGWTKG

SEQ ID NO: 3998 - protein, 9 aa, Homo sapiens
SEICGANHS

SEQ ID NO: 3999 - protein, 34 aa, Homo sapiens
RKENSTLQEMNSTTESNIILSNVSVGAITEATKM

SEQ ID NO: 4000 - protein, 20 aa, Homo sapiens
MITAVGLSNLQFVDMNSSRN

SEQ ID NO: 4001 - protein, 28 aa, Homo sapiens
KENSAFPPFCCNDNVTNTANETCTKQKA

SEQ ID NO: 4002 - protein, 36 aa, Homo sapiens
KDKVAVLSVDDCDVAVALQFGAEIGNYSCAAAGVQT

SEQ ID NO: 4003 - protein, 25 aa, Homo sapiens
HISNLQFNSSLEDPSTDYYQELQRD

SEQ ID NO: 4004 - protein, 15 aa, Homo sapiens
NTGDNTTFPDAEDKG

SEQ ID NO: 4005 - protein, 37 aa, Homo sapiens
RGTQLFEDNYALAVLDNGDPLNNTTPVTGASPGGLRE

SEQ ID NO: 4006 - protein, 14 aa, Homo sapiens
RDVNCSVMGPQEKK

SEQ ID NO: 4007 - protein, 11 aa, Homo sapiens
QFGMNASSSRF

SEQ ID NO: 4008 - protein, 13 aa, Homo sapiens
IPGAVSANMTVKG

SEQ ID NO: 4009 - protein, 23 aa, Homo sapiens
KFVEQNETAINITTYPDQENNKL

SEQ ID NO: 4010 - protein, 14 aa, Homo sapiens
RFFPYANGTLGIRD

SEQ ID NO: 4011 - protein, 18 aa, Homo sapiens
KCATVTENATGDLATSRN

SEQ ID NO: 4012 - protein, 24 aa, Homo sapiens
RLLIAGTNSSDLQQILSLLESNKD

SEQ ID NO: 4013 - protein, 13 aa, Homo sapiens
RVWNSTFIEDYRD

SEQ ID NO: 4014 - protein, 10 aa, Homo sapiens
RINTTADEKD

SEQ ID NO: 4015 - protein, 12 aa, Homo sapiens
KGSNYSEILDKY

SEQ ID NO: 4016 - protein, 13 aa, Homo sapiens
RDNHTHSDIQVKL

SEQ ID NO: 4017 - protein, 12 aa, Homo sapiens
VFEFNGTQAVRI

SEQ ID NO: 4018 - protein, 13 aa, Homo sapiens
KNLPIEDITNSTL

SEQ ID NO: 4019 - protein, 15 aa, Homo sapiens
ALANLTGTVVNLTRE

SEQ ID NO: 4020 - protein, 10 aa, Homo sapiens
RWWYNVTDGS

SEQ ID NO: 4021 - protein, 24 aa, Homo sapiens
RQSQFLNVTATEDYVDPVTNQTKT

SEQ ID NO: 4022 - protein, 19 aa, Homo sapiens
AINASVGAAGSAENAPSKE

SEQ ID NO: 4023 - protein, 13 aa, Homo sapiens
RYAVYWNSSNPRF

SEQ ID NO: 4024 - protein, 13 aa, Homo sapiens
AYNQSAGNPNYRR

SEQ ID NO: 4025 - protein, 18 aa, Homo sapiens
KGPLANPIWNVTGFTGRD

SEQ ID NO: 4026 - protein, 14 aa, Homo sapiens
RGYVEGVHNSSIAL

SEQ ID NO: 4027 - protein, 20 aa, Homo sapiens
KQDQQLQNCTEPGEQPSPKQ

SEQ ID NO: 4028 - protein, 10 aa, Homo sapiens
KDIWNVTGAQ

SEQ ID NO: 4029 - protein, 17 aa, Homo sapiens
RIFNIDSGNGSIFTSKL

SEQ ID NO: 4030 - protein, 12 aa, Homo sapiens
KITYVENQTAME

SEQ ID NO: 4031 - protein, 12 aa, Homo sapiens
MGLQLNITQDKV

SEQ ID NO: 4032 - protein, 12 aa, Homo sapiens
KVNETEMDIAKH

SEQ ID NO: 4033 - protein, 11 aa, Homo sapiens
KHLNGTITAKY

SEQ ID NO: 4034 - protein, 15 aa, Homo sapiens
RNFPDAFEYNNVSRQ

SEQ ID NO: 4035 - protein, 19 aa, Homo sapiens
RYTGTRPSNLANNTILVKW

SEQ ID NO: 4036 - protein, 13 aa, Homo sapiens
KNGVNGTGENGRK

SEQ ID NO: 4037 - protein, 27 aa, Homo sapiens
KDTAVEGEEIEVNCTAMASKPATTIRW

SEQ ID NO: 4038 - protein, 13 aa, Homo sapiens
FDVTNLSQDMLRS

SEQ ID NO: 4039 - protein, 14 aa, Homo sapiens
VFECFENNSCEIRG

SEQ ID NO: 4040 - protein, 18 aa, Homo sapiens
KDLDTDFTNNASQPETKA

SEQ ID NO: 4041 - protein, 17 aa, Homo sapiens
RYHSSLGQLNFTGSVIY

SEQ ID NO: 4042 - protein, 13 aa, Homo sapiens
RLLNATHQIGCQS

SEQ ID NO: 4043 - protein, 14 aa, Homo sapiens
RLEFTGELNNTYIF

SEQ ID NO: 4044 - protein, 13 aa, Homo sapiens
YGFEGANSNNSKY

SEQ ID NO: 4045 - protein, 11 aa, Homo sapiens
RYETTNKTYKT

SEQ ID NO: 4046 - protein, 12 aa, Homo sapiens
RIINGSDCDMHT

SEQ ID NO: 4047 - protein, 15 aa, Homo sapiens
RDMNQTLGDNITVKM

SEQ ID NO: 4048 - protein, 13 aa, Homo sapiens
RHTVFWNSSNPKF

SEQ ID NO: 4049 - protein, 13 aa, Homo sapiens
RWVSLDNWTYSKE

SEQ ID NO: 4050 - protein, 14 aa, Homo sapiens
KCSNISIGDEVQFE

SEQ ID NO: 4051 - protein, 19 aa, Homo sapiens
HHVNGSRPPCTGEGDTPKC

SEQ ID NO: 4052 - protein, 13 aa, Homo sapiens
SPEMNSTINIHRT

SEQ ID NO: 4053 - protein, 21 aa, Homo sapiens
KYPHNHHVVNNTLEGNCSSKS

SEQ ID NO: 4054 - protein, 11 aa, Homo sapiens
HEGQQYNITRS

SEQ ID NO: 4055 - protein, 19 aa, Homo sapiens
RIIYGVENSSTFLECSPKS

SEQ ID NO: 4056 - protein, 18 aa, Homo sapiens
RAFGIVECVLCTCNVTKQ

SEQ ID NO: 4057 - protein, 16 aa, Homo sapiens
KQYLSYETLYANGSRT

SEQ ID NO: 4058 - protein, 13 aa, Homo sapiens
RCMKMAYNMTFFP

SEQ ID NO: 4059 - protein, 22 aa, Homo sapiens
KLPSGMLVISNATEGDGGLYRC

SEQ ID NO: 4060 - protein, 10 aa, Homo sapiens
RQVVENMTRA

SEQ ID NO: 4061 - protein, 19 aa, Homo sapiens
KTVAQNYSSVTHLHSIGKS

SEQ ID NO: 4062 - protein, 14 aa, Homo sapiens
KTYNGTNPDAASRA

SEQ ID NO: 4063 - protein, 16 aa, Homo sapiens
RQGIDFCPGQNVSGVT

SEQ ID NO: 4064 - protein, 18 aa, Homo sapiens
RGDTLCTNLTGTLLPSRN

SEQ ID NO: 4065 - protein, 15 aa, Homo sapiens
KGSATFNSTEGVLQH

SEQ ID NO: 4066 - protein, 10 aa, Homo sapiens
KAINDTAARL

SEQ ID NO: 4067 - protein, 11 aa, Homo sapiens
KLIDNNKTEKE

SEQ ID NO: 4068 - protein, 10 aa, Homo sapiens
RSLSNSTARN

SEQ ID NO: 4069 - protein, 27 aa, Homo sapiens
RGNYLIMPSGNLQIVNASQEDEGMYKC

SEQ ID NO: 4070 - protein, 24 aa, Homo sapiens
HWLPVETPEGVPLGPPENISATRN

SEQ ID NO: 4071 - protein, 14 aa, Homo sapiens
RSPVQENSSDLNKS

SEQ ID NO: 4072 - protein, 19 aa, Homo sapiens
PYTPGFPSFNHTQFPPSRS

SEQ ID NO: 4073 - protein, 15 aa, Homo sapiens
KENSTDYLYPEQLKM

SEQ ID NO: 4074 - protein, 9 aa, Homo sapiens
RFDNETFRI

SEQ ID NO: 4075 - protein, 13 aa, Homo sapiens
KVPGNQTSTTLKL

SEQ ID NO: 4076 - protein, 14 aa, Homo sapiens
FTITGNNSNFAQRF

SEQ ID NO: 4077 - protein, 9 aa, Homo sapiens
RKFNATERE

SEQ ID NO: 4078 - protein, 12 aa, Homo sapiens
KFNITDNVMQHL

SEQ ID NO: 4079 - protein, 17 aa, Homo sapiens
KNWQLTEEDFGNTSGRL

SEQ ID NO: 4080 - protein, 12 aa, Homo sapiens
LFEDETPITNRS

SEQ ID NO: 4081 - protein, 15 aa, Homo sapiens
YNGSICGDDQNGPKI

SEQ ID NO: 4082 - protein, 19 aa, Homo sapiens
RVQQVGHYPPANSSLSSRS

SEQ ID NO: 4083 - protein, 18 aa, Homo sapiens
RTAVFADQVIVGNASLRL

SEQ ID NO: 4084 - protein, 13 aa, Homo sapiens
SYNVTNLTDDLKA

SEQ ID NO: 4085 - protein, 13 aa, Homo sapiens
TYINMENFTLARD

SEQ ID NO: 4086 - protein, 12 aa, Homo sapiens
RLGANGSHIPQT

SEQ ID NO: 4087 - protein, 21 aa, Homo sapiens
RETLLWHNITVIATEINNPKQ

SEQ ID NO: 4088 - protein, 11 aa, Homo sapiens
RDLQANDTGRY

SEQ ID NO: 4089 - protein, 12 aa, Homo sapiens
FTLNFTINNLRY

SEQ ID NO: 4090 - protein, 15 aa, Homo sapiens
RWTPLNSSTIIGYRI

SEQ ID NO: 4091 - protein, 13 aa, Homo sapiens
KEASQNITYICKN

SEQ ID NO: 4092 - protein, 13 aa, Homo sapiens
LTILNQTIDICKH

SEQ ID NO: 4093 - protein, 13 aa, Homo sapiens
RNNVITLNITGKA

SEQ ID NO: 4094 - protein, 20 aa, Homo sapiens
IAFPGPAGPSFNSTEDHSKW

SEQ ID NO: 4095 - protein, 11 aa, Homo sapiens
KSEDIKNVSRL

SEQ ID NO: 4096 - protein, 10 aa, Homo sapiens
KANATIEVKA

SEQ ID NO: 4097 - protein, 16 aa, Homo sapiens
RIAVDWESLGYNITRC

SEQ ID NO: 4098 - protein, 20 aa, Homo sapiens
RDPGAAVPGAANASAQQPRT

SEQ ID NO: 4099 - protein, 13 aa, Homo sapiens
KDLNETIHYMYKH

SEQ ID NO: 4100 - protein, 30 aa, Homo sapiens
KGHHVSQEPWNSSITLTSQAGAVFQSFAKF

SEQ ID NO: 4101 - protein, 27 aa, Homo sapiens
RDEIGNVSTSHLLILDDSVEMEIRPRF

SEQ ID NO: 4102 - protein, 14 aa, Homo sapiens
ITIFGPVNNSTMKI

SEQ ID NO: 4103 - protein, 15 aa, Homo sapiens
KYQPINSTHELGPLV

SEQ ID NO: 4104 - protein, 11 aa, Homo sapiens
RSANASFNIKW

SEQ ID NO: 4105 - protein, 14 aa, Homo sapiens
RLGGWNITGPWAKD

SEQ ID NO: 4106 - protein, 20 aa, Homo sapiens
KDVECGEGHFCHDNQTCCRD

SEQ ID NO: 4107 - protein, 21 aa, Homo sapiens
RLPHDCFQNATNSFYYDVGRC

SEQ ID NO: 4108 - protein, 12 aa, Homo sapiens
RFANEYPNITRL

SEQ ID NO: 4109 - protein, 19 aa, Homo sapiens
RHCLPCHPECQPQNGSVTC

SEQ ID NO: 4110 - protein, 23 aa, Homo sapiens
RLGDVEVNAGQNATFQCIATGRD

SEQ ID NO: 4111 - protein, 20 aa, Homo sapiens
YDIDGPMNCTSDMEINPLRI

SEQ ID NO: 4112 - protein, 17 aa, Homo sapiens
YNFENASQTFDDLPARF

SEQ ID NO: 4113 - protein, 11 aa, Homo sapiens
YVVTSNMTLRD

SEQ ID NO: 4114 - protein, 13 aa, Homo sapiens
RTVLQFVTNLTKE

SEQ ID NO: 4115 - protein, 15 aa, Homo sapiens
RGNPTVEVDLFTSKG

SEQ ID NO: 4116 - protein, 16 aa, Homo sapiens
KVLNSSNEHVISIGAS

SEQ ID NO: 4117 - protein, 21 aa, Homo sapiens
TMLWWTANDTHIESAYPGGRV

SEQ ID NO: 4118 - protein, 17 aa, Homo sapiens
RGLLHLENASYGIEPLQ

SEQ ID NO: 4119 - protein, 15 aa, Homo sapiens
KAGFEAVENGTVCRG

SEQ ID NO: 4120 - protein, 20 aa, Homo sapiens
RDSCQGDSGGPVVCNGSLQG

SEQ ID NO: 4121 - protein, 15 aa, Homo sapiens
KRVNNTFCQDINECQ

SEQ ID NO: 4122 - protein, 21 aa, Homo sapiens
RVNVVNSTLAEVHWDPVPLKS

SEQ ID NO: 4123 - protein, 22 aa, Homo sapiens
RLLHGDPGEEDGAELDLNMTRS

SEQ ID NO: 4124 - protein, 13 aa, Homo sapiens
INTTGTLKPDDRV

SEQ ID NO: 4125 - protein, 19 aa, Homo sapiens
KQNGSASSVAGPASGLDKS

SEQ ID NO: 4126 - protein, 12 aa, Homo sapiens
RFFIINKENYTE

SEQ ID NO: 4127 - protein, 17 aa, Homo sapiens
KNNTFFDMNIFEDGPYE

SEQ ID NO: 4128 - protein, 10 aa, Homo sapiens
KANLTWSVKH

SEQ ID NO: 4129 - protein, 8 aa, Homo sapiens
LSGNKTRS

SEQ ID NO: 4130 - protein, 31 aa, Homo sapiens
KDNGQAPFTITPVFSDFPVHGMEPMNNATKG

SEQ ID NO: 4131 - protein, 25 aa, Homo sapiens
RLASAFGDPHFVTFDGTNFTFNGRG

SEQ ID NO: 4132 - protein, 24 aa, Homo sapiens
RNHSGGGGGGGSGAAAGVGAAAAA

SEQ ID NO: 4133 - protein, 10 aa, Homo sapiens
KYIHQNYTKA

SEQ ID NO: 4134 - protein, 10 aa, Homo sapiens
KNGTSFDIHY

SEQ ID NO: 4135 - protein, 15 aa, Homo sapiens
KVFVQTPTINYTLRD

SEQ ID NO: 4136 - protein, 13 aa, Homo sapiens
RILCDNADNITRV

SEQ ID NO: 4137 - protein, 13 aa, Homo sapiens
RHVVYWNSSNPRL

SEQ ID NO: 4138 - protein, 16 aa, Homo sapiens
RGANDSTSAMPEQMKF

SEQ ID NO: 4139 - protein, 17 aa, Homo sapiens
KSIVLEPIYWNSSNSKF

SEQ ID NO: 4140 - protein, 12 aa, Homo sapiens
KHTNMNLTQLKV

SEQ ID NO: 4141 - protein, 14 aa, Homo sapiens
KEVNISMYLVNGSV

SEQ ID NO: 4142 - protein, 9 aa, Homo sapiens
KEVNISMYL

SEQ ID NO: 4143 - protein, 15 aa, Homo sapiens
EGIEILNSSAVLVKW

SEQ ID NO: 4144 - protein, 19 aa, Homo sapiens
VDSDGATNSTTANLTVNKA

SEQ ID NO: 4145 - protein, 25 aa, Homo sapiens
SSVRPPGACQANETIFCELGNPFKR

SEQ ID NO: 4146 - protein, 14 aa, Homo sapiens
RIPEISNITTTPHT

SEQ ID NO: 4147 - protein, 13 aa, Homo sapiens
LEVGWNNTASARN

SEQ ID NO: 4148 - protein, 13 aa, Homo sapiens
KLLLSINVTNTRT

SEQ ID NO: 4149 - protein, 17 aa, Homo sapiens
KGSWLLGNINQTGYFRV

SEQ ID NO: 4150 - protein, 10 aa, Homo sapiens
RALSNISLRL

SEQ ID NO: 4151 - protein, 12 aa, Homo sapiens
RKTNESVSEPRK

SEQ ID NO: 4152 - protein, 11 aa, Homo sapiens
HIPEINDSIRA

SEQ ID NO: 4153 - protein, 21 aa, Homo sapiens
KQLVHSFAEGQDQGSAYANRT

SEQ ID NO: 4154 - protein, 16 aa, Homo sapiens
RLLNCTAPGPDAAARC

SEQ ID NO: 4155 - protein, 15 aa, Homo sapiens
RLNETHIFNGSNWIM

SEQ ID NO: 4156 - protein, 16 aa, Homo sapiens
YGLCTPCQAPTNYSRW

SEQ ID NO: 4157 - protein, 17 aa, Homo sapiens
KHGNLTVDHIQNNSDSG

SEQ ID NO: 4158 - protein, 15 aa, Homo sapiens
LELFPINGSSVVERE

SEQ ID NO: 4159 - protein, 11 aa, Homo sapiens
TALNNHTVGRY

SEQ ID NO: 4160 - protein, 14 aa, Homo sapiens
RLLVPGTYNLTVVL

SEQ ID NO: 4161 - protein, 13 aa, Homo sapiens
RHNSTIDVGGQKF

SEQ ID NO: 4162 - protein, 11 aa, Homo sapiens
RGIGNWSDSKS

SEQ ID NO: 4163 - protein, 11 aa, Homo sapiens
RAGAINATYKV

SEQ ID NO: 4164 - protein, 14 aa, Homo sapiens
FTDAVNETTIMLKW

SEQ ID NO: 4165 - protein, 11 aa, Homo sapiens
ILGNTTAENRI

SEQ ID NO: 4166 - protein, 16 aa, Homo sapiens
RPGACTNITMGVVCKL

SEQ ID NO: 4167 - protein, 21 aa, Homo sapiens
KQPVSPVIHPPVSYNDTAPRI

SEQ ID NO: 4168 - protein, 21 aa, Homo sapiens
RLNSTHCQDINECAMPGVCRH

SEQ ID NO: 4169 - protein, 12 aa, Homo sapiens
RNNTIVNELVRV

SEQ ID NO: 4170 - protein, 31 aa, Homo sapiens
RLLNLTNPEASTSVLMAVTHTLTQYPFDFRG

SEQ ID NO: 4171 - protein, 22 aa, Homo sapiens
KVNNSSLIGVGYTQTLRPGVKL

SEQ ID NO: 4172 - protein, 10 aa, Homo sapiens
KNIETNYTRI

SEQ ID NO: 4173 - protein, 16 aa, Homo sapiens
KINNITVSFEGNPSGS

SEQ ID NO: 4174 - protein, 11 aa, Homo sapiens
KFQNITDFWKR

SEQ ID NO: 4175 - protein, 15 aa, Homo sapiens
RLYPNEFVNYSNAVT

SEQ ID NO: 4176 - protein, 24 aa, Homo sapiens
RAECCASGNIDTAWSNLTHPGNKI

SEQ ID NO: 4177 - protein, 21 aa, Homo sapiens
LVEAWDSSNDTVQPDSIIEKA

SEQ ID NO: 4178 - protein, 19 aa, Homo sapiens
KNYIILNMTENIDCEVFRQ

SEQ ID NO: 4179 - protein, 15 aa, Homo sapiens
VNVSDINDNPPEFRQ

SEQ ID NO: 4180 - protein, 11 aa, Homo sapiens
RQTLFFNGTRA

SEQ ID NO: 4181 - protein, 10 aa, Homo sapiens
RNTTWQAGHN

SEQ ID NO: 4182 - protein, 14 aa, Homo sapiens
RIGTFCSNGTVSRI

SEQ ID NO: 4183 - protein, 15 aa, Homo sapiens
RCVCAPDCSNITWKG

SEQ ID NO: 4184 - protein, 16 aa, Homo sapiens
RATVPVYINTTNANKY

SEQ ID NO: 4185 - protein, 11 aa, Homo sapiens
RAASNFTEIKN

SEQ ID NO: 4186 - protein, 24 aa, Homo sapiens
KQLSCVANQNGSQADCELGNPFKR

SEQ ID NO: 4187 - protein, 9 aa, Homo sapiens
KNLNFSTRY

SEQ ID NO: 4188 - protein, 12 aa, Homo sapiens
KENQNHSYSLKS

SEQ ID NO: 4189 - protein, 13 aa, Homo sapiens
RTSIPTINMENKT

SEQ ID NO: 4190 - protein, 16 aa, Homo sapiens
RNTNENPQECFNASKL

SEQ ID NO: 4191 - protein, 14 aa, Homo sapiens
RFGEFGNYSLLVKN

SEQ ID NO: 4192 - protein, 12 aa, Homo sapiens
KMLVNFLSENKS

SEQ ID NO: 4193 - protein, 17 aa, Homo sapiens
KEKGDNSTDTTQGDPLS

SEQ ID NO: 4194 - protein, 18 aa, Homo sapiens
FTLNFTITNLQYEEDMRH

SEQ ID NO: 4195 - protein, 15 aa, Homo sapiens
KDTNGSQFFITTVKT

SEQ ID NO: 4196 - protein, 17 aa, Homo sapiens
KSPSVDKYNVSGTNGTC

SEQ ID NO: 4197 - protein, 23 aa, Homo sapiens
RNIAAFGGDPNNITLFGESAGGA

SEQ ID NO: 4198 - protein, 22 aa, Homo sapiens
RLGQAPANWYNDTYPLSPPQRT

SEQ ID NO: 4199 - protein, 27 aa, Homo sapiens
KGTEVNTTVIGENDPIDEVQGFLFGKL

SEQ ID NO: 4200 - protein, 26 aa, Homo sapiens
RVETGVLKPGMVVTFAPVNVTTEVKS

SEQ ID NO: 4201 - protein, 22 aa, Homo sapiens
RYAAVNITTNQAAPSEVPTLRL

SEQ ID NO: 4202 - protein, 17 aa, Homo sapiens
KNFSIILLVTVLHCHLT

SEQ ID NO: 4203 - protein, 15 aa, Homo sapiens
RNHSIFLADINQERG

SEQ ID NO: 4204 - protein, 10 aa, Homo sapiens
RADMTKNRTV

SEQ ID NO: 4205 - protein, 22 aa, Homo sapiens
KVNNSSLIGLGYTQTLKPGIKL

SEQ ID NO: 4206 - protein, 30 aa, Homo sapiens
KTAVPPLSEGDGYSSENTSRAHTPLNTPDP

SEQ ID NO: 4207 - protein, 16 aa, Homo sapiens
KGIEYADSFTFNPSKW

SEQ ID NO: 4208 - protein, 20 aa, Homo sapiens
KERLGGGLGVAGGNSTRERL

SEQ ID NO: 4209 - protein, 18 aa, Homo sapiens
ALVNTSNLIGYQTNHIRE

SEQ ID NO: 4210 - protein, 16 aa, Homo sapiens
RTLSRPSETCNETTKL

SEQ ID NO: 4211 - protein, 40 aa, Homo sapiens
RGSDGSVGPVGPAGPNGSAGPPGFPGAPGPKGEIGAVGNA

SEQ ID NO: 4212 - protein, 25 aa, Homo sapiens
RAAPCPVPSSPGQELCGNNNVTYIS

SEQ ID NO: 4213 - protein, 12 aa, Homo sapiens
KEKDLNETLLRS

SEQ ID NO: 4214 - protein, 19 aa, Homo sapiens
KDLGQGQGQVQVQNGTLRI

SEQ ID NO: 4215 - protein, 21 aa, Homo sapiens
HLECSCHNNSTCEPATGTCRC

SEQ ID NO: 4216 - protein, 13 aa, Homo sapiens
RGPGIKPNQTSKM

SEQ ID NO: 4217 - protein, 21 aa, Homo sapiens
TANFSTFYGMLLGYANATQRG

SEQ ID NO: 4218 - protein, 16 aa, Homo sapiens
RWWHQQTNATQEVVRD

SEQ ID NO: 4219 - protein, 13 aa, Homo sapiens
RQTPEYQNESSRN

SEQ ID NO: 4220 - protein, 14 aa, Homo sapiens
RITCVGNDSFIGLS

SEQ ID NO: 4221 - protein, 18 aa, Homo sapiens
RFEAEHISNYTALLLSRD

SEQ ID NO: 4222 - protein, 16 aa, Homo sapiens
KSDEPVCASDNATYAS

SEQ ID NO: 4223 - protein, 16 aa, Homo sapiens
TWLEPDYQVYLNASKV

SEQ ID NO: 4224 - protein, 22 aa, Homo sapiens
RSLCNSIISLNTTISCSEAQKI

SEQ ID NO: 4225 - protein, 14 aa, Homo sapiens
RNGTQLQNFTLDRS

SEQ ID NO: 4226 - protein, 21 aa, Homo sapiens
RFMGDMVSFEEDRINATVWKL

SEQ ID NO: 4227 - protein, 16 aa, Homo sapiens
RETASNCNGSLAHPSD

SEQ ID NO: 4228 - protein, 16 aa, Homo sapiens
RELLLDFANSSAELTG

SEQ ID NO: 4229 - protein, 13 aa, Homo sapiens
KNTSLVTIFMIWN

SEQ ID NO: 4230 - protein, 14 aa, Homo sapiens
KNSSVGPLYSGCRL

SEQ ID NO: 4231 - protein, 13 aa, Homo sapiens
IFNAAQLDNYTRI

SEQ ID NO: 4232 - protein, 12 aa, Homo sapiens
FTINFTITNLRY

SEQ ID NO: 4233 - protein, 13 aa, Homo sapiens
ACKNVTLHVPSKL

SEQ ID NO: 4234 - protein, 14 aa, Homo sapiens
KDDVLFYNISSMKS

SEQ ID NO: 4235 - protein, 35 aa, Homo sapiens
KLLGGGDEEAIRPQMQQILDFETALANITIPQEKR

SEQ ID NO: 4236 - protein, 12 aa, Homo sapiens
KGENFTETDVKM

SEQ ID NO: 4237 - protein, 31 aa, Homo sapiens
KSGTIFDNFLITNDEAYAEEFGNETWGVTKA

SEQ ID NO: 4238 - protein, 24 aa, Homo sapiens
RDIVGNLTELESEDIQIEALLMRA

SEQ ID NO: 4239 - protein, 22 aa, Homo sapiens
RFGVNSSDVPGPAGLPGVPGRE

SEQ ID NO: 4240 - protein, 16 aa, Homo sapiens
REQRPGQNCSNYTVRF

SEQ ID NO: 4241 - protein, 19 aa, Homo sapiens
PNSNTNSSVQHVQIRVARL

SEQ ID NO: 4242 - protein, 13 aa, Homo sapiens
KNFSSEIEDLEKE

SEQ ID NO: 4243 - protein, 12 aa, Homo sapiens
RTFANGSLAFRV

SEQ ID NO: 4244 - protein, 15 aa, Homo sapiens
REGSLPGNSTISIRA

SEQ ID NO: 4245 - protein, 27 aa, Homo sapiens
KFPDEEGACQPCPINCTHSCVDLDDKG

SEQ ID NO: 4246 - protein, 26 aa, Homo sapiens
RDIVSSDFLSNMSMDFQNHLGSCQKC

SEQ ID NO: 4247 - protein, 19 aa, Homo sapiens
KLNQTEPVAGNYYPVNTRI

SEQ ID NO: 4248 - protein, 16 aa, Homo sapiens
KGQGNKVQNGSVHQKD

SEQ ID NO: 4249 - protein, 34 aa, Homo sapiens
RCVSGTQVHMNNVTVTLHDATIQAYLSNSSFSRG

SEQ ID NO: 4250 - protein, 17 aa, Homo sapiens
RLENITTGTYTIHAQKE

SEQ ID NO: 4251 - protein, 29 aa, Homo sapiens
KLLDGDLTSDPSYFQNVTGCSNYYNFLRC

SEQ ID NO: 4252 - protein, 32 aa, Homo sapiens
KDSLNSSHPISSSVQSSEQIEEMFDSLSYFKG

SEQ ID NO: 4253 - protein, 18 aa, Homo sapiens
LATGPVPFEPVNVTTDRE

SEQ ID NO: 4254 - protein, 36 aa, Homo sapiens
RLLFPTNSSSHLVALQGQPLVLECIAEGFPTPTIKW

SEQ ID NO: 4255 - protein, 28 aa, Homo sapiens
KDSITGSGLENATISVAGINHNITTGRF

SEQ ID NO: 4256 - protein, 19 aa, Homo sapiens
RGVNGLINGKANSNKSLPT

SEQ ID NO: 4257 - protein, 10 aa, Homo sapiens
QIEQLNRTKK

SEQ ID NO: 4258 - protein, 27 aa, Homo sapiens
KMISGLQALLLNGSLPEDEQERPLALC

SEQ ID NO: 4259 - protein, 16 aa, Homo sapiens
KISDSEGFKANLSLLR

SEQ ID NO: 4260 - protein, 10 aa, Homo sapiens
KHLNSSHPRS

SEQ ID NO: 4261 - protein, 14 aa, Homo sapiens
KAVENGSEALMILD

SEQ ID NO: 4262 - protein, 18 aa, Homo sapiens
VSDLEPHMNYTFTVEARN

SEQ ID NO: 4263 - protein, 14 aa, Homo sapiens
RQGEHLSNSTSAFS

SEQ ID NO: 4264 - protein, 13 aa, Homo sapiens
RKFTNISDLQPKP

SEQ ID NO: 4265 - protein, 9 aa, Homo sapiens
LIQLNHTRR

SEQ ID NO: 4266 - protein, 16 aa, Homo sapiens
LCQCRPGEGNCSCCKE

SEQ ID NO: 4267 - protein, 21 aa, Homo sapiens
KVNNGPLGNPIWNISGDPTRT

SEQ ID NO: 4268 - protein, 16 aa, Homo sapiens
KPCNASDSQCPPDGRY

SEQ ID NO: 4269 - protein, 13 aa, Homo sapiens
KITNNQTGQMVFS

SEQ ID NO: 4270 - protein, 12 aa, Homo sapiens
HGLEVEINCTRT

SEQ ID NO: 4271 - protein, 15 aa, Homo sapiens
YSTDCTNCTCSGGRW

SEQ ID NO: 4272 - protein, 14 aa, Homo sapiens
SSQIGFNCSWCSKL

SEQ ID NO: 4273 - protein, 9 aa, Homo sapiens
RYHNQTLRY

SEQ ID NO: 4274 - protein, 13 aa, Homo sapiens
RVGNDTHCQPTKI

SEQ ID NO: 4275 - protein, 20 aa, Homo sapiens
RSLTLEPDPIVVPGNVTLSV

SEQ ID NO: 4276 - protein, 13 aa, Homo sapiens
RQTLQNASETVKY

SEQ ID NO: 4277 - protein, 15 aa, Homo sapiens
RQDFLDTYNNLTLKT

SEQ ID NO: 4278 - protein, 8 aa, Homo sapiens
RMNVTWRL

SEQ ID NO: 4279 - protein, 11 aa, Homo sapiens
RLNDTVGVTKK

SEQ ID NO: 4280 - protein, 13 aa, Homo sapiens
RHVYNNLTEEQKG

SEQ ID NO: 4281 - protein, 30 aa, Homo sapiens
RDSCQQGSNMTLIGENGHSTDTLTGSGFRV

SEQ ID NO: 4282 - protein, 15 aa, Homo sapiens
RAQPGTMSNGTETRG

SEQ ID NO: 4283 - protein, 18 aa, Homo sapiens
RAQNSLGSQHVSLNLSLQ

SEQ ID NO: 4284 - protein, 13 aa, Homo sapiens
QSILNLTFSDCKG

SEQ ID NO: 4285 - protein, 18 aa, Homo sapiens
LDGVLANPPNISSLSPRQ

SEQ ID NO: 4286 - protein, 12 aa, Homo sapiens
KVRVPENITLYT

SEQ ID NO: 4287 - protein, 17 aa, Homo sapiens
KSVNLMNASNDITMENV

SEQ ID NO: 4288 - protein, 14 aa, Homo sapiens
KRPFINLTAGQPTS

SEQ ID NO: 4289 - protein, 13 aa, Homo sapiens
KMNFTGGDTCHKV

SEQ ID NO: 4290 - protein, 12 aa, Homo sapiens
HVYENGSLEIKM

SEQ ID NO: 4291 - protein, 11 aa, Homo sapiens
AALLPQNDTRL

SEQ ID NO: 4292 - protein, 10 aa, Homo sapiens
RLCLNNDTKE

SEQ ID NO: 4293 - protein, 16 aa, Homo sapiens
REACFDPGNIMNGTRV

SEQ ID NO: 4294 - protein, 11 aa, Homo sapiens
RDTFFNLSLKE

SEQ ID NO: 4295 - protein, 15 aa, Homo sapiens
PIPIIVNNFSEFYKE

SEQ ID NO: 4296 - protein, 18 aa, Homo sapiens
KSTQGFLNGSEVSELLRN

SEQ ID NO: 4297 - protein, 14 aa, Homo sapiens
KLQNNSYLWQIPLT

SEQ ID NO: 4298 - protein, 10 aa, Homo sapiens
KHIEVNGSKI

SEQ ID NO: 4299 - protein, 14 aa, Homo sapiens
GFGNVSANTDTEKI

SEQ ID NO: 4300 - protein, 15 aa, Homo sapiens
RYGENNSLSVEGFRK

SEQ ID NO: 4301 - protein, 19 aa, Homo sapiens
RDGTPLSDGQSNHTVSSKE

SEQ ID NO: 4302 - protein, 16 aa, Homo sapiens
KSTGGAPTFNVTVTKT

SEQ ID NO: 4303 - protein, 10 aa, Homo sapiens
RRNATGDYKC

SEQ ID NO: 4304 - protein, 22 aa, Homo sapiens
GSRPAALPSNLSHLLNHSLQRT

SEQ ID NO: 4305 - protein, 19 aa, Homo sapiens
KLVYANECANFTTNVSARF

SEQ ID NO: 4306 - protein, 19 aa, Homo sapiens
SPRTAQGLPGTSNSNSSRS

SEQ ID NO: 4307 - protein, 18 aa, Homo sapiens
RGHINDSQAAPAPLLPVY

SEQ ID NO: 4308 - protein, 12 aa, Homo sapiens
LAPNPTNATTKA

SEQ ID NO: 4309 - protein, 22 aa, Homo sapiens
KCHAGYIGDNCNCSTDISTCRG

SEQ ID NO: 4310 - protein, 24 aa, Homo sapiens
LGDVYQSPCTMAQRPQNFNSSARV

SEQ ID NO: 4311 - protein, 14 aa, Homo sapiens
RTHNLTDLSPHLRY

SEQ ID NO: 4312 - protein, 20 aa, Homo sapiens
RLMVDSMGNTSLVVPENCRG

SEQ ID NO: 4313 - protein, 23 aa, Homo sapiens
RVVGTELVIPCNVSDYDGPSEQN

SEQ ID NO: 4314 - protein, 17 aa, Homo sapiens
RTASGNILAQNLANQTV

SEQ ID NO: 4315 - protein, 18 aa, Homo sapiens
RCLPNPTPEGGAVPGPKQ

SEQ ID NO: 4316 - protein, 19 aa, Homo sapiens
NGMVNAISTGNWSLKRFKM

SEQ ID NO: 4317 - protein, 14 aa, Homo sapiens
KTNSSHYGEFLPIP

SEQ ID NO: 4318 - protein, 15 aa, Homo sapiens
KRNVPQNLSPHSQRP

SEQ ID NO: 4319 - protein, 12 aa, Homo sapiens
KNGTADGPHSPT

SEQ ID NO: 4320 - protein, 10 aa, Homo sapiens
FENYSLCHRC

SEQ ID NO: 4321 - protein, 12 aa, Homo sapiens
RLFNLTSTFSRH

SEQ ID NO: 4322 - protein, 10 aa, Homo sapiens
RGINESYKKN

SEQ ID NO: 4323 - protein, 10 aa, Homo sapiens
LQLNLTYERK

SEQ ID NO: 4324 - protein, 15 aa, Homo sapiens
LMDEAVGNVTAALKS

SEQ ID NO: 4325 - protein, 19 aa, Homo sapiens
IQLEENPWNCTCDLLPLKA

SEQ ID NO: 4326 - protein, 18 aa, Homo sapiens
RVNVLSNNSLYIADAQKE

SEQ ID NO: 4327 - protein, 19 aa, Homo sapiens
RSQNDTVTPDVWYTSKPKE

SEQ ID NO: 4328 - protein, 26 aa, Homo sapiens
RRGQFESVAPSQNFSDSSESDTHPFV

SEQ ID NO: 4329 - protein, 15 aa, Homo sapiens
RMANVAENSSSDQRQ

SEQ ID NO: 4330 - protein, 14 aa, Homo sapiens
RLSDTANYTCVAKN

SEQ ID NO: 4331 - protein, 13 aa, Homo sapiens
RIIIDGANLTISN

SEQ ID NO: 4332 - protein, 10 aa, Homo sapiens
RHYENHSAIM

SEQ ID NO: 4333 - protein, 12 aa, Homo sapiens
LLVNESNSWDKA

SEQ ID NO: 4334 - protein, 11 aa, Homo sapiens
KVWCLGNETRY

SEQ ID NO: 4335 - protein, 13 aa, Homo sapiens
KVLAKPENLSASF

SEQ ID NO: 4336 - protein, 11 aa, Homo sapiens
KSCEYNGTTYQ

SEQ ID NO: 4337 - protein, 17 aa, Homo sapiens
HSGVVQVPMANCSLYRS

SEQ ID NO: 4338 - protein, 19 aa, Homo sapiens
FVMNFSNGEIIDIFKPVRK

SEQ ID NO: 4339 - protein, 11 aa, Homo sapiens
VNNYYNDTEKL

SEQ ID NO: 4340 - protein, 9 aa, Homo sapiens
RRFNTTERV

SEQ ID NO: 4341 - protein, 19 aa, Homo sapiens
RNYEIIQQPMSYDNLTQRL

SEQ ID NO: 4342 - protein, 13 aa, Homo sapiens
RGLELTNTSAYLT

SEQ ID NO: 4343 - protein, 9 aa, Homo sapiens
RANYTILKG

SEQ ID NO: 4344 - protein, 11 aa, Homo sapiens
LLMNQTVMSKN

SEQ ID NO: 4345 - protein, 10 aa, Homo sapiens
LHNSSTEGRS

SEQ ID NO: 4346 - protein, 16 aa, Homo sapiens
LEAAGNASAGTVLLRW

SEQ ID NO: 4347 - protein, 16 aa, Homo sapiens
KYPNCTGGAAGYIDRL

SEQ ID NO: 4348 - protein, 19 aa, Homo sapiens
KTQGPDGVQLENANSSVAT

SEQ ID NO: 4349 - protein, 12 aa, Homo sapiens
KMVLWNDSVVRH

SEQ ID NO: 4350 - protein, 18 aa, Homo sapiens
KIQCTLSNPLFNTTSSII

SEQ ID NO: 4351 - protein, 11 aa, Homo sapiens
KAFYNESWERR

SEQ ID NO: 4352 - protein, 12 aa, Homo sapiens
FTLNFTITNLRY

SEQ ID NO: 4353 - protein, 18 aa, Homo sapiens
FTLNFTITNLQYEEAMRH

SEQ ID NO: 4354 - protein, 13 aa, Homo sapiens
MEPQNTSTVTNFQ

SEQ ID NO: 4355 - protein, 18 aa, Homo sapiens
RLDMSQNVSLVTAELSKD

SEQ ID NO: 4356 - protein, 25 aa, Homo sapiens
KLHVGYLQPLVAVQVSFAPNNTGKE

SEQ ID NO: 4357 - protein, 15 aa, Homo sapiens
RINYTDPFSNQTVKS

SEQ ID NO: 4358 - protein, 13 aa, Homo sapiens
KDVNYTQIVVDRT

SEQ ID NO: 4359 - protein, 10 aa, Homo sapiens
RNATVVWMKD

SEQ ID NO: 4360 - protein, 18 aa, Homo sapiens
KLFIGGLSFETTNESLRS

SEQ ID NO: 4361 - protein, 21 aa, Homo sapiens
KDLYEYSWVQGPLHSNETDRL

SEQ ID NO: 4362 - protein, 22 aa, Homo sapiens
KHHDYYITSTSNGSLEGLENRE

SEQ ID NO: 4363 - protein, 19 aa, Homo sapiens
RYSLNVTYNYPVHYFDGRK

SEQ ID NO: 4364 - protein, 19 aa, Homo sapiens
RGNELSLVLLNASTGELKL

SEQ ID NO: 4365 - protein, 28 aa, Homo sapiens
RDPNSGFVFNLNPLNSSQGYNVSGIGKI

SEQ ID NO: 4366 - protein, 15 aa, Homo sapiens
RAQTLAMNVTNFWKE

SEQ ID NO: 4367 - protein, 12 aa, Homo sapiens
RLAGAGNSTARI

SEQ ID NO: 4368 - protein, 18 aa, Homo sapiens
KVNDSVPFHLGWNSTERS

SEQ ID NO: 4369 - protein, 23 aa, Homo sapiens
FTFNFTITNLHYEENMQHPGSRK

SEQ ID NO: 4370 - protein, 21 aa, Homo sapiens
RSLLEFNTTVSCDQQGTNHRV

SEQ ID NO: 4371 - protein, 11 aa, Homo sapiens
RSMNISIWGFT

SEQ ID NO: 4372 - protein, 10 aa, Homo sapiens
RTYLVNSSDS

SEQ ID NO: 4373 - protein, 15 aa, Homo sapiens
VEAAQNLTVPGGLRS

SEQ ID NO: 4374 - protein, 19 aa, Homo sapiens
QISEHAPEASQPAENISKD

SEQ ID NO: 4375 - protein, 21 aa, Homo sapiens
EANSLASSGPHNLTYPLGPRN

SEQ ID NO: 4376 - protein, 17 aa, Homo sapiens
RLTNGSSSCSGTVEVRL

SEQ ID NO: 4377 - protein, 33 aa, Homo sapiens
RFSIPPSSQEVMPGGSVNLTCVAVGAPMPYVKW

SEQ ID NO: 4378 - protein, 16 aa, Homo sapiens
RDWYEQVNGSDGMFKY

SEQ ID NO: 4379 - protein, 18 aa, Homo sapiens
RLPEMAQPVDPAHNVSRL

SEQ ID NO: 4380 - protein, 15 aa, Homo sapiens
RKLGLTYNTTCCNKD

SEQ ID NO: 4381 - protein, 13 aa, Homo sapiens
LEFQGYNLSANKQ

SEQ ID NO: 4382 - protein, 16 aa, Homo sapiens
RRNQSLVQDMDSMVRL

SEQ ID NO: 4383 - protein, 16 aa, Homo sapiens
RNAQFLDMVANETGLT

SEQ ID NO: 4384 - protein, 13 aa, Homo sapiens
RHFNDSGACVPRC

SEQ ID NO: 4385 - protein, 16 aa, Homo sapiens
KSHTNTSHVMQYGNKT

SEQ ID NO: 4386 - protein, 18 aa, Homo sapiens
FLLENVPCNNASCEEARR

SEQ ID NO: 4387 - protein, 22 aa, Homo sapiens
RILAINSSSLKGKPLSEAIHLL

SEQ ID NO: 4388 - protein, 28 aa, Homo sapiens
MEENEEISSDEEETNVTAQAMQSNNGRG

SEQ ID NO: 4389 - protein, 18 aa, Homo sapiens
RNESTGSLGTQGRLCNKT

SEQ ID NO: 4390 - protein, 11 aa, Homo sapiens
KNATLAEQAKL

SEQ ID NO: 4391 - protein, 20 aa, Homo sapiens
KLVALAVIDEKNTSVEHTRL

SEQ ID NO: 4392 - protein, 14 aa, Homo sapiens
RNESTGSLGTQGRL

SEQ ID NO: 4393 - protein, 19 aa, Homo sapiens
RGHEVEDVDLELFNTSVQL

SEQ ID NO: 4394 - protein, 19 aa, Homo sapiens
KDADACNATNWIEYMFNKD

SEQ ID NO: 4395 - protein, 17 aa, Homo sapiens
TNETGFEISSSDATVKI

SEQ ID NO: 4396 - protein, 13 aa, Homo sapiens
RVEILANDQGNRT

SEQ ID NO: 4397 - protein, 14 aa, Homo sapiens
RQPLMNQISNVSNV

SEQ ID NO: 4398 - protein, 13 aa, Homo sapiens
RMEQMSNMTLMKE

SEQ ID NO: 4399 - protein, 17 aa, Homo sapiens
RKRVLNVTNLEFSDTRM

SEQ ID NO: 4400 - protein, 12 aa, Homo sapiens
RIMGPNYTPGKK

SEQ ID NO: 4401 - protein, 12 aa, Homo sapiens
RHFNTSLVFPRE

SEQ ID NO: 4402 - protein, 9 aa, Homo sapiens
RGADLMNKS

SEQ ID NO: 4403 - protein, 10 aa, Homo sapiens
RENSTSSGPS

SEQ ID NO: 4404 - protein, 10 aa, Homo sapiens
RATNNSSPDS

SEQ ID NO: 4405 - protein, 18 aa, Homo sapiens
QVPPSLPRNSTMMQAVKT

SEQ ID NO: 4406 - protein, 19 aa, Homo sapiens
PPYGPENCSSSNEIILSRV

SEQ ID NO: 4407 - protein, 19 aa, Homo sapiens
NNNSSRFGKFVQLNICQKG

SEQ ID NO: 4408 - protein, 28 aa, Homo sapiens
MRGDMVTEDADPYVQPEDENYENDSVRQ

SEQ ID NO: 4409 - protein, 13 aa, Homo sapiens
MLVNELNHSKEKE

SEQ ID NO: 4410 - protein, 18 aa, Homo sapiens
LYMENDLSEGVNPSVGRS

SEQ ID NO: 4411 - protein, 13 aa, Homo sapiens
LMSCGENITRNKG

SEQ ID NO: 4412 - protein, 14 aa, Homo sapiens
LIKYNTCVNATDKW

SEQ ID NO: 4413 - protein, 11 aa, Homo sapiens
LAGTNSSSLKA

SEQ ID NO: 4414 - protein, 17 aa, Homo sapiens
KNVTGQATLFQASSMKS

SEQ ID NO: 4415 - protein, 15 aa, Homo sapiens
KNTSVPVSAVFMDKP

SEQ ID NO: 4416 - protein, 11 aa, Homo sapiens
KNSTGSSKLTP

SEQ ID NO: 4417 - protein, 11 aa, Homo sapiens
KNSSTMLYSRQ

SEQ ID NO: 4418 - protein, 15 aa, Homo sapiens
KNLTTILNEYVAMKT

SEQ ID NO: 4419 - protein, 15 aa, Homo sapiens
KNLTFDQLALDSPKV

SEQ ID NO: 4420 - protein, 15 aa, Homo sapiens
GYAEFPPSPSNPTKE

SEQ ID NO: 4421 - protein, 20 aa, Homo sapiens
DLQKEDNGIGILTLNNPSRM

SEQ ID NO: 4422 - protein, 9 aa, Homo sapiens
ASYFNNTKC

SEQ ID NO: 4423 - protein, 20 aa, Homo sapiens
AEASVHLSALEVFNLSWNKC

SEQ ID NO: 4424 - protein, 10 aa, Homo sapiens
VAAYNLTWKS

SEQ ID NO: 4425 - protein, 20 aa, Homo sapiens
SSASGIYGNFGQANYSAAKL

SEQ ID NO: 4426 - protein, 15 aa, Homo sapiens
RYLTLNASQITNLRS

SEQ ID NO: 4427 - protein, 17 aa, Homo sapiens
RYLNSLFPSENSTAFYG

SEQ ID NO: 4428 - protein, 11 aa, Homo sapiens
RWNCSTVDNTS

SEQ ID NO: 4429 - protein, 11 aa, Homo sapiens
RVYCNLSAAHT

SEQ ID NO: 4430 - protein, 12 aa, Homo sapiens
RNYSDTPPTSKS

SEQ ID NO: 4431 - protein, 11 aa, Homo sapiens
RLLNINPNKTS

SEQ ID NO: 4432 - protein, 10 aa, Homo sapiens
RKVNASVPRG

SEQ ID NO: 4433 - protein, 13 aa, Homo sapiens
RHLDATNSTAGYS

SEQ ID NO: 4434 - protein, 12 aa, Homo sapiens
REQINITLDHRC

SEQ ID NO: 4435 - protein, 18 aa, Homo sapiens
REDNPDKNPEAPLNVSRV

SEQ ID NO: 4436 - protein, 17 aa, Homo sapiens
QQARGRVINITSVLGRL

SEQ ID NO: 4437 - protein, 21 aa, Homo sapiens
QATDGHDRPLTNCSIINSGKI

SEQ ID NO: 4438 - protein, 15 aa, Homo sapiens
LSGDLEDLELALNKT

SEQ ID NO: 4439 - protein, 19 aa, Homo sapiens
LMSAGANISTWVYSSPGRH

SEQ ID NO: 4440 - protein, 14 aa, Homo sapiens
KYFFNLSSMTCEKF

SEQ ID NO: 4441 - protein, 17 aa, Homo sapiens
KVVVLPTNNSVSGELIL

SEQ ID NO: 4442 - protein, 12 aa, Homo sapiens
KSSGLWNNTVFI

SEQ ID NO: 4443 - protein, 18 aa, Homo sapiens
KLTCECEHNTTGPDCGKC

SEQ ID NO: 4444 - protein, 19 aa, Homo sapiens
KGANVSWEPGFDGGYLQRF

SEQ ID NO: 4445 - protein, 12 aa, Homo sapiens
KELIMIAGGNQS

SEQ ID NO: 4446 - protein, 15 aa, Homo sapiens
KAGHFQNTSSPSARC

SEQ ID NO: 4447 - protein, 13 aa, Homo sapiens
AMVVPNATLLEKL

SEQ ID NO: 4448 - protein, 16 aa, Homo sapiens
YNLTADPDQITNIAKT

SEQ ID NO: 4449 - protein, 16 aa, Homo sapiens
RDVFGWGNLTCPICKG

SEQ ID NO: 4450 - protein, 18 aa, Homo sapiens
KFFVVNTDSLSSVTNATS

SEQ ID NO: 4451 - protein, 14 aa, Homo sapiens
VIFSDWYNTSVMRK

SEQ ID NO: 4452 - protein, 32 aa, Homo sapiens
SGSLNWTMGLPTDNGHDSDQVFEFNGTQAVRI

SEQ ID NO: 4453 - protein, 26 aa, Homo sapiens
RVLLQNLTMSYSGLYQCTAGNEAGKE

SEQ ID NO: 4454 - protein, 16 aa, Homo sapiens
RTCSDAAYNHTTFPNL

SEQ ID NO: 4455 - protein, 13 aa, Homo sapiens
RSVYNCSGEACRG

SEQ ID NO: 4456 - protein, 16 aa, Homo sapiens
RLEVDAQSNHTVGPLL

SEQ ID NO: 4457 - protein, 13 aa, Homo sapiens
RKINSSLQLPDRV

SEQ ID NO: 4458 - protein, 10 aa, Homo sapiens
RIHVENQTRA

SEQ ID NO: 4459 - protein, 25 aa, Homo sapiens
RGEDGPAGNGTEGFPGFPGYPGNRG

SEQ ID NO: 4460 - protein, 17 aa, Homo sapiens
RFTNDLLNSSSAIYSKY

SEQ ID NO: 4461 - protein, 20 aa, Homo sapiens
RCGNLSTCMLGTYTQDFNKF

SEQ ID NO: 4462 - protein, 18 aa, Homo sapiens
MDVDECERHPCGNGTCKN

SEQ ID NO: 4463 - protein, 13 aa, Homo sapiens
KYQTLNCSVNVNC

SEQ ID NO: 4464 - protein, 13 aa, Homo sapiens
KWGHNITEFQQRF

SEQ ID NO: 4465 - protein, 12 aa, Homo sapiens
KVLQCLNISVLS

SEQ ID NO: 4466 - protein, 23 aa, Homo sapiens
KVCDGILDCPGREDENNTSTGKY

SEQ ID NO: 4467 - protein, 15 aa, Homo sapiens
KTFNLNTTEVEPCRR

SEQ ID NO: 4468 - protein, 16 aa, Homo sapiens
KSSEVYNWTVDEVVQW

SEQ ID NO: 4469 - protein, 15 aa, Homo sapiens
KSEGAIQVNFTLVRS

SEQ ID NO: 4470 - protein, 15 aa, Homo sapiens
KLGAINSTLSNQSKE

SEQ ID NO: 4471 - protein, 11 aa, Homo sapiens
KLDRENSTERV

SEQ ID NO: 4472 - protein, 12 aa, Homo sapiens
KILFQFNTSYLM

SEQ ID NO: 4473 - protein, 13 aa, Homo sapiens
KGTNFTHLVADRV

SEQ ID NO: 4474 - protein, 18 aa, Homo sapiens
KGSCQNSCEKGNTTTLIS

SEQ ID NO: 4475 - protein, 20 aa, Homo sapiens
KGDKGPPGPVGANGSPGERG

SEQ ID NO: 4476 - protein, 10 aa, Homo sapiens
KFLSYNVTRR

SEQ ID NO: 4477 - protein, 18 aa, Homo sapiens
KDLSQEFEAYINASGEHG

SEQ ID NO: 4478 - protein, 12 aa, Homo sapiens
KDLQNVNLTLRI

SEQ ID NO: 4479 - protein, 22 aa, Homo sapiens
KDKLFTAIGYSESTHNLTLPKQ

SEQ ID NO: 4480 - protein, 17 aa, Homo sapiens
KCLSEGQPPPSYNWTRL

SEQ ID NO: 4481 - protein, 18 aa, Homo sapiens
KCGLSQSQGNLSHVDWFS

SEQ ID NO: 4482 - protein, 15 aa, Homo sapiens
KAAVPGNTSTPSCQS

SEQ ID NO: 4483 - protein, 11 aa, Homo sapiens
HIYNQNVSQKD

SEQ ID NO: 4484 - protein, 13 aa, Homo sapiens
FVIGGNFTGSQRA

SEQ ID NO: 4485 - protein, 16 aa, Homo sapiens
YGRRVNYTMDVFELKS

SEQ ID NO: 4486 - protein, 14 aa, Homo sapiens
VREETVNLTTDSRT

SEQ ID NO: 4487 - protein, 15 aa, Homo sapiens
VMQALNMSAALTARK

SEQ ID NO: 4488 - protein, 18 aa, Homo sapiens
TLTFLAVMLIVLNSTLKS

SEQ ID NO: 4489 - protein, 14 aa, Homo sapiens
TLQPNQNMTSEERQ

SEQ ID NO: 4490 - protein, 18 aa, Homo sapiens
RYNQETPMEICLNGTPAL

SEQ ID NO: 4491 - protein, 19 aa, Homo sapiens
RVDNITDQFCNASVVDPAC

SEQ ID NO: 4492 - protein, 11 aa, Homo sapiens
RTFLNTTVEKH

SEQ ID NO: 4493 - protein, 13 aa, Homo sapiens
RSFDCCGLFNLTT

SEQ ID NO: 4494 - protein, 10 aa, Homo sapiens
RSAMYHSNMT

SEQ ID NO: 4495 - protein, 11 aa, Homo sapiens
RLANDTLIYFT

SEQ ID NO: 4496 - protein, 18 aa, Homo sapiens
RIFTFMNDSSNVAMLQRL

SEQ ID NO: 4497 - protein, 13 aa, Homo sapiens
RGNASGLGAGPRP

SEQ ID NO: 4498 - protein, 18 aa, Homo sapiens
RDSLFINGYAPQNLSIRG

SEQ ID NO: 4499 - protein, 13 aa, Homo sapiens
PLVNHSSGMLVKC

SEQ ID NO: 4500 - protein, 15 aa, Homo sapiens
NCLGSGVLNVSICKN

SEQ ID NO: 4501 - protein, 14 aa, Homo sapiens
MAGVAAPPGNGTRG

SEQ ID NO: 4502 - protein, 13 aa, Homo sapiens
LSNLEETLNLSKY

SEQ ID NO: 4503 - protein, 15 aa, Homo sapiens
LGITESSNMTIITRT

SEQ ID NO: 4504 - protein, 18 aa, Homo sapiens
LECPIPDAPVVTNVTVKA

SEQ ID NO: 4505 - protein, 11 aa, Homo sapiens
LDGNGTTFNRT

SEQ ID NO: 4506 - protein, 12 aa, Homo sapiens
KTTNSSAADPRE

SEQ ID NO: 4507 - protein, 15 aa, Homo sapiens
KTLSNSSQSELENRL

SEQ ID NO: 4508 - protein, 13 aa, Homo sapiens
KMCPQNTSIPIRG

SEQ ID NO: 4509 - protein, 16 aa, Homo sapiens
KLSQGNTTLSINPVKR

SEQ ID NO: 4510 - protein, 13 aa, Homo sapiens
KLFNTSVEVLPFD

SEQ ID NO: 4511 - protein, 16 aa, Homo sapiens
KLFIYNPTTGEFLGRT

SEQ ID NO: 4512 - protein, 21 aa, Homo sapiens
KHLNASNPTEPATIIFTAARE

SEQ ID NO: 4513 - protein, 17 aa, Homo sapiens
KCNMINGTDGDSFHPLI

SEQ ID NO: 4514 - protein, 13 aa, Homo sapiens
KANNSWFQSILRQ

SEQ ID NO: 4515 - protein, 12 aa, Homo sapiens
KAAENFTLLVKN

SEQ ID NO: 4516 - protein, 19 aa, Homo sapiens
INYPQTYPNSTVCEWEIRV

SEQ ID NO: 4517 - protein, 11 aa, Homo sapiens
IEYIVLTMNRT

SEQ ID NO: 4518 - protein, 14 aa, Homo sapiens
GQPAHPPLNLSAKT

SEQ ID NO: 4519 - protein, 17 aa, Homo sapiens
DSSNELISDQNHSYPRK

SEQ ID NO: 4520 - protein, 17 aa, Homo sapiens
ALLVYNATNNTNLEGKI

SEQ ID NO: 4521 - protein, 15 aa, Homo sapiens
AAHNASVDMCELKRD

SEQ ID NO: 4522 - protein, 16 aa, Homo sapiens
MDGVNDSSLQGFVLMS

SEQ ID NO: 4523 - protein, 25 aa, Homo sapiens
KSAPPSQVWNMTVSMTSDNSMHVKC

SEQ ID NO: 4524 - protein, 21 aa, Homo sapiens
RTPASDPHGDNLTYSVFYTKE

SEQ ID NO: 4525 - protein, 20 aa, Homo sapiens
RYKPDTLAVAVENGTGTDRQ

SEQ ID NO: 4526 - protein, 13 aa, Homo sapiens
KDNITAHNISWRN

SEQ ID NO: 4527 - protein, 14 aa, Homo sapiens
KYDREPAEFNLTKK

SEQ ID NO: 4528 - protein, 17 aa, Homo sapiens
KDGHGTAISNASDVWKK

SEQ ID NO: 4529 - protein, 17 aa, Homo sapiens
RLNFTQSYSLQLSNLKM

SEQ ID NO: 4530 - protein, 14 aa, Homo sapiens
RLWNSTFLEEYSKL

SEQ ID NO: 4531 - protein, 16 aa, Homo sapiens
KEINSLNLTESHNSRK

SEQ ID NO: 4532 - protein, 22 aa, Homo sapiens
RSNSSGADGGDTPPLPSPPDKG

SEQ ID NO: 4533 - protein, 24 aa, Homo sapiens
RIGPGEPLELLCNVSGALPPAGRH

SEQ ID NO: 4534 - protein, 31 aa, Homo sapiens
RLTGSDVNLLAENLLSPEDMVLFHNLTQPRG

SEQ ID NO: 4535 - protein, 13 aa, Homo sapiens
RANHSGAVVLLKR

SEQ ID NO: 4536 - protein, 8 aa, Homo sapiens
RDYYLNKT

SEQ ID NO: 4537 - protein, 32 aa, Homo sapiens
KSINGLINKVNISNISIIIQELLQENIVRGRG

SEQ ID NO: 4538 - protein, 15 aa, Homo sapiens
KVVNSTTGTGEHLRN

SEQ ID NO: 4539 - protein, 14 aa, Homo sapiens
LSGCEISISNETKD

SEQ ID NO: 4540 - protein, 17 aa, Homo sapiens
KHNLMTVEQNNGSSQKK

SEQ ID NO: 4541 - protein, 20 aa, Homo sapiens
RSNFSCASTSGVSGASASAS

SEQ ID NO: 4542 - protein, 19 aa, Homo sapiens
RAAAAAAAAAKNGSSGKKS

SEQ ID NO: 4543 - protein, 12 aa, Homo sapiens
KLIMNQTSQKKD

SEQ ID NO: 4544 - protein, 12 aa, Homo sapiens
RILNWSSWSEAI

SEQ ID NO: 4545 - protein, 19 aa, Homo sapiens
RVSKDGNGALPLNLTCTVS

SEQ ID NO: 4546 - protein, 16 aa, Homo sapiens
MENSSAWVVEIQMLKC

SEQ ID NO: 4547 - protein, 14 aa, Homo sapiens
AIVDMVNNSTIHRG

SEQ ID NO: 4548 - protein, 15 aa, Homo sapiens
KGNETIVNLIHSTRI

SEQ ID NO: 4549 - protein, 21 aa, Homo sapiens
RHLNSTDDADRIPFQEDWMKM

SEQ ID NO: 4550 - protein, 40 aa, Homo sapiens
KAGYFNFTSATITYLAQEDGPVVIGSTSAPGQGGILAQRE

SEQ ID NO: 4551 - protein, 8 aa, Homo sapiens
RYNLTSQD

SEQ ID NO: 4552 - protein, 24 aa, Homo sapiens
RKRYNLTSQDVGSGTSNNSQACAQ

SEQ ID NO: 4553 - protein, 12 aa, Homo sapiens
RRNQSLSLLYKV

SEQ ID NO: 4554 - protein, 14 aa, Homo sapiens
RFNPNISWQPIPVH

SEQ ID NO: 4555 - protein, 12 aa, Homo sapiens
KSYAGFLTVNKT

SEQ ID NO: 4556 - protein, 23 aa, Homo sapiens
INVLDENDNAPYITAPSNTSHKL

SEQ ID NO: 4557 - protein, 15 aa, Homo sapiens
RGETASLLCNISVRG

SEQ ID NO: 4558 - protein, 9 aa, Homo sapiens
RFFNFSWRV

SEQ ID NO: 4559 - protein, 15 aa, Homo sapiens
LSIIGYNTTSTVPKE

SEQ ID NO: 4560 - protein, 19 aa, Homo sapiens
RGMGPCNLSSAAGPTAEKS

SEQ ID NO: 4561 - protein, 17 aa, Homo sapiens
KIWNSSLQTNKEPVGIL

SEQ ID NO: 4562 - protein, 27 aa, Homo sapiens
ITLNSEEDYPNGTWLGDENNPEMRVRC

SEQ ID NO: 4563 - protein, 18 aa, Homo sapiens
ENSSSTNLCVEDLQKNKD

SEQ ID NO: 4564 - protein, 17 aa, Homo sapiens
VINRPNGTDVYQGVPKD

SEQ ID NO: 4565 - protein, 12 aa, Homo sapiens
RTIFNCTLFDMG

SEQ ID NO: 4566 - protein, 10 aa, Homo sapiens
RGYNVTYWRE

SEQ ID NO: 4567 - protein, 16 aa, Homo sapiens
ASNIYGTVNNTVTLRV

SEQ ID NO: 4568 - protein, 17 aa, Homo sapiens
KCYVIPLNTSIVMPPRN

SEQ ID NO: 4569 - protein, 28 aa, Homo sapiens
RGGGFGGNDNFGRGGNFSGRGGFGGSRG

SEQ ID NO: 4570 - protein, 20 aa, Homo sapiens
KWTPNQLMNGSVGDLDYEKS

SEQ ID NO: 4571 - protein, 36 aa, Homo sapiens
KKNGNVSCYNCGVSGHYAQDCKQSSMEANQQGTYRL

SEQ ID NO: 4572 - protein, 32 aa, Homo sapiens
RLAQGSAMPILPANLSVETNAVGQDVSVLFRV

SEQ ID NO: 4573 - protein, 19 aa, Homo sapiens
YSLNVTYGGHQVPGSPFKV

SEQ ID NO: 4574 - protein, 13 aa, Homo sapiens
VNGSLFSETAEKS

SEQ ID NO: 4575 - protein, 25 aa, Homo sapiens
TLKNLKNGSVKKGQPVDPASVLLKH

SEQ ID NO: 4576 - protein, 12 aa, Homo sapiens
SHPQGNYSNSKL

SEQ ID NO: 4577 - protein, 15 aa, Homo sapiens
RVNEQNNDNETALHC

SEQ ID NO: 4578 - protein, 15 aa, Homo sapiens
RVGENLSAGQGGLQI

SEQ ID NO: 4579 - protein, 18 aa, Homo sapiens
RSTGYCSVTGNLSGCKGS

SEQ ID NO: 4580 - protein, 28 aa, Homo sapiens
RNNRNQSIIVSGESGAGKTVSARYAMRY

SEQ ID NO: 4581 - protein, 20 aa, Homo sapiens
RNSSHAGAFVIVTEEAIAKG

SEQ ID NO: 4582 - protein, 13 aa, Homo sapiens
  VARIANT 9: Xaa = Any Amino Acid
RNFSVWLGXSVCS

SEQ ID NO: 4583 - protein, 11 aa, Homo sapiens
RNASIWLGCGH

SEQ ID NO: 4584 - protein, 14 aa, Homo sapiens
REVDPLIYNMSHED

SEQ ID NO: 4585 - protein, 11 aa, Homo sapiens
PANVSASKGRL

SEQ ID NO: 4586 - protein, 14 aa, Homo sapiens
NYNSSMLSLSPERT

SEQ ID NO: 4587 - protein, 17 aa, Homo sapiens
MQEYEEQLKENASEGKG

SEQ ID NO: 4588 - protein, 26 aa, Homo sapiens
MPKGATCFECNITFNNLDNYLVHKKH

SEQ ID NO: 4589 - protein, 36 aa, Homo sapiens
MEFPCSTDECIPSLLLCDGVPDCHFNEDELICSNKS

SEQ ID NO: 4590 - protein, 14 aa, Homo sapiens
LQLETINVTMAGKE

SEQ ID NO: 4591 - protein, 22 aa, Homo sapiens
LLDVVDKNESAVIVAPTSSGKT

SEQ ID NO: 4592 - protein, 10 aa, Homo sapiens
LKNVSDGDKW

SEQ ID NO: 4593 - protein, 12 aa, Homo sapiens
LENSTMTAAIKD

SEQ ID NO: 4594 - protein, 19 aa, Homo sapiens
KYPNPMNPSVVGVDVLDRH

SEQ ID NO: 4595 - protein, 27 aa, Homo sapiens
KYLALEKNDSQNLPIYPSEDDIEKSII

SEQ ID NO: 4596 - protein, 10 aa, Homo sapiens
KVTDDTNVTR

SEQ ID NO: 4597 - protein, 13 aa, Homo sapiens
KVNNGSNVENDIQ

SEQ ID NO: 4598 - protein, 13 aa, Homo sapiens
KVMNMEESNNGSL

SEQ ID NO: 4599 - protein, 15 aa, Homo sapiens
KVLEVQVVNQTSVHV

SEQ ID NO: 4600 - protein, 21 aa, Homo sapiens
KVEKPSPSTTNPHMNQSSNYL

SEQ ID NO: 4601 - protein, 11 aa, Homo sapiens
KVANCSLGTAT

SEQ ID NO: 4602 - protein, 9 aa, Homo sapiens
KQNTSCSKN

SEQ ID NO: 4603 - protein, 14 aa, Homo sapiens
KNKVLSNNASSQKP

SEQ ID NO: 4604 - protein, 22 aa, Homo sapiens
KNKGTSDSSSGNVSEGESPPDS

SEQ ID NO: 4605 - protein, 21 aa, Homo sapiens
KNNTMVYNGMNMEAIHVLLNF

SEQ ID NO: 4606 - protein, 19 aa, Homo sapiens
KNKSGSLEFSIAGQPNDFF

SEQ ID NO: 4607 - protein, 15 aa, Homo sapiens
KMNFSTLRNIQGLFA

SEQ ID NO: 4608 - protein, 27 aa, Homo sapiens
KLTFFNSTLNTSGLVPEGDALPIPGAH

SEQ ID NO: 4609 - protein, 20 aa, Homo sapiens
KLKLTHSENSSLYMALNTLQ

SEQ ID NO: 4610 - protein, 13 aa, Homo sapiens
KKRNLDTGGNKSV

SEQ ID NO: 4611 - protein, 8 aa, Homo sapiens
KKRNRTKA

SEQ ID NO: 4612 - protein, 18 aa, Homo sapiens
KKQAQANGVSHNITFESP

SEQ ID NO: 4613 - protein, 15 aa, Homo sapiens
KKNVTEMAMNPHIKQ

SEQ ID NO: 4614 - protein, 17 aa, Homo sapiens
KHIYNAYLKNFNMTKKK

SEQ ID NO: 4615 - protein, 17 aa, Homo sapiens
KFSNEQGLPGSNASLYL

SEQ ID NO: 4616 - protein, 10 aa, Homo sapiens
KENRSLETKY

SEQ ID NO: 4617 - protein, 17 aa, Homo sapiens
KAQSNGSGNGSDSEMDT

SEQ ID NO: 4618 - protein, 9 aa, Homo sapiens
KANTTDFGL

SEQ ID NO: 4619 - protein, 12 aa, Homo sapiens
KANTSSSSSNSS

SEQ ID NO: 4620 - protein, 13 aa, Homo sapiens
KANNSQEPSPQLA

SEQ ID NO: 4621 - protein, 11 aa, Homo sapiens
KANKTVDDTKL

SEQ ID NO: 4622 - protein, 9 aa, Homo sapiens
KAINFSWRT

SEQ ID NO: 4623 - protein, 10 aa, Homo sapiens
KAANRTPPKS

SEQ ID NO: 4624 - protein, 16 aa, Homo sapiens
ISGNGECSNSSGTGKT

SEQ ID NO: 4625 - protein, 20 aa, Homo sapiens
IKSNSSGSTGGGDMQPSLRG

SEQ ID NO: 4626 - protein, 18 aa, Homo sapiens
ICSKTTHCVLAFNASDKI

SEQ ID NO: 4627 - protein, 9 aa, Homo sapiens
HKNVSSPFI

SEQ ID NO: 4628 - protein, 18 aa, Homo sapiens
GYNQEDSVIMNRSAVDRG

SEQ ID NO: 4629 - protein, 17 aa, Homo sapiens
GNYSFGTQTILNSMHKY

SEQ ID NO: 4630 - protein, 19 aa, Homo sapiens
GNLSTYFDMNLFLDIILKT

SEQ ID NO: 4631 - protein, 12 aa, Homo sapiens
GGLANDSEDPKN

SEQ ID NO: 4632 - protein, 13 aa, Homo sapiens
EEALIKNNNTCKD

SEQ ID NO: 4633 - protein, 13 aa, Homo sapiens
DAGNDSASTAPRS

SEQ ID NO: 4634 - protein, 35 aa, Homo sapiens
CLCCGCEVREHLSHGNLTVLYGGLLEHLASPEHKK

SEQ ID NO: 4635 - protein, 12 aa, Homo sapiens
SNYSVSLVGPAP

SEQ ID NO: 4636 - protein, 15 aa, Homo sapiens
MGNGTEEDYNFVFKV

SEQ ID NO: 4637 - protein, 33 aa, Homo sapiens
MDAGVTESGLNVTLTIRLLMHGKEVGSIIGKKG

SEQ ID NO: 4638 - protein, 17 aa, Homo sapiens
TAPPLINGTAEVYIPRN

SEQ ID NO: 4639 - protein, 20 aa, Homo sapiens
SSCSLGCNLSQTHSLNNRRT

SEQ ID NO: 4640 - protein, 13 aa, Homo sapiens
SAFNTSVHAAIRH

SEQ ID NO: 4641 - protein, 18 aa, Homo sapiens
RKLWADTTCGQNATELYC

SEQ ID NO: 4642 - protein, 13 aa, Homo sapiens
RIETILLNGTDRK

SEQ ID NO: 4643 - protein, 13 aa, Homo sapiens
RHNFTASLLTLRI

SEQ ID NO: 4644 - protein, 12 aa, Homo sapiens
MAPQNVSASKKR

SEQ ID NO: 4645 - protein, 21 aa, Homo sapiens
LDDLGTVYGNIHQQLNETMRR

SEQ ID NO: 4646 - protein, 11 aa, Homo sapiens
KQADNDTIDYS

SEQ ID NO: 4647 - protein, 20 aa, Homo sapiens
KGNATHDNICSGNSESTQKC

SEQ ID NO: 4648 - protein, 15 aa, Homo sapiens
KEPEIGNLNVSDITP

SEQ ID NO: 4649 - protein, 25 aa, Homo sapiens
MVDFPGYNLSGAVASFLFILLTMKQ

SEQ ID NO: 4650 - protein, 17 aa, Homo sapiens
LTDVLANVSLDFLDYKS

SEQ ID NO: 4651 - protein, 18 aa, Homo sapiens
KARGRVVNVSSVMGRVSL

SEQ ID NO: 4652 - protein, 13 aa, Homo sapiens
RYNHTGQVIIYRM

SEQ ID NO: 4653 - protein, 20 aa, Homo sapiens
RYKEGDLTLYAINLHNVTKY

SEQ ID NO: 4654 - protein, 18 aa, Homo sapiens
RVIDLWDLAQSANLTDKE

SEQ ID NO: 4655 - protein, 14 aa, Homo sapiens
RVENTSHPGEMQVT

SEQ ID NO: 4656 - protein, 14 aa, Homo sapiens
RRGDLNINMTSPMG

SEQ ID NO: 4657 - protein, 15 aa, Homo sapiens
RNISTATAAQTDLNF

SEQ ID NO: 4658 - protein, 15 aa, Homo sapiens
RLTIVNSSVLDRPRA

SEQ ID NO: 4659 - protein, 9 aa, Homo sapiens
RLNSSTIKY

SEQ ID NO: 4660 - protein, 10 aa, Homo sapiens
RINYSCTTGF

SEQ ID NO: 4661 - protein, 13 aa, Homo sapiens
RGRPNITHAVPKA

SEQ ID NO: 4662 - protein, 17 aa, Homo sapiens
RFQVNNTRPPHVQLLRK

SEQ ID NO: 4663 - protein, 21 aa, Homo sapiens
RFLVTAPGIIRPGGNVTIGVE

SEQ ID NO: 4664 - protein, 10 aa, Homo sapiens
RENNNITMRV

SEQ ID NO: 4665 - protein, 13 aa, Homo sapiens
RAVYQCNTSNEHG

SEQ ID NO: 4666 - protein, 14 aa, Homo sapiens
RAPNGTGPLCSGKG

SEQ ID NO: 4667 - protein, 14 aa, Homo sapiens
PNTFNVTVLHGSKI

SEQ ID NO: 4668 - protein, 16 aa, Homo sapiens
PLGPLQVYCNITEDKI

SEQ ID NO: 4669 - protein, 18 aa, Homo sapiens
LNLEANVTADGALAMEKG

SEQ ID NO: 4670 - protein, 12 aa, Homo sapiens
KYQHNESHSRVR

SEQ ID NO: 4671 - protein, 22 aa, Homo sapiens
KTVTTSGTTNNTVTPTSQPVRK

SEQ ID NO: 4672 - protein, 14 aa, Homo sapiens
KTCTEFHNCTECRD

SEQ ID NO: 4673 - protein, 17 aa, Homo sapiens
KTCDWLPKPNMSASCKE

SEQ ID NO: 4674 - protein, 15 aa, Homo sapiens
KRLNLTHCQDINECL

SEQ ID NO: 4675 - protein, 15 aa, Homo sapiens
KNLSLTFPTSGGSRC

SEQ ID NO: 4676 - protein, 11 aa, Homo sapiens
KLTGGGGNVTL

SEQ ID NO: 4677 - protein, 21 aa, Homo sapiens
KIYEDEVPFGTNCNLTITSRF

SEQ ID NO: 4678 - protein, 17 aa, Homo sapiens
KIVYNITLPLHPNQGII

SEQ ID NO: 4679 - protein, 11 aa, Homo sapiens
KFNLSHLGSKE

SEQ ID NO: 4680 - protein, 17 aa, Homo sapiens
KFFQINGSTGEMSTVQE

SEQ ID NO: 4681 - protein, 10 aa, Homo sapiens
KDAVNCTYKN

SEQ ID NO: 4682 - protein, 16 aa, Homo sapiens
ISYVPQLSNDTLAGRL

SEQ ID NO: 4683 - protein, 13 aa, Homo sapiens
HQLYTDAVNNTRV

SEQ ID NO: 4684 - protein, 12 aa, Homo sapiens
HMQSCNFSAEKA

SEQ ID NO: 4685 - protein, 12 aa, Homo sapiens
WYDCTWNNDTKT

SEQ ID NO: 4686 - protein, 15 aa, Homo sapiens
WVSINNMVNNSWGKQ

SEQ ID NO: 4687 - protein, 16 aa, Homo sapiens
VTYEIETNGTFGIQKV

SEQ ID NO: 4688 - protein, 13 aa, Homo sapiens
VAAVGNQTSDFKN

SEQ ID NO: 4689 - protein, 10 aa, Homo sapiens
RYNKTVTYQC

SEQ ID NO: 4690 - protein, 18 aa, Homo sapiens
RVLQGLLMPLFKNTSVSS

SEQ ID NO: 4691 - protein, 10 aa, Homo sapiens
RVDFHNFSKT

SEQ ID NO: 4692 - protein, 23 aa, Homo sapiens
RRPAGGNSSGQSDNCSSSSEANG

SEQ ID NO: 4693 - protein, 17 aa, Homo sapiens
RRNITLAYTLEADRDRR

SEQ ID NO: 4694 - protein, 12 aa, Homo sapiens
RRNESHLIDFRE

SEQ ID NO: 4695 - protein, 24 aa, Homo sapiens
RQNGQLVRNDSLVTPSPQQARVCP

SEQ ID NO: 4696 - protein, 9 aa, Homo sapiens
RNNTNNWRE

SEQ ID NO: 4697 - protein, 9 aa, Homo sapiens
RNNSDCPRV

SEQ ID NO: 4698 - protein, 10 aa, Homo sapiens
RNITAVAGRD

SEQ ID NO: 4699 - protein, 18 aa, Homo sapiens
RNGTEAFDSWEKPPLPVY

SEQ ID NO: 4700 - protein, 21 aa, Homo sapiens
RNGSNDASLDSGVDMNEPKSA

SEQ ID NO: 4701 - protein, 21 aa, Homo sapiens
RLSHNCISQAVNGSQFLPLTG

SEQ ID NO: 4702 - protein, 22 aa, Homo sapiens
RLQNETAANEVLESIQSYFKSQ

SEQ ID NO: 4703 - protein, 15 aa, Homo sapiens
RKVEAEALNATAIRV

SEQ ID NO: 4704 - protein, 19 aa, Homo sapiens
RINLTVPQGCLLAVVGPVG

SEQ ID NO: 4705 - protein, 18 aa, Homo sapiens
RIGEPANVTAIVSLYGED

SEQ ID NO: 4706 - protein, 19 aa, Homo sapiens
RGEPSNEPSTETNKTQEQS

SEQ ID NO: 4707 - protein, 11 aa, Homo sapiens
RENNSPALPIG

SEQ ID NO: 4708 - protein, 21 aa, Homo sapiens
REARAEYNITLTVTDMGTPRL

SEQ ID NO: 4709 - protein, 18 aa, Homo sapiens
RAIPFGTMVSCLNLTFKL

SEQ ID NO: 4710 - protein, 13 aa, Homo sapiens
QMAALQGNGSERT

SEQ ID NO: 4711 - protein, 14 aa, Homo sapiens
QDFVDSFYNLTLKL

SEQ ID NO: 4712 - protein, 19 aa, Homo sapiens
PSRMATQASTLYSNNITKL

SEQ ID NO: 4713 - protein, 14 aa, Homo sapiens
NVYFNCSGASYSRE

SEQ ID NO: 4714 - protein, 13 aa, Homo sapiens
MELNSSSGGEGKT

SEQ ID NO: 4715 - protein, 17 aa, Homo sapiens
LSLVGCYNLSFIPEGKR

SEQ ID NO: 4716 - protein, 18 aa, Homo sapiens
LFMIILSGNLSIIILIRI

SEQ ID NO: 4717 - protein, 15 aa, Homo sapiens
LENATGQDCTSQPRL

SEQ ID NO: 4718 - protein, 16 aa, Homo sapiens
KWPADKENDTGIVGQH

SEQ ID NO: 4719 - protein, 22 aa, Homo sapiens
KVGIRKLINNGSYIAAFPPHEG

SEQ ID NO: 4720 - protein, 9 aa, Homo sapiens
KTLNASFHW

SEQ ID NO: 4721 - protein, 16 aa, Homo sapiens
KTAGVNTTDKEMEVLH

SEQ ID NO: 4722 - protein, 20 aa, Homo sapiens
KQSLTHGSSGYINSTGSTRG

SEQ ID NO: 4723 - protein, 12 aa, Homo sapiens
KNILVKKNGTCC

SEQ ID NO: 4724 - protein, 16 aa, Homo sapiens
KLNASDPDEGSNGELR

SEQ ID NO: 4725 - protein, 23 aa, Homo sapiens
KLGGFTQENNTIDSGELDIGRRA

SEQ ID NO: 4726 - protein, 14 aa, Homo sapiens
KKSIAHNMTTPNKL

SEQ ID NO: 4727 - protein, 19 aa, Homo sapiens
KIMALFSANSIGAMNNSDT

SEQ ID NO: 4728 - protein, 15 aa, Homo sapiens
KGLSFNSSANEMHVS

SEQ ID NO: 4729 - protein, 33 aa, Homo sapiens
KDDDSLLHPGNLTSTSDDASRLEAGGETVPERN

SEQ ID NO: 4730 - protein, 12 aa, Homo sapiens
KAFVEIINSTHA

SEQ ID NO: 4731 - protein, 21 aa, Homo sapiens
FTVGDNRTYQGFWNPPLAPRK

SEQ ID NO: 4732 - protein, 18 aa, Homo sapiens
FTLNFTITNLQYGEDMRH

SEQ ID NO: 4733 - protein, 12 aa, Homo sapiens
FTLNFTITNLKY

SEQ ID NO: 4734 - protein, 23 aa, Homo sapiens
FTLNFTITNLHYEENMQHPGSRK

SEQ ID NO: 4735 - protein, 30 aa, Homo sapiens
APWEAAGNRSNSSGADGGDTPPLPSPPDKG

SEQ ID NO: 4736 - protein, 13 aa, Homo sapiens
ANSGSNSSGATRA

SEQ ID NO: 4737 - protein, 32 aa, Homo sapiens
RVLHGNYTWPPEFLGPGEDPNGTLIIQNVNKS

SEQ ID NO: 4738 - protein, 14 aa, Homo sapiens
KYANITVDYLYNKE

SEQ ID NO: 4739 - protein, 21 aa, Homo sapiens
RVELAPLPPWQPVGQNFTLRC

SEQ ID NO: 4740 - protein, 24 aa, Homo sapiens
KELVASGMGWAAFNLSNVTGNSRI

SEQ ID NO: 4741 - protein, 20 aa, Homo sapiens
RMEESQNESLATLTIQGIRF

SEQ ID NO: 4742 - protein, 17 aa, Homo sapiens
KVVTQNSSSGNVTHEKI

SEQ ID NO: 4743 - protein, 21 aa, Homo sapiens
RVPCSCYNLSATNDSTILDKV

SEQ ID NO: 4744 - protein, 14 aa, Homo sapiens
KYVINGTYANETKL

SEQ ID NO: 4745 - protein, 17 aa, Homo sapiens
KQESMNSNVSVYQPPRQ

SEQ ID NO: 4746 - protein, 10 aa, Homo sapiens
FYNETYYGRT

SEQ ID NO: 4747 - protein, 25 aa, Homo sapiens
RVDDEMPQHAVLSGPNLFINNLNKT

SEQ ID NO: 4748 - protein, 21 aa, Homo sapiens
RTRPVVIVDASLSHPESVNRT

SEQ ID NO: 4749 - protein, 25 aa, Homo sapiens
RDATGNVNDTIVTELTNCTSAACKL

SEQ ID NO: 4750 - protein, 20 aa, Homo sapiens
KELQNSVLETTLMPHNYSRC

SEQ ID NO: 4751 - protein, 20 aa, Homo sapiens
RYHLEVEAGNTLVRNESHKN

SEQ ID NO: 4752 - protein, 15 aa, Homo sapiens
RAANYTSSLNLPDKT

SEQ ID NO: 4753 - protein, 18 aa, Homo sapiens
RIDFSGSQDNLTITMHRL

SEQ ID NO: 4754 - protein, 19 aa, Homo sapiens
KGNLTYGYVTILNGSDIRS

SEQ ID NO: 4755 - protein, 15 aa, Homo sapiens
KETNFSLASGLEAKD

SEQ ID NO: 4756 - protein, 21 aa, Homo sapiens
KEGKPFYQMTSNATQAFWTKQ

SEQ ID NO: 4757 - protein, 31 aa, Homo sapiens
KISWTCINTTLTCEVMNGTDPELNLYQDGKH

SEQ ID NO: 4758 - protein, 23 aa, Homo sapiens
KADANPPATEYHWTTLNGSLPKG

SEQ ID NO: 4759 - protein, 14 aa, Homo sapiens
KFLSNDTVQLNVKH

SEQ ID NO: 4760 - protein, 29 aa, Homo sapiens
RVEPQNPVLSAGGSLFVNCSTDCPSSEKI

SEQ ID NO: 4761 - protein, 25 aa, Homo sapiens
RTDGLAWLGELQTHSWSNDSDTVRS

SEQ ID NO: 4762 - protein, 13 aa, Homo sapiens
RGNVTQHVQGHRN

SEQ ID NO: 4763 - protein, 16 aa, Homo sapiens
REAVFAVNALNISEKQ

SEQ ID NO: 4764 - protein, 22 aa, Homo sapiens
KALGQAANESHNGSILPISWRW

SEQ ID NO: 4765 - protein, 26 aa, Homo sapiens
RITNENFVDAYENSNSTEFVSLASKV

SEQ ID NO: 4766 - protein, 20 aa, Homo sapiens
KAPQHVVNHLPPYTNVSLKM

SEQ ID NO: 4767 - protein, 18 aa, Homo sapiens
RFCAHENCSADLQVSAKI

SEQ ID NO: 4768 - protein, 17 aa, Homo sapiens
RQDVNITVATVPSWLKK

SEQ ID NO: 4769 - protein, 16 aa, Homo sapiens
FLIGNDSYPIPIALKK

SEQ ID NO: 4770 - protein, 18 aa, Homo sapiens
KGNFSNEELSDLELLFRF

SEQ ID NO: 4771 - protein, 21 aa, Homo sapiens
DTNTTIIQLQPLQEPESWART

SEQ ID NO: 4772 - protein, 15 aa, Homo sapiens
FTDFDSQTNVSQSKD

SEQ ID NO: 4773 - protein, 21 aa, Homo sapiens
RGSVALVIHNITAQENGTYRC

SEQ ID NO: 4774 - protein, 13 aa, Homo sapiens
NSASGNVSWLWKQ

SEQ ID NO: 4775 - protein, 11 aa, Homo sapiens
KDFNETQLARI

SEQ ID NO: 4776 - protein, 16 aa, Homo sapiens
WLANASVINPGAIYRC

SEQ ID NO: 4777 - protein, 31 aa, Homo sapiens
KVSSIVVNITELFSKPELESSFTHLDQGERL

SEQ ID NO: 4778 - protein, 11 aa, Homo sapiens
KEDNSTYIMRV

SEQ ID NO: 4779 - protein, 17 aa, Homo sapiens
RLSAVNSIFLSHNNTKE

SEQ ID NO: 4780 - protein, 22 aa, Homo sapiens
RGETLEIGNYSFYALDNQNLRQ

SEQ ID NO: 4781 - protein, 18 aa, Homo sapiens
REETLLYDSNTSSMADRK

SEQ ID NO: 4782 - protein, 18 aa, Homo sapiens
FSSGDLFTAHNFSEQSRI

SEQ ID NO: 4783 - protein, 18 aa, Homo sapiens
KLSHDANETLPLHLYVKS

SEQ ID NO: 4784 - protein, 13 aa, Homo sapiens
RNPNGTVTVISRY

SEQ ID NO: 4785 - protein, 27 aa, Homo sapiens
RTNASVPSIPLDVLSASNSSSQLIVKW

SEQ ID NO: 4786 - protein, 12 aa, Homo sapiens
KMPNASFSTLKI

SEQ ID NO: 4787 - protein, 21 aa, Homo sapiens
KCQNCFPLNWTWYSSNGSVKV

SEQ ID NO: 4788 - protein, 17 aa, Homo sapiens
RVYNVTQHAVGIVVNKQ

SEQ ID NO: 4789 - protein, 17 aa, Homo sapiens
KINSSVTDIEEIIGVRI

SEQ ID NO: 4790 - protein, 22 aa, Homo sapiens
KGEPAIFNLSITEAHESGPYKC

SEQ ID NO: 4791 - protein, 22 aa, Homo sapiens
RNSSFHLNSETGTLVFTAVHKD

SEQ ID NO: 4792 - protein, 25 aa, Homo sapiens
RIDPVTGNITLEEKPAPTDVGLHRL

SEQ ID NO: 4793 - protein, 11 aa, Homo sapiens
RGNFSNEEWKE

SEQ ID NO: 4794 - protein, 28 aa, Homo sapiens
RDFLQLAGAQPQAGLSQANFTLGPVSRS

SEQ ID NO: 4795 - protein, 20 aa, Homo sapiens
KTASNLTVSVLEAEGVFEKG

SEQ ID NO: 4796 - protein, 10 aa, Homo sapiens
RYHSDNSTKA

SEQ ID NO: 4797 - protein, 18 aa, Homo sapiens
RLATIANFSALGLEPGRD

SEQ ID NO: 4798 - protein, 10 aa, Homo sapiens
NNANVTWWRV

SEQ ID NO: 4799 - protein, 20 aa, Homo sapiens
KGVLMVGNETTYEDGHGSRK

SEQ ID NO: 4800 - protein, 18 aa, Homo sapiens
RVQGNSTLLHITDLQARD

SEQ ID NO: 4801 - protein, 25 aa, Homo sapiens
KLHVGYLQPLVAVQVSFAPNDTGKE

SEQ ID NO: 4802 - protein, 19 aa, Homo sapiens
KSNITFNNNDTVSFLEYRT

SEQ ID NO: 4803 - protein, 17 aa, Homo sapiens
RNFILDQTNVSAAAQRR

SEQ ID NO: 4804 - protein, 21 aa, Homo sapiens
KTILSNQTVDIPENVDITLKG

SEQ ID NO: 4805 - protein, 20 aa, Homo sapiens
RVYFLNSTMASNNMTLFFRN

SEQ ID NO: 4806 - protein, 36 aa, Homo sapiens
RNIQVTNHSQLFQNMTCELHLTCSVEDADDNVSFRW

SEQ ID NO: 4807 - protein, 17 aa, Homo sapiens
RLFALNNTTGLITVQRS

SEQ ID NO: 4808 - protein, 21 aa, Homo sapiens
RKPLNNTVELTDVWTYSDTRC

SEQ ID NO: 4809 - protein, 10 aa, Homo sapiens
KNASNMEYRI

SEQ ID NO: 4810 - protein, 18 aa, Homo sapiens
KLNLQTSTSIPNVTEMKT

SEQ ID NO: 4811 - protein, 12 aa, Homo sapiens
KIGFLKPHENKT

SEQ ID NO: 4812 - protein, 16 aa, Homo sapiens
FNETSLAFIVPHETKS

SEQ ID NO: 4813 - protein, 16 aa, Homo sapiens
SSTNFTSPVIEFWERN

SEQ ID NO: 4814 - protein, 15 aa, Homo sapiens
RVYGQNINNETWSRI

SEQ ID NO: 4815 - protein, 40 aa, Homo sapiens
RVLQVGNGVIVGAPGEGNSTGSLYQCQSGTGHCLPVTLRG

SEQ ID NO: 4816 - protein, 12 aa, Homo sapiens
RGLSPGNYSVRI

SEQ ID NO: 4817 - protein, 21 aa, Homo sapiens
NTIFYPVEINESEPIVVYDKE

SEQ ID NO: 4818 - protein, 12 aa, Homo sapiens
NPSNETLAQWKK

SEQ ID NO: 4819 - protein, 19 aa, Homo sapiens
MQVPNSTGPDNATLQMLRN

SEQ ID NO: 4820 - protein, 24 aa, Homo sapiens
KDYPASTSQDSFEAAGNSTSGSRA

SEQ ID NO: 4821 - protein, 20 aa, Homo sapiens
KASMNTSSNPGTPLPLPLRI

SEQ ID NO: 4822 - protein, 16 aa, Homo sapiens
RLSQAQGNLSVLETRQ

SEQ ID NO: 4823 - protein, 26 aa, Homo sapiens
KLFDDWMASNGTQSLPTDVMTTVFKV

SEQ ID NO: 4824 - protein, 21 aa, Homo sapiens
REDEMEENLTQVGSILGNLKD

SEQ ID NO: 4825 - protein, 15 aa, Homo sapiens
KTGALTVQNTTQLRS

SEQ ID NO: 4826 - protein, 11 aa, Homo sapiens
KSNGTIIHVKG

SEQ ID NO: 4827 - protein, 17 aa, Homo sapiens
RYIISPINGTVYLSEKD

SEQ ID NO: 4828 - protein, 15 aa, Homo sapiens
RSFAGPGAPFPMNRS

SEQ ID NO: 4829 - protein, 10 aa, Homo sapiens
KYNVSSLEKY

SEQ ID NO: 4830 - protein, 25 aa, Homo sapiens
KNALNLTFHAQNVGEGGAYEAELRV

SEQ ID NO: 4831 - protein, 14 aa, Homo sapiens
KLGVTNASLVLFRP

SEQ ID NO: 4832 - protein, 18 aa, Homo sapiens
KGNFSDKEVAELEEIFRV

SEQ ID NO: 4833 - protein, 11 aa, Homo sapiens
FYNMSLDVNRK

SEQ ID NO: 4834 - protein, 15 aa, Homo sapiens
YNLSTAEEVFSHGKY

SEQ ID NO: 4835 - protein, 19 aa, Homo sapiens
RVQASDGNNTSFWSEEIKF

SEQ ID NO: 4836 - protein, 12 aa, Homo sapiens
RVLEVTNSSLRQ

SEQ ID NO: 4837 - protein, 12 aa, Homo sapiens
RLINSTFLHNKE

SEQ ID NO: 4838 - protein, 26 aa, Homo sapiens
REVHLVQFHEPDIYNYSALLLSEDKD

SEQ ID NO: 4839 - protein, 26 aa, Homo sapiens
RESQLNLTVMAKPTNWIEGTQAVLRA

SEQ ID NO: 4840 - protein, 14 aa, Homo sapiens
RELYNGTADITLRF

SEQ ID NO: 4841 - protein, 22 aa, Homo sapiens
RDCSCIPQNLSSGFGHATAGKC

SEQ ID NO: 4842 - protein, 12 aa, Homo sapiens
LANASLNLHSKK

SEQ ID NO: 4843 - protein, 16 aa, Homo sapiens
KSGVINLTEEVLWVKV

SEQ ID NO: 4844 - protein, 12 aa, Homo sapiens
KNTNSSNNFSRS

SEQ ID NO: 4845 - protein, 10 aa, Homo sapiens
KLNVTTAWKA

SEQ ID NO: 4846 - protein, 17 aa, Homo sapiens
KHPCNITEEDYQPLMKL

SEQ ID NO: 4847 - protein, 17 aa, Homo sapiens
KEYLEQISTLINTTDRC

SEQ ID NO: 4848 - protein, 15 aa, Homo sapiens
KEFNNWFNVTGSDKC

SEQ ID NO: 4849 - protein, 23 aa, Homo sapiens
SAVDQLQQEFHCCGSNNSQDWRD

SEQ ID NO: 4850 - protein, 34 aa, Homo sapiens
RYHQPGHEAVTSAVDQLQQEFHCCGSNNSQDWRD

SEQ ID NO: 4851 - protein, 23 aa, Homo sapiens
KVLGQSQEPNVNPASAGNQTQKT

SEQ ID NO: 4852 - protein, 25 aa, Homo sapiens
RAPADLPHGSYLMVNTSQHAPGQRA

SEQ ID NO: 4853 - protein, 10 aa, Homo sapiens
RNISQVLEKK

SEQ ID NO: 4854 - protein, 32 aa, Homo sapiens
RVDDEMPQHAVLSGPNLFINNLNKTDNGTYRC

SEQ ID NO: 4855 - protein, 14 aa, Homo sapiens
GKVEIIANDQGNRT

SEQ ID NO: 4856 - protein, 16 aa, Homo sapiens
RDGNSSLIAAVAEVRV

SEQ ID NO: 4857 - protein, 25 aa, Homo sapiens
RALDGDLESFILFHNPEYNKNTSKF

SEQ ID NO: 4858 - protein, 19 aa, Homo sapiens
MSLANPLPTNYTWYHNGKE

SEQ ID NO: 4859 - protein, 16 aa, Homo sapiens
KYTLDPNITSAGPTKS

SEQ ID NO: 4860 - protein, 12 aa, Homo sapiens
KINDSVTLNEKP

SEQ ID NO: 4861 - protein, 13 aa, Homo sapiens
KELSEYNATAIKS

SEQ ID NO: 4862 - protein, 11 aa, Homo sapiens
KEQPALNDSRY

SEQ ID NO: 4863 - protein, 16 aa, Homo sapiens
YLQASAGENETFVMRL

SEQ ID NO: 4864 - protein, 21 aa, Homo sapiens
SVGPYSFLVVANTFNGTSTKV

SEQ ID NO: 4865 - protein, 30 aa, Homo sapiens
RSRNTTAADTYNITDPEELETEYPFFESRV

SEQ ID NO: 4866 - protein, 26 aa, Homo sapiens
RNVISNINETSVILDWSWPLDTGGRK

SEQ ID NO: 4867 - protein, 9 aa, Homo sapiens
RNSSVQLRV

SEQ ID NO: 4868 - protein, 22 aa, Homo sapiens
RGTNVTISSLKPDTIYVFQIRA

SEQ ID NO: 4869 - protein, 23 aa, Homo sapiens
RFYFSSNGTSDVITGSIQVSSRE

SEQ ID NO: 4870 - protein, 12 aa, Homo sapiens
RDIQLENYTPKE

SEQ ID NO: 4871 - protein, 21 aa, Homo sapiens
KNADIVYQLGPNASFFDLDRK

SEQ ID NO: 4872 - protein, 23 aa, Homo sapiens
RVWDTAVGLNHTAEPSLQTLERQ

SEQ ID NO: 4873 - protein, 14 aa, Homo sapiens
RVPDAANLSSAWRN

SEQ ID NO: 4874 - protein, 10 aa, Homo sapiens
RSNVTLTLRN

SEQ ID NO: 4875 - protein, 25 aa, Homo sapiens
RSFDPAVPVAGPPQTVSNLWNSTHH

SEQ ID NO: 4876 - protein, 25 aa, Homo sapiens
RLHHHLDHNNTHHFHNDSITPSERG

SEQ ID NO: 4877 - protein, 30 aa, Homo sapiens
RGWAAPGPEPTYPNSTILPTPDTGPTGIKY

SEQ ID NO: 4878 - protein, 26 aa, Homo sapiens
RALYELAGGTNFSDTVQADPQTVTRL

SEQ ID NO: 4879 - protein, 21 aa, Homo sapiens
QDYPLIYEIIFWENTSNAERK

SEQ ID NO: 4880 - protein, 14 aa, Homo sapiens
KVVWLFNTSIISKE

SEQ ID NO: 4881 - protein, 19 aa, Homo sapiens
KVGSTNVSTLVNVHFAPRI

SEQ ID NO: 4882 - protein, 12 aa, Homo sapiens
KNVTMGQSSARM

SEQ ID NO: 4883 - protein, 25 aa, Homo sapiens
KMTAGDNPQLVPADQVNITEFYNKS

SEQ ID NO: 4884 - protein, 18 aa, Homo sapiens
KLFPATGNSTNLADDGKR

SEQ ID NO: 4885 - protein, 18 aa, Homo sapiens
KENTSSWYEVDSFTPFRK

SEQ ID NO: 4886 - protein, 14 aa, Homo sapiens
KELGLYNLMNITRG

SEQ ID NO: 4887 - protein, 13 aa, Homo sapiens
FNEVTNQTLDVKR

SEQ ID NO: 4888 - protein, 18 aa, Homo sapiens
EDFSFPIFLLEDENETKV

SEQ ID NO: 4889 - protein, 25 aa, Homo sapiens
DATNPSVPLDPISVSNSSSQIILKW

SEQ ID NO: 4890 - protein, 10 aa, Homo sapiens
RKDNTTVTRL

SEQ ID NO: 4891 - protein, 37 aa, Homo sapiens
RVYLDTVSGSLTIYNLTSSDEDEYEMESPNITDTMKF

SEQ ID NO: 4892 - protein, 29 aa, Homo sapiens
KHFHSHNHQHSHNHLNSENQTVTSVSTKR

SEQ ID NO: 4893 - protein, 19 aa, Homo sapiens
RTDYNASVSVPDSSGPERI

SEQ ID NO: 4894 - protein, 14 aa, Homo sapiens
KELLEEVGQNGSRA

SEQ ID NO: 4895 - protein, 24 aa, Homo sapiens
RGSEGGNGSNPVAGLETDDHGGKA

SEQ ID NO: 4896 - protein, 19 aa, Homo sapiens
KSLEDLIFESLPENASHKL

SEQ ID NO: 4897 - protein, 17 aa, Homo sapiens
KVVVVDGKNESEYTVKW

SEQ ID NO: 4898 - protein, 19 aa, Homo sapiens
REGSGYFFLNTSTADVVKV

SEQ ID NO: 4899 - protein, 12 aa, Homo sapiens
WNGKNLTTNQFL

SEQ ID NO: 4900 - protein, 16 aa, Homo sapiens
SAPPPSNSSSSSAPRR

SEQ ID NO: 4901 - protein, 17 aa, Homo sapiens
RVLSAPPHFHFGQTNRT

SEQ ID NO: 4902 - protein, 18 aa, Homo sapiens
RTFNTSTGGLLLPSDTKR

SEQ ID NO: 4903 - protein, 18 aa, Homo sapiens
RQLNYTIGEVPISFVDRV

SEQ ID NO: 4904 - protein, 21 aa, Homo sapiens
RKKTTPTPSTNSVLSTSTNRS

SEQ ID NO: 4905 - protein, 26 aa, Homo sapiens
RGVPQIEVTFDIDANGILNVSAVDKS

SEQ ID NO: 4906 - protein, 11 aa, Homo sapiens
MVNFTVDQIRA

SEQ ID NO: 4907 - protein, 13 aa, Homo sapiens
KVANVSLLALYKG

SEQ ID NO: 4908 - protein, 20 aa, Homo sapiens
KTVTNAVVTVPAYFNDSQRQ

SEQ ID NO: 4909 - protein, 15 aa, Homo sapiens
KSELGNQSPSTSSRQ

SEQ ID NO: 4910 - protein, 17 aa, Homo sapiens
KNQVAMNPTNTVFDAKR

SEQ ID NO: 4911 - protein, 12 aa, Homo sapiens
KNLMNVSNARRP

SEQ ID NO: 4912 - protein, 19 aa, Homo sapiens
KMAVTFIGNSTAIQELFKR

SEQ ID NO: 4913 - protein, 18 aa, Homo sapiens
KGPPQSPVFEGVYNNSRM

SEQ ID NO: 4914 - protein, 21 aa, Homo sapiens
KGAKAANVTGPGGVPVQGSKY

SEQ ID NO: 4915 - protein, 14 aa, Homo sapiens
KDLLARNMSRMLKM

SEQ ID NO: 4916 - protein, 21 aa, Homo sapiens
KCDLVNYSYGEATHWPNSGRI

SEQ ID NO: 4917 - protein, 17 aa, Homo sapiens
RSEAVTLNFTVPTGARS

SEQ ID NO: 4918 - protein, 11 aa, Homo sapiens
RASVDVFGNRT

SEQ ID NO: 4919 - protein, 13 aa, Homo sapiens
KTGIYQVLNGSRL

SEQ ID NO: 4920 - protein, 12 aa, Homo sapiens
HLNDSGQLGLRM

SEQ ID NO: 4921 - protein, 28 aa, Homo sapiens
HLLTGNGTEVPLSGPIHLSLPVPSETRA

SEQ ID NO: 4922 - protein, 11 aa, Homo sapiens
FSFVNQSWARG

SEQ ID NO: 4923 - protein, 15 aa, Homo sapiens
RVDIIVANLTVTDKD

SEQ ID NO: 4924 - protein, 16 aa, Homo sapiens
RSENASLVLSSSNQKR

SEQ ID NO: 4925 - protein, 19 aa, Homo sapiens
RQFGLTNTTVTVTDLLAHT

SEQ ID NO: 4926 - protein, 16 aa, Homo sapiens
RNLSFNELYPSGTLKL

SEQ ID NO: 4927 - protein, 9 aa, Homo sapiens
RNITLTWRQ

SEQ ID NO: 4928 - protein, 13 aa, Homo sapiens
RNATTAHNPVRKP

SEQ ID NO: 4929 - protein, 20 aa, Homo sapiens
REVPVGIPFFVNVTHNGTYQ

SEQ ID NO: 4930 - protein, 24 aa, Homo sapiens
REFVVMFSVVDENFSWYLEDNIKT

SEQ ID NO: 4931 - protein, 27 aa, Homo sapiens
KVTINVMDVNDNSPVVISPPSNTSFKL

SEQ ID NO: 4932 - protein, 9 aa, Homo sapiens
KVLENSTKN

SEQ ID NO: 4933 - protein, 15 aa, Homo sapiens
KPQGQWAEDVLGNKT

SEQ ID NO: 4934 - protein, 12 aa, Homo sapiens
KLSPIHIALNFS

SEQ ID NO: 4935 - protein, 12 aa, Homo sapiens
KIYLRNESEFRD

SEQ ID NO: 4936 - protein, 20 aa, Homo sapiens
KIVASDSGKPSLNQTALVRV

SEQ ID NO: 4937 - protein, 12 aa, Homo sapiens
KIANISGDGQKW

SEQ ID NO: 4938 - protein, 16 aa, Homo sapiens
KGVVDSDDLPLNVSRE

SEQ ID NO: 4939 - protein, 15 aa, Homo sapiens
KGNLTFTAQYLSYRI

SEQ ID NO: 4940 - protein, 23 aa, Homo sapiens
KGLEWIGEINHSGSTNYNPSLKS

SEQ ID NO: 4941 - protein, 14 aa, Homo sapiens
KELLLNTSEVTVRF

SEQ ID NO: 4942 - protein, 36 aa, Homo sapiens
KANTSQPGVLQGGAVYLCPWGASPTQCTPIEFDSKG

SEQ ID NO: 4943 - protein, 14 aa, Homo sapiens
IPGAPPANFTIQKE

SEQ ID NO: 4944 - protein, 23 aa, Homo sapiens
HTNYTFEIDAVNGVSELSSPPRQ

SEQ ID NO: 4945 - protein, 15 aa, Homo sapiens
YTNWSVEQLPAEPKE

SEQ ID NO: 4946 - protein, 16 aa, Homo sapiens
YTMEGYINNTLSIFKV

SEQ ID NO: 4947 - protein, 16 aa, Homo sapiens
WTDDPIVNGTQEHTKV

SEQ ID NO: 4948 - protein, 11 aa, Homo sapiens
RYNGTVGLWRR

SEQ ID NO: 4949 - protein, 11 aa, Homo sapiens
RSNFTLTAARH

SEQ ID NO: 4950 - protein, 14 aa, Homo sapiens
RNASAVVLYNEERY

SEQ ID NO: 4951 - protein, 22 aa, Homo sapiens
RLYNAEQVLSWEPVALSNSTRP

SEQ ID NO: 4952 - protein, 13 aa, Homo sapiens
RLIVLHYNHSGRL

SEQ ID NO: 4953 - protein, 12 aa, Homo sapiens
RGTANLSEAIRV

SEQ ID NO: 4954 - protein, 15 aa, Homo sapiens
RFQLSNSGPNSTIKM

SEQ ID NO: 4955 - protein, 27 aa, Homo sapiens
RCTLQQDCTNSSQQHFWTSASEGPSRC

SEQ ID NO: 4956 - protein, 35 aa, Homo sapiens
  VARIANT 5, 6, 7, 11, 15, 17, 23, 24, 25, 26, 27, 29, 30: Xaa = Any Amino Acid
PGHTXXXPLLXPFTXNXTITNLXXXXXMXXPGSRK

SEQ ID NO: 4957 - protein, 20 aa, Homo sapiens
NGCGTGNETDSDGRINHGRI

SEQ ID NO: 4958 - protein, 19 aa, Homo sapiens
MVEQYSNYSVNGEPVNGRH

SEQ ID NO: 4959 - protein, 12 aa, Homo sapiens
MIETYNQTSPRS

SEQ ID NO: 4960 - protein, 12 aa, Homo sapiens
KVVNITMVALKL

SEQ ID NO: 4961 - protein, 11 aa, Homo sapiens
KVQEHYNYTKE

SEQ ID NO: 4962 - protein, 18 aa, Homo sapiens
KNASVSISHNSCTAPDKT

SEQ ID NO: 4963 - protein, 20 aa, Homo sapiens
KLYNNGFTSVQGYAFNGTKL

SEQ ID NO: 4964 - protein, 8 aa, Homo sapiens
KLPNDSRV

SEQ ID NO: 4965 - protein, 23 aa, Homo sapiens
KLNVNENVECGNNTCTNNEVHNL

SEQ ID NO: 4966 - protein, 14 aa, Homo sapiens
KINLNESMQVVSRR

SEQ ID NO: 4967 - protein, 29 aa, Homo sapiens
KETMSVSLNQTVTQLQQLLQAVNQQLTKE

SEQ ID NO: 4968 - protein, 14 aa, Homo sapiens
HGFSNATQITSSKF

SEQ ID NO: 4969 - protein, 21 aa, Homo sapiens
FSLESHNISLTEHSSMPVEKN

SEQ ID NO: 4970 - protein, 8 aa, Homo sapiens
DYYNLTKF

SEQ ID NO: 4971 - protein, 28 aa, Homo sapiens
CDTPANCTYLDLLGTWVFQVGSSGSQRD

SEQ ID NO: 4972 - protein, 25 aa, Homo sapiens
RLPNSTIYVVEPGYLGFTVHPGDRW

SEQ ID NO: 4973 - protein, 21 aa, Homo sapiens
KTNITLVCKPGDLESAPVLRT

SEQ ID NO: 4974 - protein, 17 aa, Homo sapiens
KAINQTAVECTWTGPRN

SEQ ID NO: 4975 - protein, 18 aa, Homo sapiens
SSYFIDAATVNDSGEYRC

SEQ ID NO: 4976 - protein, 32 aa, Homo sapiens
RSSAVYQCNASNEYGYLLANAFVNVLAEPPRI

SEQ ID NO: 4977 - protein, 20 aa, Homo sapiens
DGPSGLVTANITDSEALARW

SEQ ID NO: 4978 - protein, 30 aa, Homo sapiens
RLANRTGGLEVLLNQEVLSFTEQSWMDLKG

SEQ ID NO: 4979 - protein, 34 aa, Homo sapiens
RSCGMGSITTVTVNQSLLSPLNLEVDPNIQAMRT

SEQ ID NO: 4980 - protein, 24 aa, Homo sapiens
RNTTTGASAAAVASLVSGPLSHSA

SEQ ID NO: 4981 - protein, 35 aa, Homo sapiens
RDMNLTGCLESGGSEEPGGIGVGEKDWTSDVNVKS

SEQ ID NO: 4982 - protein, 24 aa, Homo sapiens
MGGMEPHHMNGSLGSGDIDGLPKN

SEQ ID NO: 4983 - protein, 30 aa, Homo sapiens
MGFSNATFQSEKETGDRNYAIGYYHEEKKC

SEQ ID NO: 4984 - protein, 30 aa, Homo sapiens
KGHGPGGQATNKTSNCVVLKHIPSGIVVKV

SEQ ID NO: 4985 - protein, 28 aa, Homo sapiens
KEWFLQAAKDPSAVAKHFVALSTNTTKV

SEQ ID NO: 4986 - protein, 16 aa, Homo sapiens
KENLSSSEHTQFNSRS

SEQ ID NO: 4987 - protein, 39 aa, Homo sapiens
FPRLCPVYSNLLGGGSLPHPMLNPTSLPSSLPSDGARRL

SEQ ID NO: 4988 - protein, 26 aa, Homo sapiens
ENSTDNPDLWFLHDQNSSAFKFYRKK

SEQ ID NO: 4989 - protein, 35 aa, Homo sapiens
CMTVVQNLMERNNLSYDCIGRLEVGTETIIDKSKS

SEQ ID NO: 4990 - protein, 28 aa, Homo sapiens
MKDLHSDDNEEESDEVEDNDNDSEMERP

SEQ ID NO: 4991 - protein, 25 aa, Homo sapiens
RLYGDILQWGFLDTFFNLTLKEIHF

SEQ ID NO: 4992 - protein, 20 aa, Homo sapiens
KIFYNLSIQSFDDGDYFPVW

SEQ ID NO: 4993 - protein, 19 aa, Homo sapiens
GIIAVANDTNSCELSPCRI

SEQ ID NO: 4994 - protein, 24 aa, Homo sapiens
RGISDNYTLALITYALSSVGSPKA

SEQ ID NO: 4995 - protein, 34 aa, Homo sapiens
RFTVDKDHLVVADVSDDDSGTYTCVANTTLDSVS

SEQ ID NO: 4996 - protein, 22 aa, Homo sapiens
RERPPTFLTPEGNASNKEELRG

SEQ ID NO: 4997 - protein, 26 aa, Homo sapiens
KGSALHEDIYVLHENGTLEIPVAQKD

SEQ ID NO: 4998 - protein, 18 aa, Homo sapiens
VALDEALDNYTITFLIRG

SEQ ID NO: 4999 - protein, 28 aa, Homo sapiens
RLHNPMYFLLANLSLVDIFFSSVTIPKM

SEQ ID NO: 5000 - protein, 25 aa, Homo sapiens
RIETVLPAEFFEVLSSSQNGSYHRI

SEQ ID NO: 5001 - protein, 18 aa, Homo sapiens
RGDPSVISVNGTDFTFRS

SEQ ID NO: 5002 - protein, 34 aa, Homo sapiens
KLLTSHGMGIQVPLNATEFNYLCPAIINQIDARS

SEQ ID NO: 5003 - protein, 21 aa, Homo sapiens
KELEVLSLHNVTFEDAGEYTC

SEQ ID NO: 5004 - protein, 12 aa, Homo sapiens
VMMNSSNIQVKQ

SEQ ID NO: 5005 - protein, 14 aa, Homo sapiens
KENVTQDAEDNTVS

SEQ ID NO: 5006 - protein, 14 aa, Homo sapiens
KNCTSYGVLDISKC

SEQ ID NO: 5007 - protein, 20 aa, Homo sapiens
RGPPGVNGTQGFQGCPGQRG

SEQ ID NO: 5008 - protein, 16 aa, Homo sapiens
KITDIENGSLANIPRV

SEQ ID NO: 5009 - protein, 18 aa, Homo sapiens
KAYINNSLILSEDIDPHK

SEQ ID NO: 5010 - protein, 16 aa, Homo sapiens
QVFGDNESQATIRVKC

SEQ ID NO: 5011 - protein, 15 aa, Homo sapiens
LFYPYNNTADGVYKV

SEQ ID NO: 5012 - protein, 17 aa, Homo sapiens
KYPVGNNQTAVQDNVKV

SEQ ID NO: 5013 - protein, 14 aa, Homo sapiens
KANYRPGENLNLSC

SEQ ID NO: 5014 - protein, 15 aa, Homo sapiens
KALSPNSTISSAPKD

SEQ ID NO: 5015 - protein, 16 aa, Homo sapiens
KVEAAQNLTLPGSLRA

SEQ ID NO: 5016 - protein, 16 aa, Homo sapiens
KSNNSESPHPSPFSRF

SEQ ID NO: 5017 - protein, 15 aa, Homo sapiens
ILWLNETGTIGDEKA

SEQ ID NO: 5018 - protein, 19 aa, Homo sapiens
KAVSSFDPEIDLSNQSGRV

SEQ ID NO: 5019 - protein, 23 aa, Homo sapiens
YLASGNVSGGVCDGCQHNTAGRH

SEQ ID NO: 5020 - protein, 10 aa, Homo sapiens
YLHSNNITKV

SEQ ID NO: 5021 - protein, 15 aa, Homo sapiens
KFNRENSSNILDNLL

SEQ ID NO: 5022 - protein, 18 aa, Homo sapiens
KENMVLNLSCEASGHPRP

SEQ ID NO: 5023 - protein, 17 aa, Homo sapiens
IDSSESIGYTNFTLEKN

SEQ ID NO: 5024 - protein, 13 aa, Homo sapiens
MITLKVDNLTYRT

SEQ ID NO: 5025 - protein, 14 aa, Homo sapiens
RLVQLFPNDTSLKN

SEQ ID NO: 5026 - protein, 12 aa, Homo sapiens
RKLIHVNCSNLP

SEQ ID NO: 5027 - protein, 10 aa, Homo sapiens
KVHNESILDQ

SEQ ID NO: 5028 - protein, 14 aa, Homo sapiens
RFGTCSQLCNNTKG

SEQ ID NO: 5029 - protein, 13 aa, Homo sapiens
KVVNEMCPNITRI

SEQ ID NO: 5030 - protein, 15 aa, Homo sapiens
YEELVDVNCSAVLRF

SEQ ID NO: 5031 - protein, 15 aa, Homo sapiens
RVQNVTEFDDSLLRN

SEQ ID NO: 5032 - protein, 16 aa, Homo sapiens
LGAHNITEEEDTWQKL

SEQ ID NO: 5033 - protein, 16 aa, Homo sapiens
VLIPDNGTGGSWSLKS

SEQ ID NO: 5034 - protein, 13 aa, Homo sapiens
RFSADLGYNGTRQ

SEQ ID NO: 5035 - protein, 17 aa, Homo sapiens
RWCPQDSSCVNATACRC

SEQ ID NO: 5036 - protein, 12 aa, Homo sapiens
KLFQNCSELFKT

SEQ ID NO: 5037 - protein, 12 aa, Homo sapiens
SNGSIFLDILRS

SEQ ID NO: 5038 - protein, 19 aa, Homo sapiens
RKRSDSSGGYNLSDIIQSP

SEQ ID NO: 5039 - protein, 15 aa, Homo sapiens
RFNTANDDNVTQVRA

SEQ ID NO: 5040 - protein, 23 aa, Homo sapiens
QRDETGNNSVQTVFQGTLAATKR

SEQ ID NO: 5041 - protein, 16 aa, Homo sapiens
KDSSGPANSTADLLKQ

SEQ ID NO: 5042 - protein, 24 aa, Homo sapiens
ESNLTSTLSGGGGGATADSMGGKE

SEQ ID NO: 5043 - protein, 23 aa, Homo sapiens
VRNDTPCGTTIGPILASRLGLRV

SEQ ID NO: 5044 - protein, 16 aa, Homo sapiens
IYLANYTLPDSPFLKI

SEQ ID NO: 5045 - protein, 24 aa, Homo sapiens
YVGADCGYPACPENCSGHGECVRG

SEQ ID NO: 5046 - protein, 15 aa, Homo sapiens
YNIGNYTQAVECAKT

SEQ ID NO: 5047 - protein, 17 aa, Homo sapiens
WGTFEEVSGNVSPGTRR

SEQ ID NO: 5048 - protein, 15 aa, Homo sapiens
RVNDNKTAAEEALRK

SEQ ID NO: 5049 - protein, 19 aa, Homo sapiens
RSLEAQGNSSHLDADTVRH

SEQ ID NO: 5050 - protein, 14 aa, Homo sapiens
RRNFTAADWGQSRD

SEQ ID NO: 5051 - protein, 16 aa, Homo sapiens
LTVETLEHNQTYECRA

SEQ ID NO: 5052 - protein, 16 aa, Homo sapiens
HADLMSNLSQDELARI

SEQ ID NO: 5053 - protein, 13 aa, Homo sapiens
RQECYAFNGTQRF

SEQ ID NO: 5054 - protein, 12 aa, Homo sapiens
KYILAQYNTTKD

SEQ ID NO: 5055 - protein, 14 aa, Homo sapiens
KMSVCTDNVTDLRI

SEQ ID NO: 5056 - protein, 13 aa, Homo sapiens
KDSLSINATNIKH

SEQ ID NO: 5057 - protein, 15 aa, Homo sapiens
KLSDTTSQSNSTAKE

SEQ ID NO: 5058 - protein, 24 aa, Homo sapiens
KTFKNESENTCQDVDECSSGQHQC

SEQ ID NO: 5059 - protein, 12 aa, Homo sapiens
KNYSVNLENLKN

SEQ ID NO: 5060 - protein, 21 aa, Homo sapiens
FDVLIHDPSHFLNYSTINYKW

SEQ ID NO: 5061 - protein, 15 aa, Homo sapiens
RSDEYNCSSGMCIRS

SEQ ID NO: 5062 - protein, 15 aa, Homo sapiens
KMNSTGDFDLHLLKV

SEQ ID NO: 5063 - protein, 17 aa, Homo sapiens
RWCPQNSSCVNATACRC

SEQ ID NO: 5064 - protein, 27 aa, Homo sapiens
TAQVQPLQNMTGFPALAGPPAHSQLRA

SEQ ID NO: 5065 - protein, 19 aa, Homo sapiens
RSSNDSLNSVSSSDGYGKR

SEQ ID NO: 5066 - protein, 17 aa, Homo sapiens
RQACSSASDGNISNRSK

SEQ ID NO: 5067 - protein, 14 aa, Homo sapiens
RNGSPPPGAPSSRF

SEQ ID NO: 5068 - protein, 26 aa, Homo sapiens
RLNVKNEELDAMMKEASGPINFTVFL

SEQ ID NO: 5069 - protein, 20 aa, Homo sapiens
RLEANQTLEGAGGSITSVDF

SEQ ID NO: 5070 - protein, 13 aa, Homo sapiens
RKQQHNLSAFPKE

SEQ ID NO: 5071 - protein, 15 aa, Homo sapiens
RALGQNPTNAEVLKV

SEQ ID NO: 5072 - protein, 29 aa, Homo sapiens
QILFPKVNLSPVTPAKDTGLTAAPQEPKA

SEQ ID NO: 5073 - protein, 14 aa, Homo sapiens
PEANSSWMDTVIRQ

SEQ ID NO: 5074 - protein, 22 aa, Homo sapiens
NRPLENDSFLQVTLQDMGSQKK

SEQ ID NO: 5075 - protein, 14 aa, Homo sapiens
KVDSLNLQNSSQLD

SEQ ID NO: 5076 - protein, 16 aa, Homo sapiens
KQTCENPDFENGSEKT

SEQ ID NO: 5077 - protein, 12 aa, Homo sapiens
KNTSFAYPAIRY

SEQ ID NO: 5078 - protein, 16 aa, Homo sapiens
KNSSSPVAATPASVNT

SEQ ID NO: 5079 - protein, 25 aa, Homo sapiens
KEEFGLTSLGNTSFTDFSCKHPREL

SEQ ID NO: 5080 - protein, 24 aa, Homo sapiens
KCSLYADSDGENDSTSDSESSSSS

SEQ ID NO: 5081 - protein, 19 aa, Homo sapiens
KCGECGKAFNWSSTLITHK

SEQ ID NO: 5082 - protein, 21 aa, Homo sapiens
ISRIKTSQADFNKTELERYKE

SEQ ID NO: 5083 - protein, 11 aa, Homo sapiens
HVNFEDNDNRS

SEQ ID NO: 5084 - protein, 17 aa, Homo sapiens
EVIASTNCNLTMSLLKL

SEQ ID NO: 5085 - protein, 14 aa, Homo sapiens
EKNVSEQMTNEDKS

SEQ ID NO: 5086 - protein, 16 aa, Homo sapiens
MQVYNLTFYSTSDGKE

SEQ ID NO: 5087 - protein, 14 aa, Homo sapiens
RNNTGGSTGLPRRK

SEQ ID NO: 5088 - protein, 22 aa, Homo sapiens
REQQDEHILEVTVTDNGSPPKS

SEQ ID NO: 5089 - protein, 13 aa, Homo sapiens
PKSALNASDNLKN

SEQ ID NO: 5090 - protein, 15 aa, Homo sapiens
LSEKNTTAECWDEKF

SEQ ID NO: 5091 - protein, 18 aa, Homo sapiens
KRANEMNISPASLASLYE

SEQ ID NO: 5092 - protein, 18 aa, Homo sapiens
KGPNCSEPECPGNCHLRG

SEQ ID NO: 5093 - protein, 19 aa, Homo sapiens
KENATIVVGGLEDAAAVDF

SEQ ID NO: 5094 - protein, 16 aa, Homo sapiens
YTFHANGSLTINKVKL

SEQ ID NO: 5095 - protein, 12 aa, Homo sapiens
RPGAASNLSYRA

SEQ ID NO: 5096 - protein, 24 aa, Homo sapiens
RNALGQVEAPASLTVLTPDQLNST

SEQ ID NO: 5097 - protein, 14 aa, Homo sapiens
RNKSFSLDHMNIYD

SEQ ID NO: 5098 - protein, 21 aa, Homo sapiens
RKLDKGINISDEDFLLLELLH

SEQ ID NO: 5099 - protein, 15 aa, Homo sapiens
RIYPLTWNGSLCMRL

SEQ ID NO: 5100 - protein, 12 aa, Homo sapiens
RDCSANTTSCHI

SEQ ID NO: 5101 - protein, 14 aa, Homo sapiens
RAENQVNVTCQVRK

SEQ ID NO: 5102 - protein, 27 aa, Homo sapiens
PTLNGSENWGSPVSTQEEGPDTGWERE

SEQ ID NO: 5103 - protein, 15 aa, Homo sapiens
LSLENNSISSIPEKY

SEQ ID NO: 5104 - protein, 10 aa, Homo sapiens
KQNLTVTDRV

SEQ ID NO: 5105 - protein, 15 aa, Homo sapiens
KMYQMFNETTSQVRK

SEQ ID NO: 5106 - protein, 18 aa, Homo sapiens
KIVGPEENLSQAEARNMG

SEQ ID NO: 5107 - protein, 18 aa, Homo sapiens
KEVNVSPCPTQPCQLSKG

SEQ ID NO: 5108 - protein, 19 aa, Homo sapiens
KETIGDYTWTNGSQPCVHL

SEQ ID NO: 5109 - protein, 14 aa, Homo sapiens
HTQELFISNITEKN

SEQ ID NO: 5110 - protein, 15 aa, Homo sapiens
HLFVNGTVTQGDQRV

SEQ ID NO: 5111 - protein, 20 aa, Homo sapiens
FGAVICANVTGSYGAACNKL

SEQ ID NO: 5112 - protein, 16 aa, Homo sapiens
ANWNYNTNITTETSKI

SEQ ID NO: 5113 - protein, 11 aa, Homo sapiens
AHLYYNVTEKV

SEQ ID NO: 5114 - protein, 21 aa, Homo sapiens
VLFTINCTITNLQYEEDMRRT

SEQ ID NO: 5115 - protein, 12 aa, Homo sapiens
SKCGINFSSLRK

SEQ ID NO: 5116 - protein, 14 aa, Homo sapiens
RITSNATSDLNIKV

SEQ ID NO: 5117 - protein, 12 aa, Homo sapiens
LEVDNHTVTTRF

SEQ ID NO: 5118 - protein, 18 aa, Homo sapiens
KTNEQVVEVCTNTSSPHA

SEQ ID NO: 5119 - protein, 22 aa, Homo sapiens
KQLEKIESGEMGLNKVWINITE

SEQ ID NO: 5120 - protein, 16 aa, Homo sapiens
KFSIMNQSLLSIPGSP

SEQ ID NO: 5121 - protein, 12 aa, Homo sapiens
FNKSANIMLDKW

SEQ ID NO: 5122 - protein, 16 aa, Homo sapiens
MSLNNSSNVFLDSVPS

SEQ ID NO: 5123 - protein, 16 aa, Homo sapiens
RKNLTLMATTSQLPKL

SEQ ID NO: 5124 - protein, 21 aa, Homo sapiens
TSSDHPEDTANVTVTVLSTKQ

SEQ ID NO: 5125 - protein, 19 aa, Homo sapiens
RMSVINFECNKTAGNDGKG

SEQ ID NO: 5126 - protein, 28 aa, Homo sapiens
RMDGCTLTDEQLLYSFNLSSLSTSTFKV

SEQ ID NO: 5127 - protein, 20 aa, Homo sapiens
KTMLVQKNVTSESTCCVAKS

SEQ ID NO: 5128 - protein, 26 aa, Homo sapiens
RGNVISSHGNPILLNSSIPEDPSIKA

SEQ ID NO: 5129 - protein, 18 aa, Homo sapiens
VFQPLANLSNLDLTANRL

SEQ ID NO: 5130 - protein, 22 aa, Homo sapiens
KNATYGYVLDDPDPDDGFNYKQ

SEQ ID NO: 5131 - protein, 26 aa, Homo sapiens
RALESSAPNLQLETSDVLANVTYLKG

SEQ ID NO: 5132 - protein, 17 aa, Homo sapiens
GKLGLVGVNLTLDGVKS

SEQ ID NO: 5133 - protein, 14 aa, Homo sapiens
KLHVTLYNCSFGRS

SEQ ID NO: 5134 - protein, 17 aa, Homo sapiens
KHSDCLACLHFNHSGIC

SEQ ID NO: 5135 - protein, 29 aa, Homo sapiens
SSATTSTTTSTGSGSGNSSSNATGNTVAA

SEQ ID NO: 5136 - protein, 31 aa, Homo sapiens
RNHTYNTYIGQGYIIPGMDQGLQGACMGERR

SEQ ID NO: 5137 - protein, 29 aa, Homo sapiens
KVVFLSPAVPEEPEAYNLTVLIEMDGHRA

SEQ ID NO: 5138 - protein, 19 aa, Homo sapiens
RTLTLVENKPIQLNCSVKS

SEQ ID NO: 5139 - protein, 20 aa, Homo sapiens
NMELDDSAAESTGNCTSSKW

SEQ ID NO: 5140 - protein, 14 aa, Homo sapiens
KMGHNYTFTVQARC

SEQ ID NO: 5141 - protein, 23 aa, Homo sapiens
KTGAFSMPEVNVDYNASSETLRC

SEQ ID NO: 5142 - protein, 14 aa, Homo sapiens
VKNTSNEAFFKRKC

SEQ ID NO: 5143 - protein, 26 aa, Homo sapiens
GPGILSMANAGPNTNCSQCFICTAKT

SEQ ID NO: 5144 - protein, 16 aa, Homo sapiens
RISVAGRNCSFQPERY

SEQ ID NO: 5145 - protein, 27 aa, Homo sapiens
REGICNGFTALCPASDPKPNFTDCNRH

SEQ ID NO: 5146 - protein, 30 aa, Homo sapiens
KQEEAGVRPSAGNVSTHPSLSQRPGGSTKS

SEQ ID NO: 5147 - protein, 35 aa, Homo sapiens
RACHCPDAGGELICYQLPGCHGNFSDAEEGDPERH

SEQ ID NO: 5148 - protein, 15 aa, Homo sapiens
KIANETRYPHSVAKS

SEQ ID NO: 5149 - protein, 15 aa, Homo sapiens
RVGYQSQNISCFFRL

SEQ ID NO: 5150 - protein, 27 aa, Homo sapiens
RHLYQGCQVVQGNLELTYLPTNASLSF

SEQ ID NO: 5151 - protein, 29 aa, Homo sapiens
REFVENSECIQCHPECLPQAMNITCTGRG

SEQ ID NO: 5152 - protein, 32 aa, Homo sapiens
KTLFANGSIYPPNEGFCPCLESGIQNVSTCRF

SEQ ID NO: 5153 - protein, 21 aa, Homo sapiens
KMQMVSNISFFAMFVMYFLTA

SEQ ID NO: 5154 - protein, 35 aa, Homo sapiens
KISVDVQRPTGSFSIDFLGGFTSYYDNITNVVVKL

SEQ ID NO: 5155 - protein, 23 aa, Homo sapiens
RKSQGNVINISSLVGAIGQAQAV

SEQ ID NO: 5156 - protein, 23 aa, Homo sapiens
RIGVRDVRLNGSAASHVLHQDSG

SEQ ID NO: 5157 - protein, 28 aa, Homo sapiens
RDHVNVSMVEVTDFPFNTSEWEGYLPKE

SEQ ID NO: 5158 - protein, 22 aa, Homo sapiens
LVSAVSNSSQGTTAAAGPEEKF

SEQ ID NO: 5159 - protein, 14 aa, Homo sapiens
LPRPSEVNETILRP

SEQ ID NO: 5160 - protein, 20 aa, Homo sapiens
LMKKLDILGDNANLTNEEQV

SEQ ID NO: 5161 - protein, 21 aa, Homo sapiens
LLYGGDCSHWTESINLTNNFK

SEQ ID NO: 5162 - protein, 25 aa, Homo sapiens
KYEGNQSNDYISPMCSCSSECIHKL

SEQ ID NO: 5163 - protein, 34 aa, Homo sapiens
KVGGTKPAGGDFGEVLNSAANASATTTEPLPEKT

SEQ ID NO: 5164 - protein, 21 aa, Homo sapiens
KTEALLEAKTNELINISSSKT

SEQ ID NO: 5165 - protein, 14 aa, Homo sapiens
KHSNGSYSAFGERD

SEQ ID NO: 5166 - protein, 22 aa, Homo sapiens
KHFMQNFACSNVSQVQLITSKG

SEQ ID NO: 5167 - protein, 19 aa, Homo sapiens
KEFHPTFDPLINNTWLSRS

SEQ ID NO: 5168 - protein, 12 aa, Homo sapiens
KAFNNSSILAKH

SEQ ID NO: 5169 - protein, 22 aa, Homo sapiens
APGETPAAIANSSGQPYQPLRE

SEQ ID NO: 5170 - protein, 29 aa, Homo sapiens
RQTVHFQISSQLQFSPEEVLGMVLNYSRS

SEQ ID NO: 5171 - protein, 22 aa, Homo sapiens
MVNQSLLSPLNLEVDPNIQAVC

SEQ ID NO: 5172 - protein, 23 aa, Homo sapiens
KTDPANQFEWLESTLNNSQQNKE

SEQ ID NO: 5173 - protein, 13 aa, Homo sapiens
ASMFNSSEQSQKG

SEQ ID NO: 5174 - protein, 25 aa, Homo sapiens
VSVVTPGCNQLPTLESVENYTLTIN

SEQ ID NO: 5175 - protein, 26 aa, Homo sapiens
RQNRSFEGMVVAALLAGRALQGLRRL

SEQ ID NO: 5176 - protein, 22 aa, Homo sapiens
RNVTYGTYLDDPDPDDGFNYKQ

SEQ ID NO: 5177 - protein, 16 aa, Homo sapiens
RNLTEVPTDLPAYVRN

SEQ ID NO: 5178 - protein, 29 aa, Homo sapiens
RLTVLQASPQDTGNYSCHVEEWLPSPQKE

SEQ ID NO: 5179 - protein, 16 aa, Homo sapiens
RCNSDLRNKTYFSPRI

SEQ ID NO: 5180 - protein, 17 aa, Homo sapiens
RASVSFLNFNLSNCERK

SEQ ID NO: 5181 - protein, 23 aa, Homo sapiens
PGYKLAADNKSSIDLCAEGTHGC

SEQ ID NO: 5182 - protein, 19 aa, Homo sapiens
KVLHNGTLAELQGLPHIRV

SEQ ID NO: 5183 - protein, 19 aa, Homo sapiens
KSMAGSGHNVSQEALAIKR

SEQ ID NO: 5184 - protein, 21 aa, Homo sapiens
KNFTALIPGTTVEILDGDSKN

SEQ ID NO: 5185 - protein, 20 aa, Homo sapiens
KILTADNQTYMAVQGSTAYL

SEQ ID NO: 5186 - protein, 23 aa, Homo sapiens
RYSVLIMAEKPVGDLSSPNETKY

SEQ ID NO: 5187 - protein, 13 aa, Homo sapiens
RYQYVDCGRNTTY

SEQ ID NO: 5188 - protein, 12 aa, Homo sapiens
RVNITYNYPVRA

SEQ ID NO: 5189 - protein, 13 aa, Homo sapiens
RVLLELANVSTHI

SEQ ID NO: 5190 - protein, 16 aa, Homo sapiens
RSVNPNDTCLASCVKS

SEQ ID NO: 5191 - protein, 15 aa, Homo sapiens
RLNNISIIGPLDMKQ

SEQ ID NO: 5192 - protein, 15 aa, Homo sapiens
RFGHFTGFNSSTLKD

SEQ ID NO: 5193 - protein, 22 aa, Homo sapiens
RDCVLQCEEQNCSGGALNHFRS

SEQ ID NO: 5194 - protein, 34 aa, Homo sapiens
LSFGEDYPGIVNPLDHTNVTAPQASMMFQYFVKV

SEQ ID NO: 5195 - protein, 18 aa, Homo sapiens
KTCPAGVMGENNTLVWKY

SEQ ID NO: 5196 - protein, 17 aa, Homo sapiens
KNNQLALTLIDTNRSRA

SEQ ID NO: 5197 - protein, 21 aa, Homo sapiens
KDLNEDDHHHECLNVTQLLKY

SEQ ID NO: 5198 - protein, 23 aa, Homo sapiens
KCIPVMEAQEYIANVTSSSSAKF

SEQ ID NO: 5199 - protein, 17 aa, Homo sapiens
TFGNHSSGDFDDGFLRR

SEQ ID NO: 5200 - protein, 18 aa, Homo sapiens
SLLEGQEDHYNNLSASKV

SEQ ID NO: 5201 - protein, 28 aa, Homo sapiens
SGKTVEINNTDAEGRLVLADGVSYACKD

SEQ ID NO: 5202 - protein, 20 aa, Homo sapiens
SAFGNILSCKVVCDDNGSKG

SEQ ID NO: 5203 - protein, 22 aa, Homo sapiens
RVYSNASLLIQNVTQEDAGSYT

SEQ ID NO: 5204 - protein, 17 aa, Homo sapiens
RTGEGFLCVFAINNTKS

SEQ ID NO: 5205 - protein, 21 aa, Homo sapiens
RSVGCIMGELLNGSPLFPGKN

SEQ ID NO: 5206 - protein, 28 aa, Homo sapiens
RSRKPENQQFPDTENEEYHSDEQNDTRK

SEQ ID NO: 5207 - protein, 19 aa, Homo sapiens
RQDCCGNCSDSEEELPTRL

SEQ ID NO: 5208 - protein, 25 aa, Homo sapiens
RNPTQFQLPNELTCTTALPGSSKRR

SEQ ID NO: 5209 - protein, 16 aa, Homo sapiens
RMTRNKANTMANQSKQ

SEQ ID NO: 5210 - protein, 23 aa, Homo sapiens
RLEMTAAKNTNNNQSPSAPPAKP

SEQ ID NO: 5211 - protein, 20 aa, Homo sapiens
RKMASVNGSSQNCVSGQERG

SEQ ID NO: 5212 - protein, 15 aa, Homo sapiens
RKLLGNVSLSLLYKS

SEQ ID NO: 5213 - protein, 35 aa, Homo sapiens
RKEMDNVSILSSQPEGSLQSWLSCTLSLATDTMRT

SEQ ID NO: 5214 - protein, 23 aa, Homo sapiens
RFQLPGNIGFDCHLNGTASQKKS

SEQ ID NO: 5215 - protein, 17 aa, Homo sapiens
RFANHSVNPNCYAKVMM

SEQ ID NO: 5216 - protein, 19 aa, Homo sapiens
RDVACGANHTLVLDSQKRV

SEQ ID NO: 5217 - protein, 19 aa, Homo sapiens
RAWNWSNSITSSPFVSFKP

SEQ ID NO: 5218 - protein, 20 aa, Homo sapiens
QSSMSPLPQMPIQTLQDNKS

SEQ ID NO: 5219 - protein, 26 aa, Homo sapiens
QEKNITALEKAILDQEGPAKVAHTRL

SEQ ID NO: 5220 - protein, 19 aa, Homo sapiens
PVGGNVTSSFSGDDLECRE

SEQ ID NO: 5221 - protein, 22 aa, Homo sapiens
PNASWCSDMLSLYQEFLEKTKS

SEQ ID NO: 5222 - protein, 15 aa, Homo sapiens
NQNRSMEAHNILSKR

SEQ ID NO: 5223 - protein, 22 aa, Homo sapiens
MSEVVQTCRNFIKDALNISIKS

SEQ ID NO: 5224 - protein, 9 aa, Homo sapiens
MNETIFMKF

SEQ ID NO: 5225 - protein, 27 aa, Homo sapiens
MMAAAPIQQNGTHTGVPIDLDPPDSRK

SEQ ID NO: 5226 - protein, 21 aa, Homo sapiens
LVSPGSANETSSILVESVTRS

SEQ ID NO: 5227 - protein, 24 aa, Homo sapiens
LLAATANTSSSQLAALLQLQHQLR

SEQ ID NO: 5228 - protein, 18 aa, Homo sapiens
KYSNMSTLGNNGPTHKKL

SEQ ID NO: 5229 - protein, 11 aa, Homo sapiens
KYPSLANRNGT

SEQ ID NO: 5230 - protein, 14 aa, Homo sapiens
KYILTVENSSGSKS

SEQ ID NO: 5231 - protein, 23 aa, Homo sapiens
KVESMSESDTMNVSNLSQGVMLS

SEQ ID NO: 5232 - protein, 24 aa, Homo sapiens
KRIQKELADITLDPPPNCSAGPKG

SEQ ID NO: 5233 - protein, 10 aa, Homo sapiens
KMSSFNLSRI

SEQ ID NO: 5234 - protein, 24 aa, Homo sapiens
KMFFPNLTAYMSSGPLVAMILARH

SEQ ID NO: 5235 - protein, 21 aa, Homo sapiens
KLTLQPVDNSTISLQMGTNKV

SEQ ID NO: 5236 - protein, 17 aa, Homo sapiens
KLLPAFNTTSGLPYPRI

SEQ ID NO: 5237 - protein, 19 aa, Homo sapiens
KKPKGGPNASSSSATISKQ

SEQ ID NO: 5238 - protein, 19 aa, Homo sapiens
KKAKMEPNASESAIPARRQ

SEQ ID NO: 5239 - protein, 23 aa, Homo sapiens
KITGQSLGYGFVNYSDPNDADKA

SEQ ID NO: 5240 - protein, 30 aa, Homo sapiens
KGSGPSGGSGGGANGTSFSYTFHGDPHAMF

SEQ ID NO: 5241 - protein, 26 aa, Homo sapiens
KGNGSPVNGSSQQGTSNPSLGSNIPS

SEQ ID NO: 5242 - protein, 24 aa, Homo sapiens
KFHKFDSCENSLKSNSDLLNYNRS

SEQ ID NO: 5243 - protein, 20 aa, Homo sapiens
KENPGFDFSGAEISGNYTKG

SEQ ID NO: 5244 - protein, 31 aa, Homo sapiens
KDQKVPHSGKTEGSTAGAQIPSKVSVNVSSH

SEQ ID NO: 5245 - protein, 17 aa, Homo sapiens
KCGKAFTQSSNLTVHQK

SEQ ID NO: 5246 - protein, 39 aa, Homo sapiens
KAQNTWGCGNSLRTALINSTGEGSHCSSSGDPAEYNLRS

SEQ ID NO: 5247 - protein, 21 aa, Homo sapiens
KALWPGDLNGSGSGWATPIRP

SEQ ID NO: 5248 - protein, 27 aa, Homo sapiens
KALGIYVIVVNCSEGLDYKSMGRMYSG

SEQ ID NO: 5249 - protein, 22 aa, Homo sapiens
GLTNLSKMPACNIMLLGAQRKT

SEQ ID NO: 5250 - protein, 11 aa, Homo sapiens
FMKTLNYTARF

SEQ ID NO: 5251 - protein, 22 aa, Homo sapiens
FGPKNRSIGAAAKSQVISNAKN

SEQ ID NO: 5252 - protein, 40 aa, Homo sapiens
ELDKSNSPLTMALCGSKGSFINISQMIACVGQQAISGSRV

SEQ ID NO: 5253 - protein, 22 aa, Homo sapiens
EERMFKENQSLFSEVASLKEQM

SEQ ID NO: 5254 - protein, 27 aa, Homo sapiens
EARTESSQASDMMDTMDVENNSTLEKH

SEQ ID NO: 5255 - protein, 24 aa, Homo sapiens
RVCNLTSRGMDSCEVMCCGRGYDT

SEQ ID NO: 5256 - protein, 34 aa, Homo sapiens
RTIDTTPSGGNTTPSGTGITLDTTLSATETTFEY

SEQ ID NO: 5257 - protein, 20 aa, Homo sapiens
RSNTSQLAFLLYNDQPPQPS

SEQ ID NO: 5258 - protein, 20 aa, Homo sapiens
RSLEEIGIQNYSTTSSCQAR

SEQ ID NO: 5259 - protein, 11 aa, Homo sapiens
RRNNTFLSLRD

SEQ ID NO: 5260 - protein, 17 aa, Homo sapiens
RLINKFNSSSSSLEEKI

SEQ ID NO: 5261 - protein, 29 aa, Homo sapiens
RIFMNTCNPSSLTQQWLFEHTNSTVLEKF

SEQ ID NO: 5262 - protein, 28 aa, Homo sapiens
RGPGCDELDCGPSNCSQHGLCTETGCRC

SEQ ID NO: 5263 - protein, 15 aa, Homo sapiens
RDSANATSLPGSRRR

SEQ ID NO: 5264 - protein, 20 aa, Homo sapiens
PVVLAPNHTDHCHYQGRVRG

SEQ ID NO: 5265 - protein, 15 aa, Homo sapiens
KWSLSVKNFTMNEKL

SEQ ID NO: 5266 - protein, 29 aa, Homo sapiens
KNANGSYTCEECDSSCVGCTGEGPGNCKE

SEQ ID NO: 5267 - protein, 17 aa, Homo sapiens
GLQQTNFSSAFSSDSKS

SEQ ID NO: 5268 - protein, 31 aa, Homo sapiens
ERTGPSGTVLVFCNSSSTVNWLGYILDDHKI

SEQ ID NO: 5269 - protein, 13 aa, Homo sapiens
RKHGENYSVDYLT

SEQ ID NO: 5270 - protein, 15 aa, Homo sapiens
KLQNNISYQMADIHH

SEQ ID NO: 5271 - protein, 13 aa, Homo sapiens
TAANVTVSLPVRG

SEQ ID NO: 5272 - protein, 23 aa, Homo sapiens
RVAGTAVSISCNVTGYEGPAQQN

SEQ ID NO: 5273 - protein, 14 aa, Homo sapiens
RTMNASLAQQLCRQ

SEQ ID NO: 5274 - protein, 16 aa, Homo sapiens
RSMAIMNNVSLALHRC

SEQ ID NO: 5275 - protein, 15 aa, Homo sapiens
RSDDNLLNTSALGRL

SEQ ID NO: 5276 - protein, 14 aa, Homo sapiens
RMLEMGAIKNLTSF

SEQ ID NO: 5277 - protein, 14 aa, Homo sapiens
RLSCAFKTENQTRQ

SEQ ID NO: 5278 - protein, 11 aa, Homo sapiens
RLNPGNYTARI

SEQ ID NO: 5279 - protein, 19 aa, Homo sapiens
RIVSPEPGGAVGPNLTCRW

SEQ ID NO: 5280 - protein, 26 aa, Homo sapiens
RISGSEVEELSEVSNFTMEDINNKKI

SEQ ID NO: 5281 - protein, 25 aa, Homo sapiens
RETNAIHNITVLAMESQNPSQVGRG

SEQ ID NO: 5282 - protein, 16 aa, Homo sapiens
REHVHNASAHLTFNKF

SEQ ID NO: 5283 - protein, 18 aa, Homo sapiens
RDLPEELSLSFNATCLNN

SEQ ID NO: 5284 - protein, 15 aa, Homo sapiens
QVDTVVPNATVSEKA

SEQ ID NO: 5285 - protein, 17 aa, Homo sapiens
QTVDSSNIDGFVNCTKI

SEQ ID NO: 5286 - protein, 15 aa, Homo sapiens
PGANVSLRCAGRLRN

SEQ ID NO: 5287 - protein, 34 aa, Homo sapiens
MMVRKGDTAVLRCYLEDGASKGAWLNRSSIIFAG

SEQ ID NO: 5288 - protein, 19 aa, Homo sapiens
LVLQDSAAGFIANLSVQRQ

SEQ ID NO: 5289 - protein, 13 aa, Homo sapiens
KVVNTSDPDMRRE

SEQ ID NO: 5290 - protein, 20 aa, Homo sapiens
KTSNSSQVSNEQDKIDAYKL

SEQ ID NO: 5291 - protein, 34 aa, Homo sapiens
KSFGYSSVVCVCNATYCDSFDPPTFPALGTFSRY

SEQ ID NO: 5292 - protein, 25 aa, Homo sapiens
KKSQGIQNCSQSLLGCSCPCAWSRC

SEQ ID NO: 5293 - protein, 21 aa, Homo sapiens
KAKQCNGTSTCWCVNTAGVRR

SEQ ID NO: 5294 - protein, 21 aa, Homo sapiens
HGLTVEDEGNYTCEFATFPKG

SEQ ID NO: 5295 - protein, 24 aa, Homo sapiens
HAVDSLFNTTFVCTVTNAVGMGRA

SEQ ID NO: 5296 - protein, 24 aa, Homo sapiens
FAAWDDDEPWGPWTGNGTFWLPRV

SEQ ID NO: 5297 - protein, 21 aa, Homo sapiens
CSLEDFLCDFGYYRPENDSKC

SEQ ID NO: 5298 - protein, 24 aa, Homo sapiens
AQDNCTCPTNKMTVCSPDGPGGRC

SEQ ID NO: 5299 - protein, 12 aa, Homo sapiens
YLLGPDKNFTRE

SEQ ID NO: 5300 - protein, 12 aa, Homo sapiens
VSLNITSLGLRS

SEQ ID NO: 5301 - protein, 19 aa, Homo sapiens
RTTLVDNNTWNNSHIALVG

SEQ ID NO: 5302 - protein, 15 aa, Homo sapiens
RSCILNGTVMLDMRA

SEQ ID NO: 5303 - protein, 23 aa, Homo sapiens
RQTMIDFLQNHTEGSRPPACPRL

SEQ ID NO: 5304 - protein, 15 aa, Homo sapiens
RLNWTSLLPASFTKN

SEQ ID NO: 5305 - protein, 20 aa, Homo sapiens
RKTYAIYDLLDTAMINNSRN

SEQ ID NO: 5306 - protein, 15 aa, Homo sapiens
RKNSSTSTSSSGSRR

SEQ ID NO: 5307 - protein, 31 aa, Homo sapiens
RIVNATWFTNFILLFILLSSAALAAEDPIRA

SEQ ID NO: 5308 - protein, 20 aa, Homo sapiens
RDRNLTNCSSVMLPSNDDRA

SEQ ID NO: 5309 - protein, 18 aa, Homo sapiens
RAELIEHPLNISLGDAVL

SEQ ID NO: 5310 - protein, 16 aa, Homo sapiens
PEQKHTAEYAANITKS

SEQ ID NO: 5311 - protein, 14 aa, Homo sapiens
PEPLVGNLSGIEKE

SEQ ID NO: 5312 - protein, 13 aa, Homo sapiens
LRNLTIVDSGLKF

SEQ ID NO: 5313 - protein, 21 aa, Homo sapiens
LDTNASVSNGATFLESPTVRR

SEQ ID NO: 5314 - protein, 18 aa, Homo sapiens
KTGSICASENINDTLTRY

SEQ ID NO: 5315 - protein, 14 aa, Homo sapiens
KSNFSLEDFQHSKG

SEQ ID NO: 5316 - protein, 11 aa, Homo sapiens
KRHTNVSILYA

SEQ ID NO: 5317 - protein, 21 aa, Homo sapiens
KQDGPMPKPHSVSLNDTETRK

SEQ ID NO: 5318 - protein, 11 aa, Homo sapiens
KNFIINMTCRF

SEQ ID NO: 5319 - protein, 16 aa, Homo sapiens
KILGDKVNNTAVIEKQ

SEQ ID NO: 5320 - protein, 21 aa, Homo sapiens
KHLTNDTTTPESTMTSGQARA

SEQ ID NO: 5321 - protein, 26 aa, Homo sapiens
KEKRPVTRPDCMCDTFDQCAENISKK

SEQ ID NO: 5322 - protein, 24 aa, Homo sapiens
KDASINIENMQFIHNGTYICDVKN

SEQ ID NO: 5323 - protein, 12 aa, Homo sapiens
ILTLNCTLLLKT

SEQ ID NO: 5324 - protein, 16 aa, Homo sapiens
GNCTFIPGFTAMTEKF

SEQ ID NO: 5325 - protein, 22 aa, Homo sapiens
EGALRGPHGSLSAFLNASRVRE

SEQ ID NO: 5326 - protein, 17 aa, Homo sapiens
DDCVSIMNGTDEGVSAW

SEQ ID NO: 5327 - protein, 28 aa, Homo sapiens
MTLGSLGNSSSSVSATFLLSGIPGLERM

SEQ ID NO: 5328 - protein, 26 aa, Homo sapiens
YGGGGNYNDFGNHSGQQQSNYGPMKG

SEQ ID NO: 5329 - protein, 39 aa, Homo sapiens
RSQQVNNFTSNDVDMETDHYSNGVGETSSNGFLNGSSKH

SEQ ID NO: 5330 - protein, 25 aa, Homo sapiens
RQTHFSTRLHTAATEGLPNSSIKNQ

SEQ ID NO: 5331 - protein, 19 aa, Homo sapiens
RNDGNDSGTMLPEALNYIL

SEQ ID NO: 5332 - protein, 26 aa, Homo sapiens
RNARGAPMDPNESPAAPEAALPKAGK

SEQ ID NO: 5333 - protein, 28 aa, Homo sapiens
RNTTISLLTTDDAMVSIDPTMPANSERA

SEQ ID NO: 5334 - protein, 35 aa, Homo sapiens
RNHSLEPLSTFLTYMTCSYMIDNVILLMNGALQKK

SEQ ID NO: 5335 - protein, 22 aa, Homo sapiens
RKTLQDNQLCMEEAMNSSHDKK

SEQ ID NO: 5336 - protein, 34 aa, Homo sapiens
RHFTNDTILDVFFYNSPTYCQTIVDTVASEMNRI

SEQ ID NO: 5337 - protein, 25 aa, Homo sapiens
RFPSAMVVTDTSSISTLTNMSSSKQ

SEQ ID NO: 5338 - protein, 18 aa, Homo sapiens
RDNHSGGSRPPLLPPGGR

SEQ ID NO: 5339 - protein, 14 aa, Homo sapiens
QEKQIKPNLTKLRK

SEQ ID NO: 5340 - protein, 17 aa, Homo sapiens
PESADMFDNGSFLRRRK

SEQ ID NO: 5341 - protein, 33 aa, Homo sapiens
NLFQQQAAAAANNTASQQAASQAQPGQQQVLRA

SEQ ID NO: 5342 - protein, 26 aa, Homo sapiens
KVMPCLAPIAAKVGSVGHKMNLTGND

SEQ ID NO: 5343 - protein, 37 aa, Homo sapiens
KTSTECASSTENSFVVSSSSVSNTTVAGTPPYPTSRR

SEQ ID NO: 5344 - protein, 26 aa, Homo sapiens
KGKICMIVNISQCYLAYDETLNVLKF

SEQ ID NO: 5345 - protein, 16 aa, Homo sapiens
KEILYWFANSTQWTKA

SEQ ID NO: 5346 - protein, 23 aa, Homo sapiens
KAMKGFGTDEQAIVDVVANRSND

SEQ ID NO: 5347 - protein, 30 aa, Homo sapiens
GMMGVNSFSGQLAVNVSEASQATNQGFTRN

SEQ ID NO: 5348 - protein, 16 aa, Homo sapiens
GKSFSQLCNLTRHQRI

SEQ ID NO: 5349 - protein, 25 aa, Homo sapiens
DDDLLNVTLDSVNETGSTALSIARA

SEQ ID NO: 5350 - protein, 25 aa, Homo sapiens
MRKNESYLNQPAPPIPIPTLSLMGG

SEQ ID NO: 5351 - protein, 17 aa, Homo sapiens
VSFFCNNSYVLSGNEKR

SEQ ID NO: 5352 - protein, 30 aa, Homo sapiens
RNATHFPPVCPQNIHTAVPEVMLPVWFTAN

SEQ ID NO: 5353 - protein, 24 aa, Homo sapiens
KTTVSCTKIMSKNISIVDNEKCKY

SEQ ID NO: 5354 - protein, 23 aa, Homo sapiens
RYTCTAQTIVDNSSASADLVVRG

SEQ ID NO: 5355 - protein, 26 aa, Homo sapiens
RGLFPAVLNLASNALITTNATCGEKG

SEQ ID NO: 5356 - protein, 22 aa, Homo sapiens
KVVLIKNTLRSLEVLNLSSNKL

SEQ ID NO: 5357 - protein, 32 aa, Homo sapiens
KRLTPNYTLGANGYVFAIDLNGYVLLHPNLKP

SEQ ID NO: 5358 - protein, 18 aa, Homo sapiens
WNASTTILSLYDVSLSRL

SEQ ID NO: 5359 - protein, 24 aa, Homo sapiens
RARAMGINATFANIAGALAPLMMI

SEQ ID NO: 5360 - protein, 24 aa, Homo sapiens
KNRSIELVQQQNVQLSLTEATEKA

SEQ ID NO: 5361 - protein, 26 aa, Homo sapiens
KMVNHSLHPTEPVKVTLPDAFLPAQV

SEQ ID NO: 5362 - protein, 20 aa, Homo sapiens
KMGDLYYYGHQNQSQDLELS

SEQ ID NO: 5363 - protein, 20 aa, Homo sapiens
KEEEIFSLFNSSDTNLQGGK

SEQ ID NO: 5364 - protein, 22 aa, Homo sapiens
MDLWNLSWFLFLDALLVISGLV

SEQ ID NO: 5365 - protein, 385 aa, Homo sapiens
MHVCVCVCVCVYMPVCVDACMCCEAGRPAFRSFLFSLCSDLGAVISLLLWGRQLFALYSGNDVTDISDDRFPKPPEIANGYVEHLFRYQCKNYYRLRTEGDGVYTLNDKKQWINKAVGDKLPECEAVCGKPKNPANPVQRILGGHLDAKGSFPWQAKMVSHHNLTTGATLINEQWLLTTAKNLFLNHSENATAKDIAPTLTLYVGKKQLVEIEKVVLHPNYHQVDIGLIKLKQKVLVNERVMPICLPSKNYAEVGRVGYVSGWGQSDNFKLTDHLKYVMLPVADQYDCITHYEGSTCPKWKAPKSPVGVQPILNEHTFCVGMSKYQEDTCYGDAGSAFAVHDLEEDTWYAAGILSFDKSCAVAEYGVYVKVTSIQHWVQKTIAEN

SEQ ID NO: 5366 - protein, 416 aa, Homo sapiens
TALPEARPTKMSALGAVIALLLWGQLFAVDSGNDVTDIADDGCPKPPEIAHGYVEHSVRYQCKNYYKLRTEGDGVYTLNDKKQWINKAVGDKLPECEADDGCPKPPEIAHGYVEHSVRYQCKNYYKLRTEGDGVYTLNNEKQWINKAVGDKLPECEAVCGKPKNPANPVQRILGGHLDAKGSFPWQAKMVSHHNLTTGATLINEQWLLTTAKNLFLNHSENATAKDIAPTLTLYVGKKQLVEIEKVVLHPNYSQVDIGLIKLKQKVSVNERVMPICLPSKDYAEVGRVGYVSGWGRNANFKFTDHLKYVMLPVADQDQCIRHYEGSTVPEKKTPKSPVGVQPILNEHTFCAGMSKYQEDTCYGDAGSAFAVHDLEEDTWYATGILSFDKSCAVAEYGVYVKVTSIQDWVQKTIAEN

SEQ ID NO: 5367 - protein, 346 aa, Homo sapiens
SALGAVIALLLWGQLFAVDSGNDVTDIADDGCPKPPEIAHGYVEHSVRYQCKNYYKLRTEGDGVYTLNNEKQWINKAVGDKLPECEAVCGKPKNPANPVQRILGGHLDAKGSFPWQAKMVSHHNLTTGATLINEQWLLTTAKNLFLNHSENATAKDIAPTLTLYVGKKQLVEIEKVVLHPNYSQVDIGLIKLKQKVSVNERVMPICLPSKDYAEVGRVGYVSGWGRNANFKFTDHLKYVMLPVADQDQCIRHYEGSTVPEKKTPKSPVGVQPILNEHTFCAGMSKYQEDTCYGDAGSAFAVHDLEEDTWYATGILSFDKSCAVAEYGVYVKVTSIQDWVQKTIAEN

SEQ ID NO: 5368 - protein, 418 aa, Homo sapiens
MPSSVSWGILLLAGLCCLVPVSLAEDPQGDAAQKTDTSHHDQDHPTFNKITPNLAEFAFSLYRQLAHQSNSTNIFFSPVSIATAFAMLSLGTKADTHDEILEGLNFNLTEIPEAQIHEGFQELLRTLNQPDSQLQLTTGNGLFLSEGLKLVDKFLEDVKKLYHSEAFTVNFGDTEEAKKQINDYVEKGTQGKIVDLVKELDRDTVFALVNYIFFKGKWERPFEVKDTEEEDFHVDQVTTVKVPMMKRLGMFNIQHCKKLSSWVLLMKYLGNATAIFFLPDEGKLQHLENELTHDIITKFLENEDRRSASLHLPKLSITGTYDLKSVLGQLGITKVFSNGADLSGVTEEAPLKLSKAVHKAVLTIDEKGTEAAGAMFLEAIPMSIPPEVKFNKPFVFLMIEQNTKSPLFMGKVVNPTQK

SEQ ID NO: 5369 - protein, 498 aa, Homo sapiens
MKHLWFFLLLVAAPRWVLPQVQLQESGPGLVKPSQTLSLTCTVSGGSISSGGYYWSWIRQHPGKGLEWIGYIYYSGSTYYNPSLKSRVTISVDTSKNQFSLKLSSVTAADTAVYYCARDTMRGGTVSLCDAFDIWGQGTMVTVSSASPTSPKVFPLSLCSTQPDGNVVIACLVQGFFPQEPLSVTWSESGQGVTARNFPPSQDASGDLYTTSSQLTLPATQCLAGKSVTCHVKHYTNPSQDVTVPCPVPSTPPTPSPSTPPTPSPSCCHPRLSLHRPALEDLLLGSEANLTCTLTGLRDASGVTFTWTPSSGKSAVQGPPERDLCGCYSVSSVLPGCAEPWNHGKTFTCTAAYPESKTPLTATLSKSGNTFRPEVHLLPPPSEELALNELVTLTCLARGFSPKDVLVRWLQGSQELPREKYLTWASRQEPSQGTTTFAVTSILRVAAEDWKKGDTFSCMVGHEALPLAFTQKTIDRLAGKPTHVNVSVVMAEVDGTCY

SEQ ID NO: 5370 - protein, 496 aa, Homo sapiens
MKHLWFFLLLVAAPRWVLSQLQLQESGPGLVKSSETLSLTCTVSGGSISSSSYYWGWIRQPPGKGLEWIANTYYSGITYYNPSLKSRVTISVDTSKNQLSLKVRSVTAADTAVYFCARHGYSRSGRTGAIDYWGQGTLVTVSSASPTSPKVFPLSLCSTQPDGNVVIACLVQGFFPQEPLSVTWSESGQGVTARNFPPSQDASGDLYTTSSQLTLPATQCLAGKSVTCHVKHYTNPSQDVTVPCPVPSTPPTPSPSTPPTPSPSCCHPRLSLHRPALEDLLLGSEANLTCTLTGLRDASGVTFTWTPSSGKSAVQGPPERDLCGCYSVSSVLPGCAEPWNHGKTFTCTAAYPESKTPLTATLSKSGNTFRPEVHLLPPPSEELALNELVTLTCLARGFSPKDVLVRWLQGSQELPREKYLTWASRQEPSQGTTTFAVTSILRVAAEDWKKGDTFSCMVGHEALPLAFTQKTIDRLAGKPTHVNVSVVMAEVDGTCY

SEQ ID NO: 5371 - protein, 499 aa, Homo sapiens [sequence omitted]

SEQ ID NO: 5372 - protein, 497 aa, Homo sapiens [sequence omitted]

SEQ ID NO: 5373 - protein, 340 aa, Homo sapiens
ASPTSPKVFPLSLDSTPQDGNVVVACLVQGFFPQEPLSVTWSESGQNVTARNFPPSQDASGDLYTTSSQLTLPATQCPDGKSVTCHVKHYTNPSQDVTVPCPVPPPPPCCHPRLSLHRPALEDLLLGSEANLTCTLTGLRDASGATFTWTPSSGKSAVQGPPERDLCGCYSVSSVLPGCAQPWNHGETFTCTAAHPELKTPLTANITKSGNTFRPEVHLLPPPSEELALNELVTLTCLARGFSPKDVLVRWLQGSQELPREKYLTWASRQEPSQGTTTFAVTSILRVAAEDWKKGDTFSCMVGHEALPLAFTQKTIDRLAGKPTHVNVSVVMAEVDGTCY

SEQ ID NO: 5374 - protein, 494 aa, Homo sapiens [sequence omitted]

SEQ ID NO: 5375 - protein, 492 aa, Homo sapiens [sequence omitted]

SEQ ID NO: 5376 - protein, 496 aa, Homo sapiens [sequence omitted]

SEQ ID NO: 5377 - protein, 500 aa, Homo sapiens
MDWTWSILFLVAAATGAQSQVHLVQSGAEVMSPGASVRVSCKTSGYAFHTYSIIWVRQAPGQGLEWMGWISPSSDNTRFAKKFQGRVTLTTDTSTSTVYMELRSLRSDDTAVYYCARRYCSYSSCQNDYYYYYMDVWGKGTTVTVSSASPTSPKVFPLSLCSTQPDGNVVIACLVQGFFPQEPLSVTWSESGQGVTARNFPPSQDASGDLYTTSSQLTLPATQCLAGKSVTCHVKHYTNPSQDVTVPCPVPSTPPTPSPSTPPTPSPSCCHPRLSLHRPALEDLLLGSEANLTCTLTGLRDASGVTFTWTPSSGKSAVQGPPDRDLCGCYSVSSVLSGCAEPWNHGKTFTCTAAYPESKTPLTATLSKSGNTFRPEVHLLPPPSEELALNELVTLTCLARGFSPKDVLVRWLQGSQELPREKYLTWASRQEPSQGTTTFAVTSILRVAAEDWKKGDTFSCMVGHEALPLAFTQETIDRLAGKPTHVNVSVVMAEVDGTCY

SEQ ID NO: 5378 - protein, 478 aa, Homo sapiens
KHLWFFLLLVAAPRWVLSQVQLQESGPGLVKPSQTLSLTCTVSGGSIGSGDYFWSWIRQAPGRGLEWMGYIYYSGSTYYNPSLESRLSISIDTSKNQFSLRLNSLTAADTAVYFCARGVGLGTAFDIWGQGTVVTVSSASPTSPKVFPLSLDSTPQDGNVVVACLVQGFFPQEPLSVTWSESGQNVTARNFPPSQDASGDLYTTSSQLTLPATQCPDGKSVTCHVKHYTNPSQDVTVPCPVPPPPPCCHPRLSLHRPALEDLLLGSEANLTCTLTGLRDASGATFTWTPSSGKSAVQGPPERDLCGCYSVSSVLPGCAQPWNHGETFTCTAAHPELKTPLTANITKSGNTFRPEVHLLPPPSEELALNELVTLTCLARGFSPKDVLVRWLQGSQELPREKYLTWASRQEPSQGTTTFAVTSILRVAAEDWKKGDTFSCMVSHEALPLAFTQKTIDRLAGKPTHVNVSVVMAEVDGTCY

SEQ ID NO: 5379 - protein, 698 aa, Homo sapiens
MRLAVGALLVCAVLGLCLAVPDKTVRWCAVSEHEATKCQSFRDHMKSVIPSDGPSVACVKKASYLDCIRAIAANEADAVTLDAGLVYDAYLAPNNLKPVVAEFYGSKEDPQTFYYAVAVVKKDSGFQMNQLRGKKSCHTGLGRSAGWNIPIGLLYCDLPEPRKPLEKAVANFFSGSCAPCADGTDFPQLCQLCPGCGCSTLNQYFGYSGAFKCLKDGAGDVAFVKHSTIFENLANKADRDQYELLCLDNTRKPVDEYKDCHLAQVPSHTVVARSMGGKEDLIWELLNQAQEHFGKDKSKEFQLFSSPHGKDLLFKDSAHGFLKVPPRMDAKMYLGYEYVTAIRNLREGTCPEAPTDECKPVKWCALSHHERLKCDEWSVNSVGKIECVSAETTEDCIAKIMNGEADAMSLDGGFVYIAGKCGLVPVLAENYNKSDNCEDTPEAGYFAVAVVKKSASDLTWDNLKGKKSCHTAVGRTAGWNIPMGLLYNKINHCRFDEFFSEGCAPGSKKDSSLCKLCMGSGLNLCEPNNKEGYYGYTGAFRCLVEKGDVAFVKHQTVPQNTGGKNPDPWAKNLNEKDYELLCLDGTRKPVEEYANCHLARAPNHAVVTRKDKEACVHKILRQQQHLFGSNVTDCSGNFCLFRSETKDLLFRDDTVCLAKLHDRNTYEKYLGEEYVKAVGNLRKCSTSSLLEACTFRRP

SEQ ID NO: 5380 - protein, 1664 aa, Homo sapiens
MGPTSGPSLLLLLLTHLPLALGSPMYSIITPNILRLESEETMVLEAHDAQGDVPVTVTVHDFPGKKLVLSSEKTVLTPATNHMGNVTFTIPANREFKSEKGRNKFVTVQATFGTQVVEKVVLVSLQSGYLFIQTDKTIYTPGSTVLYRIFTVNHKLLPVGRTVMVNIENPEGIPVKQDSLSSQNQLGVLPLSWDIPELVNMGQWKIRAYYENSPQQVFSTEFEVKEYVLPSFEVIVEPTEKFYYIYNEKGLEVTITARFLYGKKVEGTAFVIFGIQDGEQRISLPESLKRIPIEDGSGEVVLSRKVLLDGVQNPRAEDLVGKSLYVSATVILHSGSDMVQAERSGIPIVTSPYQIHFTKTPKYFKPGMPFDLMVFVTNPDGSPAYRVPVAVQGEDTVQSLTQGDGVAKLSINTHPSQKPLSITVRTKKQELSEAEQATRTMQALPYSTVGNSNNYLHLSVLRTELRPGETLNVNFLLRMDRAHEAKIRYYTYLIMNKGRLLKAGRQVREPGQDLVVLPLSITTDFIPSFRLVAYYTLIGASGQREVVADSVWVDVKDSCVGSLVVKSGQSEDRQPVPGQQMTLKIEGDHGARVVLVAVDKGVFVLNKKNKLTQSKIWDVVEKADIGCTPGSGKDYAGVFSDAGLTFTSSSGQQTAQRAELQCPQPAARRRRSVQLTEKRMDKVGKYPKELRKCCEDGMRENPMRFSCQRRTRFISLGEACKKVFLDCCNYITELRRQHARASHLGLARSNLDEDIIAEENIVSRSEFPESWLWNVEDLKEPPKNGISTKLMNIFLKDSITTWEILAVSMSDKKGICVADPFEVTVMQDFFIDLRLPYSVVRNEQVEIRAVLYNYRQNQELKVRVELLHNPAFCSLATTKRRHQQTVTIPPKSSLSVPYVIVPLKTGLQEVEVKAAVYHHFISDGVRKSLKVVPEGIRMNKTVAVRTLDPERLGREGVQKEDIPPADLSDQVPDTESETRILLQGTPVAQMTEDAVDAERLKHLIVTPSGCGEQNMIGMTPTVIAVHYLDETEQWEKFGLEKRQGALELIKKGYTQQLAFRQPSSAFAAFVKRAPSTWLTAYVVKVFSLAVNLIAIDSQVLCGAVKWLILEKQKPDGVFQEDAPVIHQEMIGGLRNNNEKDMALTAFVLISLQEAKDICEEQVNSLPGSITKAGDFLEANYMNLQRSYTVAIAGYALAQMGRLKGPLLNKFLTTAKDKNRWEDPGKQLYNVEATSYALLALLQLKDFDFVPPVVRWLNEQRYYGGGYGSTQASTFMVFQALAQYQKDAPDHQELNLDVSLQLPSRSSKITHRIHWESASLLRSEETKENEGFTVTAEGKGQGTLSVVTMYHAKAKDQLTCNKFDLKVTIKPAPETEKRPQDAKNTMILEICTRYRGDQDATMSILDISMMTGFAPDTDDLKQLANGVDRYISKYELDKAFSDRNTLIIYLDKVSHSEDDCLAFKVHQYFNVELIQPGAVKVYAYYNLEESCTRFYHPEKEDGKLNKLCRDELCRCAEENCFIQKSDDKVTLEERLDKACEPGVDYVYKTRLVKVQLSNDFDEYIMAIEQTIKSGSDEVQVGQQRTFISPIKCREALKLEEKKHYLMWGLSSDFWGEKPNLSYIIGKDTWVEHWPEEDECQDEENQKQCQDLGAFTESMVVFGCPN

SEQ ID NO: 5381 - protein, 1474 aa, Homo sapiens
MGKNKLLHPSLVLLLLVLLPTDASVSGKPQYMVLVPSLLHTETTEKGCVLLSYLNETVTVSASLESVRGNRSLFTDLEAENDVLHCVAFAVPKSSSNEEVMFLTVQVKGPTQEFKKRTTVMVKNEDSLVFVQTDKSIYKPGQTVKFRVVSMDENFHPLNELIPLVYIQDPKGNRIAQWQSFQLEGGLKQFSFPLSSEPFQGSYKVVVQKKSGGRTEHPFTVEEFVLPKFEVQVTVPKIITILEEEMNVSVCGLYTYGKPVPGHVTVSICRKYSDASDCHGEDSQAFCEKFSGQLNSHGCFYQQVKTKVFQLKRKEYEMKLHTEAQIQEEGTVVELTGRQSSEITRTITKLSFVKVDSHFRQGIPFFGQVRLVDGKGVPIPNKVIFIRGNEANYYSNATTDEHGLVQFSINTTNVMGTSLTVRVNYKDRSPCYGYQWVSEEHEEAHHTAYLVFSPSKSFVHLEPMSHELPCGHTQTVQAHYILNGGTLLGLKKLSFYYLIMAKGGIVRTGTHGLLVKQEDMKGHFSISIPVKSDIAPVARLLIYAVLPTGDVIGDSAKYDVENCLANKVDLSFSPSQSLPASHAHLRVTAAPQSVCALRAVDQSVLLMKPDAELSASSVYNLLPEKDLTGFPGPLNDQDDEDCINRHNVYINGITYTPVSSTNEKDMYSFLEDMGLKAFTNSKIRKPKMCPQLQQYEMHGPEGLRVGFYESDVMGRGHARLVHVEEPHTETVRKYFPETWIWDLVVVNSAGVAEVGVTVPDTITEWKAGAFCLSEDAGLGISSTASLRAFQPFFVELTMPYSVIRGEAFTLKATVLNYLPKCIRVSVQLEASPAFLAVPVEKEQAPHCICANGRQTVSWAVTPKSLGNVNFTVSAEALESQELCGTEVPSVPEHGRKDTVIKPLLVEPEGLEKETTFNSLLCPSGGEVSEELSLKLPPNVVEESARASVSVLGDILGSAMQNTQNLLQMPYGCGEQNMVLFAPNIYVLDYLNETQQLTPEVKSKAIGYLNTGYQRQLNYKHYDGSYSTFGERYGRNQGNTWLTAFVLKTFAQARAYIFIDEAHITQALIWLSQRQKDNGCFRSSGSLLNNAIKGGVEDEVTLSAYITIALLEIPLTVTHPVVRNALFCLESAWKTAQEGDHGSHVYTKALLAYAFALAGNQDKRKEVLKSLNEEAVKKDNSVHWERPQKPKAPVGHFYEPQAPSAEVEMTSYVLLAYLTAQPAPTSEDLTSATNIVKWITKQQNAQGGFSSTQDTVVALHALSKYGAATFTRTGKAAQVTIQSSGTFSSKFQVDNNNRLLLQQVSLPELPGEYSMKVTGEGCVYLQTSLKYNILPEKEEFPFALGVQTLPQTCDEPKAHTSFQISLSVSYTGSRSASNMAIVDVKMVSGFIPLKPTVKMLERSNHVSRTEVSSNHVLIYLDKVSNQTLSLFFTVLQDVPVRDLKPAIVKVYDYYETDEFAIAEYNAPCSKDLGNA

SEQ ID NO: 5382 - protein, 201 aa, Homo sapiens
MALSWVLTVLSLLPLLEAQIPLCANLVPVPITNATLDQITGKWFYIASAFRNEEYNKSVQEIQATFFYFTPNKTEDTIFLREYQTRQDQCIYNTTYLNVQRENGTISRYVGGQEHFAHLLILRDTKTYMLAFDVNDEKNWGLSVYADKPETTKEQLGEFYEALDCLRIPKSDVVYTDWKKDKCEPLEKQHEKERKQEEGES

SEQ ID NO: 5383 - protein, 521 aa, Homo sapiens
MEFGLSWVLLVVFLQGVQCEVQLVDSGGGLVQPGGSLRLSCAASGFIVSDHYVEWVRQAPGKGPEWVGCFRSKAHKSTTEYAASVKGRFTILRDDSKNSVHLQMNSLKTDDTAVYYCVRDLEGAGKYDWYFDIWGRGILVTVSSASTKGPSVFPLAPCSRSTSGGTAALGCLVKDYFPEPVTVSWNSGALTSGVHTFPAVLQSSGLYSLSSVVTVPSSSLGTQTYTCNVNHKPSNTKVDKRVELKTPLGDTTHTCPRCPEPKSCDTPPPCPRCPEPKSCDTPPPCPRCPEPKSCDTPPPCPRCPAPELLGGPSVFLFPPKPKDTLMISRTPEVTCVVVDVSHEDPEVQFKWYVDGVEVHNAKTKPREEQFNSTFRVVSVLTVLHQDWLNGKEYKCKVSNKALPAPIEKTISKTKGQPREPQVYTLPPSREEMTKNQVSLTCLVKGFYPSDIAVEWESSGQPENNYNTTPPMLDSDGSFFLYSKLTVDKSRWQQGNIFSCSVMHEALHNRFTQKSLSLSPGK

SEQ ID NO: 5384 - protein, 509 aa, Homo sapiens
LWLWGREWAKVTQVAPARRTPNAREPRHWTLPGPSWIDKNQGASAPWAQLCPTPQSHGAISLAASTKGPSVFPLAPCSRSTSGGTAALGCLVKDYFPEPVTVSWNSGALTSGVHTFPAVLQSSGLYSLSSVVTVPSSSLGTQTYTCNVNHKPSNTKVDKRVELKTPLGDTTHTCPRCPEPKSCDTPPPCPRCPEPKSCDTPPPCPRCPEPKSCDTPPPCPRCPAPELLGGPSVFLFPPKPKDTLMISRTPEVTCVVVDVSHEDPEVQFKWYVDGVEVHNAKTKPREEQFNSTFRVVSVLTVLHQDWLNGKEYKCKVSNKALPAPIEKTISKTKGQPREPQVYTLPPSREEMTKNQVSLTCLVKGFYPSDIAVEWESSGQPENNYNTTPPMLDSDGSFFLYSKLTVDKSRWQQGNIFSCSVMHEALHNRFTQKSLSLSPELQLEESCAEAQDGELDGLWTTITIFITLFLLSVCYSATVTFFKVKWIFSSVVDLKQTIIPDYRNMIGQGA

SEQ ID NO: 5385 - protein, 420 aa, Homo sapiens
MLPLLALGLLAAGFCPAVLCHPNSPLDEENLTQENQDRGTHVDLGLASANVDFAFSLYKQLVLKAPDKNVIFSPLSISTALAFLSLGAHNTTLTEILKGLKFNLTETSEAEIHQSFQHLLRTLNQSSDELQLSMGNAMFVKEQLSLLDRFTEDAKRLYGSEAFATDFQDSAAAKKLINDYVKNGTRGKITDLIKDLDSQTMMVLVNYIFFKAKWEMPFDPQDTHQSRFYLSKKKWVMVPMMSLHHLTIPYFRDEELSCTVVELKYTGNASALFILPDQDKMEEVEAMLLPETLKRWRDSLEFREIGELYLPKFSISRDYNLNDILLQLGIEEAFTSKADLSGITGARNLAVSQVTHKAMMTLDERGSEAAAATSIQLTPGPRPDLDFPPTLGTEFSRPFLVMTFHTETGSMLFLEKIVNP

SEQ ID NO: 5386 - protein, 367 aa, Homo sapiens
MKSLVLLLCLAQLWGCHSAPHGPGLIYRQPNCDDPETEEAALVAIDYINQNLPWGYKHTLNQIDEVKVWPQQPSGELFEIEIDTLETTCHVLDPTPVARCSVRQLKEHAVEGDCDFQLLKLDGKFSVVYAKCDSSPDSAEDVRKVCQDCPLLAPLNDTRVVHAAKAALAAFNAQNNGSNFQLEEISRAQLVPLPPSTYVEFTVSGTDCVAKEATEAAKCNLLAEKQYGFCKATLSEKLGGAEVAVTCTVFQTQPVTSQPQPEGANEAVPTPVVDPDAPPSPPLGAPGLPPAGSPPDSHVLLAAPPGHQLHRAHYDLRHTFMGVVSLGSPSGEVSHPRKTRTVVQPSVGAAAGPVVPPCPGRIRHFKV

SEQ ID NO: 5387 - protein, 201 aa, Homo sapiens
MALSWVLTVLSLLPLLEAQIPLCANLVPVPITNATLDRITGKWFYIASAFRNEEYNKSVQEIQATFFYFTPNKTEDTIFLREYQTRQNQCFYNSSYLNVQRENGTVSRYEGGREHVAHLLFLRDTKTLMFGSYLDDEKNWGLSFYADKPETTKEQLGEFYEALDCLCIPRSDVMYTDWKKDKCEPLEKQHEKERKQEEGES

SEQ ID NO: 5388 - protein, 764 aa, Homo sapiens
MGSNLSPQLCLMPFILGLLSGGVTTTPWSLARPQGSCSLEGVEIKGGSFRLLQEGQALEYVCPSGFYPYPVQTRTCRSTGSWSTLKTQDQKTVRKAECRAIHCPRPHDFENGEYWPRSPYYNVSDEISFHCYDGYTLRGSANRTCQVNGRWSGQTAICDNGAGYCSNPGIPIGTRKVGSQYRLEDSVTYHCSRGLTLRGSQRRTCQEGGSWSGTEPSCQDSFMYDTPQEVAEAFLSSLTETIEGVDAEDGHGPGEQQKRKIVLDPSGSMNIYLVLDGSDSIGASNFTGAKKCLVNLIEKVASYGVKPRYGLVTYATYPKIWVKVSEADSSNADWVTKQLNEINYEDHKLKSGTNTKKALQAVYSMMSWPDDVPPEGWNRTRHVIILMTDGLHNMGGDPITVIDEIRDLLYIGKDRKNPREDYLDVYVFGVGPLVNQVNINALASKKDNEQHVFKVKDMENLEDVFYQMIDESQSLSLCGMVWEHRKGTDYHKQPWQAKISVIRPSKGHESCMGAVVSEYFVLTAAHCFTVDDKEHSIKVSVGGEKRDLEIEVVLFHPNYNINGKKEAGIPEFYDYDVALIKLKNKLKYGQTIRPICLPCTEGTTRALRLPPTTTCQQQKEELLPAQDIKALFVSEEEKKLTRKEVYIKNGDKKGSCERDAQYAPGYDKVKDISEVVTPRFLCTGGVSPYADPNTCRGDSGGPLIVHKRSRFIQVGVISWGVVDVCKNQKRQKQVPAHARDFHINLFQVLPWLKEKLQDEDLGFL

SEQ ID NO: 5389 - protein, 621 aa, Homo sapiens
MGSNLSPQLCLMPFILGLLSGGVTTTPWSLARPQGSCSLEGVEIKGGSFRLLQEGQALEYVCPSGFYPYPVQTRTCRSTGSWSTLKTQDQKTVRKAECRAIHCPRPHDFENGEYWPRSPYYNVSDEISFHCYDGYTLRGSANRTCQVNGRWSGQTAICDNGAGYCSNPGIPIGTRKVGSQYRLEDSVTYHCSRGLTLRGSQRRTCQEGGSWSGTEPSCQDSFMYDTPQEVAEAFLSSLTETIEGVDAEDGHGPGEQQKRKIVLDPSGSMNIYLVLDGSDSIGASNFTGAKKCLVNLIEKVASYGVKPRYGLVTYATYPKIWVKVSEADSSNADWVTKQLNEINYEDHKLKSGTNTKKALQAVYSMMSWPDDVPPEGWNRTRHVIILMTDGLHNMGGDPITVIDEIRDLLYIGKDRKNPREDYLDVYVFGVGPLVNQVNINALASKKDNEQHVFKVKDMENLEDVFYQMIDESQSLSLCGMVWEHRKGTDYHKQPWQAKISVIRPSKGHESCMGAVVSEYFVLTAAHCFTVDDKEHSIKVSVGKDATEGPGLHLCSPGNTSHFLQILHSTHPQCSPIPCTPDQSGMGEDVKLGMTRGQRQEAAHKEVVPTLLLQEGRSGTWR

SEQ ID NO: 5390 - protein, 566 aa, Homo sapiens
  VARIANT 505: Xaa = Any Amino Acid
MTERLLIKALSGGKNTKIITLNGKKMTKMPSALGKLPGLKTLVLQNNLIPKVCPELCNLTQLTTLNLGNNLLEEVPEEMKYLTSLKNLHLSGNRICRFAPGACGVPPSASHVAPTETFTYEWTVPKEVGPTNADPVCLAKMYYSAVDPTKDIFTGLIGPMKICKKGSLHANWRQKDVDKEFYLFPIVFNENEGLLLEDNIRMFTTAPDQVDKADEDFQESNKMHWTFNVDALQLADHYTGGMKQKYTVNQCRWQSEDSTFYLGERTYYIAAVEVEWDYSPQREWEKELHHLQEQNVSNAFLDKGEFYIGSKYKKVVYRQYTDCTFRIPVERKAEEEHLGILGLQLHADVGDKVKIIFKNMTTRPYSIHAHGVQTESSTFIPALPGETLTYLWKIPERSGAGTEDSACIPWAYYSTVDQVKDLYSGLIGPLIVCRRHYLKVFNPRKKLEFTLLFLVFDENESWYLDDNIKTNSDHPKKASQCTWEMKPMGDEIDLHTVHFHGHSFXYKHRGVYSSDVFDIFPGTYQTLEMFPRTPGIWLLHCHVTDHIHAGMETTYIVLQNEDTKSG

SEQ ID NO: 5391 - protein, 1065 aa, Homo sapiens
MKILILGIFLFLCSTPAWAKEKHYYIGIIETTWDYASDHGEKKLISVDTEHSNIYLQNGPDRIGRLYKKALYLQYTDETFRTTIEKPVWLGFLGPIIKAETGDKVYVHLKNLASRPYTFHSHGITYYKEHEGAIYPDNTTDFQRADDKVYPGEQYTYMLLATEEQSPGEGDGNCVTRIYHSHIDAPKDIASGLIGPLIICKKDSLDKEKEKHIDREFVVMFSVVDENFSWYLEDNIKTYCSEPEKVDKDNEDFQESNRMYSVNGYTFGSLPGLSMCAEDRVKWYLFGMGNEVDVHAAFFHGQALTNKNYRIDTINLFPATLFDAYMVAQNPGEWMLSCQNLNHLKAGLQAFFQVQECNKSSSKDNIRGKHVRHYYIAAEEIIWNYAPSGIDIFTKENLTAPGSDSAVFFEQGTTRIGGSYKKLVYREYTDASFTNRKERGPEEEHLGILGPVIWAEVGDTIRVTFHNKGAYPLSIEPIGVRFNKNNEGTYYSPNYNPQSRSVPPSASHVAPTETFTYEWTVPKEVGPTNADPVCLAKMYYSAVDPTKDIFTGLIGPMKICKKGSLHANGRQKDVDKEFYLFPTVFDENESLLLEDNIRMFTTAPDQVDKEDEDFQESNKMHSMNGFMYGNQPGLTMCKGDSVVWYLFSAGNEADVHGIYFSGNTYLWRGERRDTANLFPQTSLTLHMWPDTEGTFNVECLTTDHYTGGMKQKYTVNQCRRQSEDSTFYLGERTYYIAAVEVEWDYSPQREWEKELHHLQEQNVSNAFLDKGEFYIGSKYKKVVYRQYTDSTFRVPVERKAEEEHLGILGPQLHADVGDKVKIIFKNMATRPYSIHAHGVQTESSTVTPTLPGETLTYVWKIPERSGAGTEDSACIPWAYYSTVDQVKDLYSGLIGPLIVCRRPYLKVFNPRRKLEFALLFLVFDENESWYLDDNIKTYSDHPEKVNKDDEEFIESNKMHAINGRMFGNLQGLTMHVGDEVNWYLMGMGNEIDLHTVHFHGHSFQYKHRGVYSSDVFDIFPGTYQTLEMFPRTPGIWLLHCHVTDHIHAGMETTYTVLQNEDTKSG

SEQ ID NO: 5392 - protein, 644 aa, Homo sapiens
MKLITILFLCSRLLLSLTQESQSEEIDCNDKDLFKAVDAALKKYNSQNQSNNQFVLYRITEATKTVGSDTFYSFKYEIKEGDCPVQSGKTWQDCEYKDAAKAATGECTATVGKRSSTKFSVATQTCQITPAEGPVVTAQYDCLGCVHPISTQSPDLEPILRHGIQYFNNNTQHSSLFMLNEVKRAQRQVVAGLNFRITYSIVQTNCSKENFLFLTPDCKSLWNGDTGECTDNAYIDIQLRIASFSQNCDIYPGKDFVQPPTKICVGCPRDIPTNSPELEETLTHTITKLNAENNATFYFKIDNVKKARVQVVAGKKYFIDFVARETTCSKESNEELTESCETKKLGQSLDCNAEVYVVPWEKKIYPTVNCQPLGMISLMKRPPGFSPFRSSRIGEIKEETTVSPPHTSMAPAQDEERDSGKEQGHTRRHDWGHEKQRKHNLGHGHKHERDQGHGHQRGHGLGHGHEQQHGLGHGHKFKLDDDLEHQGGHVLDHGHKHKHGHGHGKHKNKGKKNGKHNGWKTEHLASSSEDSTTPSAQTQEKTEGPTPIPSLAKPGVTVTFSDFQDSDLIATMMPPISPAPIQSDDDWIPDIQTDPNGLSFNPISDFPDTTSPKCPGRPWKSVSEINPTTQMKESYYFDLTDGLS

SEQ ID NO: 5393 - protein, 427 aa, Homo sapiens
MKLITILFLCSRLLLSLTQESQSEEIDCNDKDLFKAVDAALKKYNSQNQSNNQFVLYRITEATKTVGSDTFYSFKYEIKEGDCPVQSGKTWQDCEYKDAAKAATGECTATVGKRSSTKFSVATQTCQITPAEGPVVTAQYDCLGCVHPISTQSPDLEPILRHGIQYFNNNTQHSSLFMLNEVKRAQRQVVAGLNFRITYSIVQTNCSKENFLFLTPDCKSLWNGDTGECTDNAYIDIQLRIASFSQNCDIYPGKDFVQPPTKICVGCPRDIPTNSPELEETLTHTITKLNAENNATFYFKIDNVKKARVQVVAGKKYFIDFVARETTCSKESNEELTESCETKKLGQSLDCNAEVYVVPWEKKIYPTVNCQPLGMISLMKRPPGFSPFRSSRIGEIKEETTSHLRSCEYKGRPPKAGAEPASEREVS

SEQ ID NO: 5394 - protein, 500 aa, Homo sapiens
MASRLTLLTLLLLLLAGDRASSNPNATSSSSQDPESLQDRGEGKVATTVISKMLFVEPILEVSSLPTTNSTTNSATKITANTTDEPTTQPTTEPTTQPTIQPTQPTTQLPTDSPTQPTTGSFCPGPVTLCSDLESHSTEAVLGDALVDFSLKLYHAFSAMKKVETNMAFSPFSIASLLTQVLLGAGENTKTNLESILSYPKDFTCVHQALKGFTTKGVTSVSQIFHSPDLAIRDTFVNASRTLYSSSPRVLSNNSDANLELINTWVAKNTNNKISRLLDSLPSDTRLVLLNAIYLSAKWKTTFDPKKTRMEPFHFKNSVIKVPMMNSKKYPVAHFIDQTLKAKVGQLQLSHNLSLVILVPQNLKHRLEDMEQALSPSVFKAIMEKLEMSKFQPTLLTLPRIKVTTSQDMLSIMEKLEFFDFSYDLNLCGLTEDPDLQVSAMQHQTVLELTETGVEAAAASAISVARTLLVFEVQQPFLFVLWDQQHKFPVFMGRVYDPRA

SEQ ID NO: 5395 - protein, 1744 aa, Homo sapiens
MRLLWGLIWASSFFTLSLQKPRLLLFSPSVVHLGVPLSVGVQLQDVPRGQVVKGSVFLRNPSRNNVPCSPKVDFTLSSERDFALLSLQVPLKDAKSCGLHQLLRGPEVQLVAHSPWLKDSLSRTTNIQGINLLFSSRRGHLFLQTDQPIYNPGQRVRYRVFALDQKMRPSTDTITVMVENSHGLRVRKKEVYMPSSIFQDDFVIPDISEPGTWKISARFSDGLESNSSTQFEVKKYVLPNFEVKITPGKPYILTVPGHLDEMQLDIQARYIYGKPVQGVAYVRFGLLDEDGKKTFFRGLESQTKLVNGQSHISLSKAEFQDALEKLNMGITDLQGLRLYVAAAIIESPGGEMEEAELTSWYFVSSPFSLDLSKTKRHLVPGAPFLLQALVREMSGSPASGIPVKVSATVSSPGSVPEVQDIQQNTDGSGQVSIPIIIPQTISELQLSVSAGSPHPAIARLTVAAPPSGGPGFLSIERPDSRPPRVGDTLNLNLRAVGSGATFSHYYYMILSRGQIVFMNREPKRTLTSVSVFVDHHLAPSFYFVAFYYHGDHPVANSLRVDVQAGACEGKLELSVDGAKQYRNGESVKLHLETDSLALVALGALDTALYAAGSKSHKPLNMGKVFEAMNSYDLGCGPGGGDSALQVFQAAGLAFSDGDQWTLSRKRLSCPKEKTTRKKRNVNFQKAINEKLGQYASPTAKRCCQDGVTRLPMMRSCEQRAARVQQPDCREPFLSCCQFAESLRKKSRDKGQAGLQRALEILQEEDLIDEDDIPVRSFFPENWLWRVETVDRFQILTLWLPDSLTTWEIHGLSLSKTKGLCVATPVQLRVFREFHLHLRLPMSVRRFEQLELRPVLYNYLDKNLTVSVHVSPVEGLCLAGGGGLAQQVLVPAGSARPVAFSVVPTAAAAVSLKVVARGSFEFPVGDAVSKVLQIEKEGAIHREELVYELNPLDHRGRTLEIPGNSDPNMIPDGDFNSYVRVTASDPLDTLGSEGALSPGGVASLLRLPRGCGEQTMIYLAPTLAASRYLDKTEQWSTLPPETKDHAVDLIQKGYMRIQQFRKADGSYAAWLSRDSSTWLTAFVLKVLSLAQEQVGGSPEKLQETSNWLLSQQQADGSFQDPCPVLDRSMQGGLVGNDETVALTAFVTIALHHGLAVFQDEGAEPLKQRVEASISKANSFLGEKASAGLLGAHAAAITAYALSLTKAPVDLLGVAHNNLMAMAQETGDNLYWGSVTGSQSNAVSPTPAPRNPSDPMPQAPALWIETTAYALLHLLLHEGKAEMADQASAWLTRQGSFQGGFRSTQDTVIALDALSAYWIASHTTEERGLNVTLSSTGRNGFKSHALQLNNRQIRGLEEELQFSLGSKINVKVGGNSKGTLKVLRTYNVLDMKNTTCQDLQIEVTVKGHVEYTMEANEDYEDYEYDELPAKDDPDAPLQPVTPLQLFEGRRNRRRREAPKVVEEQESRVHYTVCIWRNGKVGLSGMAIADVTLLSGFHALRADLEKLTSLSDRYVSHFETEGPHVLLYFDSVPTSRECVGFEAVQEVPVGLVQPASATLYDYYNPERRCSVFYGAPSKSRLLATLCSAEVCQCAEGKCPRQRRALERGLQDEDGYRMKFACYYPRVEYGFQVKVLREDSRAAFRLFETKITQVLHFTKDVKAAANQMRNFLVRASCRLRLEPGKEYLIMGLDGATYDLEGHPQYLLDSNSWIEEMPSERLCRSTRQRAACAQLNDFLQEYGTQGCQV

SEQ ID NO: 5396 - protein, 1741 aa, Homo sapiens
MRLLWGLIWASSFFTLSLQKPRLLLFSPSVVHLGVPLSVGVQLQDVPRGQVVKGSVFLRNPSRNNVPCSPKVDFTLSSERDFALLSLQVPLKDAKSCGLHQLLRGPEVQLVAHSPWLKDSLSRTTNIQGINLLFSSRRGHLFLQTDQPIYNPGQRVRYRVFALDQKMRPSTDTITVMVENSHGLRVRKKEVYMPSSIFQDDFVIPDISEPGTWKISARFSDGLESNSSTQFEVKKYVLPNFEVKITPGKPYILTVPGHLDEMQLDIQARYIYGKPVQGVAYVRFGLLDEDGKKTFFRGLESQTKLVNGQSHISLSKAEFQDALEKLNMGITDLQGLRLYVAAAIIESPGGEMEEAELTSWYFVSSPFSLDLSKTKRHLVPGAPFLLQALVREMSGSPASGIPVKVSATVSSPGSVPEAQDIQQNTDGSGQVSIPIIIPQTISELQLSVSAGSPHPAIARLTVAAPPSGGPGFLSIERPDSRPPRVGDTLNLNLRAVGSGATFSHYYYMILSRGQIVFMNREPKRTLTSVSVFVDHHLAPSFYFVAFYYHGDHPVANSLRVDVQAGACEGKLELSVDGAKQYRNGESVKLHLETDSLALVALGALDTALYAAGSKSHKPLNMGKVFEAMNSYDLGCGPGGGDSALQVFQAAGLAFSDGDQWTLSRKRLSCPKEKTTRKKRNVNFQKAINEKLGQYASPTAKRCCQDGVTRLPMMRSCEQRAARVQQPDCREPFLSCCQFAESLRKKSRDKGQAGLQRALEILQEEDLIDEDDIPVRSFFPENWLWRVETVDRFQILTLWLPDSLTTWEIHGLSLSKTKGLCVATPVQLRVFREFHLHLRLPMSVRRFEQLELRPVLYNYLDKNLTVSVHVSPVEGLCLAGGGGLAQQVLVPAGSARPVAFSVVPTAAAAVSLKVVARGSFEFPVGDAVSKVLQIEKEGAIHREELVYELNPLDHRGRTLEIPGNSDPNMIPDGDFNSYVRVTASDPLDTLGSEGALSPGGVASLLRLPRGCGEQTMIYLAPTLAASRYLDKTEQWSTLPPETKDHAVDLIQKGYMRIQQFRKADGSYAAWLSRDSSTWLTAFVLKVLSLAQEQVGGSPEKLQETSNWLLSQQQADGSFQDPCPVLDRSMQGGLVGNDETVALTAFVTIALHHGLAVFQDEGAEPLKQRVEASISKANSFLGEKASAGLLGAHAAAITAYALSLTKAPVDLLGVAHNNLMAMAQETGDNLYWGSVTGSQSNAVSPTPAPRNPSDPMPQAPALWIETTAYALLHLLLHEGKAEMADQASAWLTRQGSFQGGFRSTQDTVIALDALSAYWIASHTTEERGLNVTLSSTGRNGFKSHALQLNNRQIRGLEEELQFSLGSKINVKVGGNSKGTLKVLRTYNVLDMKNTTCQDLQIEVTVKGHVEYTMEANEDYEYDELPAKDDPDAPLQPVTPLQLFEGRRNRRRREAPKVVEEQESRVHYTVCIWRNGKVGLSGMAIADVTLLSGFHALRADLEKLTSLSDRYVSHFETEGPHVLLYFDSVPTSRECVGFEAVQEVPVGLVQPASATLYDYYNPERRCSVFYGAPSKSRLLATLCSAEVCQCAEGKCPRQRRALERGLQDEDGYRMKFACYYPRVEYGFQVKVLREDSRAAFRLFETKITQVLHFTKDVKAAANQMRNFLVRASCRLRLEPGKEYLIMGLDGATYDLEGHPQYLLDSNSWIEEMPSERLCRSTRQRAACAQLNDFLQEYGTQGCQV

SEQ ID NO: 5397 - protein, 464 aa, Homo sapiens
MYSNVIGTVTSGKRKVYLLSLLLIGFWDCVTCHGSPVDICTAKPRDIPMNPMCIYRSPEKKATEDEGSEQKIPEATNRRVWELSKANSRFATTFYQHLADSKNDNDNIFLSPLSISTAFAMTKLGACNDTLQQLMEVFKFDTISEKTSDQIHFFFAKLNCRLYRKANKSSKLVSANRLFGDKSLTFNETYQDISELVYGAKLQPLDFKENAEQSRAAINKWVSNKTEGRITDVIPSEAINELTVLVLVNTIYFKGLWKSKFSPENTRKELFYKADGESCSASMMYQEGKFRYRRVAEGTQVLELPFKGDDITMVLILPKPEKSLAKVEKELTPEVLQEWLDELEEMMLVVHMPRFRIEDGFSLKEQLQDMGLVDLFSPEKSKLPGIVAEGRDDLYVSDAFHKAFLEVNEEGSEAAASTAVVIAGRSLNPNRVTFKANRPFLVFIREVPLNTIIFMGRVANPCVK

SEQ ID NO: 5398 - protein, 433 aa, Homo sapiens
MERMLPLLALGLLAAGFCPAVLCHPNSPLDEENLTQENQDRGTHVDLGLASANVDFAFSLYKQLVLKALDKNVIFSPLSISTALAFLSLGAHNTTLTEILKASSSPHGDLLRQKFTQSFQHLRAPSISSSDELQLSMGNAMFVKEQLSLLDRFTEDAKRLYGSEAFATDFQDSAAAKKLINDYVKNGTRGKITDLIKDPDSQTMMVLVNYIFFKAKWEMPFDPQDTHQSRFYLSKKKWVMVPMMSLHHLTIPYFRDEELSCTVVELKYTGNASALFILPDQDKMEEVEAMLLPETLKRWRDSLEFREIGELYLPKFSISRDYNLNDILLQLGIEEAFTSKADLSGITGARNLAVSQVVHKVVSDVFEEGTEASAATAVKITLLSALVETRTIVRFNRPFLMIIVPTDTQNIFFMSKVTNPSKPRACIKQWGSQ

SEQ ID NO: 5399 - protein, 679 aa, Homo sapiens [sequence omitted]

SEQ ID NO: 5400 - protein, 330 aa, Homo sapiens [sequence omitted]

SEQ ID NO: 5401 - protein, 470 aa, Homo sapiens
MELGLSWVFLVVILEGVQCEVQLVESGGGLVQPGGSLRLSCVASGFTLNNYDMHWVRQGIGKGLEWVSKIGTAGDRYYAGSVKGRFTISRENAKDSLYLQMNSLRVGDAAVYYCARGAGRWAPLGAFDIWGQGTMVTVSSASTKGPSVFPLAPSSKSTSGGTAALGCLVKDYFPEPVTVSWNSGALTSGVHTFPAVLQSSGLYSLSSVVTVPSSSLGTQTYICNVNHKPSNTKVDKKVEPKSCDKTHTCPPCPAPELLGGPSVFLFPPKPKDTLMISRTPEVTCVVVDVSHEDPEVKFNWYVDGVEVHNAKTKPREEQYNSTYRVVSVLTVLHQDWLNGKEYKCKVSNKALPAPIEKTISKAKGQPREPQVYTLPPSRDELTKNQVSLTCLVKGFYPSDIAVEWESNGQPENNYKTTPPVLDSDGSFFLYSKLTVDKSRWQQGNVFSCSVMHEALHNHYTQKSLSLSPGK

SEQ ID NO: 5402 - protein, 482 aa, Homo sapiens [sequence omitted]

SEQ ID NO: 5403 - protein, 189 aa, Homo sapiens
MVMLLLLLSALAGLFGAAEGQAFHLGKCPNPPVQENFDVNKYLGRWYEIEKIPTTFENGRCIQANYSLMENGKIKVLNQELRADGTVNQIEGEATPVNLTEPAKLEVKFSWFMPSAPYWILATDYENYALVYSCTCIIQLFHVDFAWILARNPNLPPETVDSLKNILTSNNIDVKKMTVTDQVNCPKLS

SEQ ID NO: 5404 - protein, 462 aa, Homo sapiens
MARVLGAPVALGLWSLCWSLAIATPLPPTSAHGNVAEGETKPDPDVTERCSDGWSFDATTLDDNGTMLFFKGEFVWKSHKWDRELISERWKNFPSPVDAAFRQGHNSVFLIKGDKVWVYPPEKKEKGYPKLLQDEFPGIPSPLDAAVECHRGECQAEGVLFFQGDREWFWDLATGTMKERSWPAVGNCSSALRWLGRYYCFQGNQFLRFDPVRGEVPPRYPRDVRDYFMPCPGRGHGHRNGTGHGNSTHHGPEYMRCSPHLVLSALTSDNHGATYAFSGTHYWRLDTSRDGWHSWPIAHQWPQGPSAVDAAFSWEEKLYLVQGTQVYVFLTKGGYTLVSGYPKRLEKEVGTPHGIILDSVDAAFICPGSSRLHIMAGRRLWWLDLKSGAQATWTELPWPHEKVDGALCMEKSLGPNSCSANGPGLYLIHGPNLYCYSDVEKLNAAKALPQPQNVTSLLGCTH

SEQ ID NO: 5405 - protein, 930 aa, Homo sapiens [sequence omitted]

SEQ ID NO: 5406 - protein, 914 aa, Homo sapiens [sequence omitted]

SEQ ID NO: 5407 - protein, 1231 aa, Homo sapiens
MRLLAKIICLMLWAICVAEDCNELPPRRNTEILTGSWSDQTYPEGTQAIYKCRPGYRSLGNVIMVCRKGEWVALNPLRKCQKRPCGHPGDTPFGTFTLTGGNVFEYGVKAVYTCNEGYQLLGEINYRECDTDGWTNDIPICEVVKCLPVTAPENGKIVSSAMEPDREYHFGQAVRFVCNSGYKIEGDEEMHCSDDGFWSKEKPKCVEISCKSPDVINGSPISQKIIYKENERFQYKCNMGYEYSERGDAVCTESGWRPLPSCEEKSCDNPYIPNGDYSPLRIKHRTGDEITYQCRNGFYPATRGNTAKCTSTGWIPAPRCTLKPCDYPDIKHGGLYHENMRRPYFPVAVGKYYSYYCDEHFETPSGSYWDHIHCTQDGWSPAVPCLRKCYFPYLENGYNQNHGRKFVQGKSIDVACHPGYALPKAQTTVTCMENGWSPTPRCIRVKTCSKSSIDIENGFISESQYTYALKEKAKYQCKLGYVTADGETSGSIRCGKDGWSAQPTCIKSCDIPVFMNARTKNDFTWFKLNDTLDYECHDGYESNTGSTTGSIVCGYNGWSDLPICYERECELPKIDVHLVPDRKKDQYKVGEVLKFSCKPGFTIVGPNSVQCYHFGLSPDLPICKEQVQSCGPPPELLNGNVKEKTKEEYGHSEVVEYYCNPRFLMKGPNKIQCVDGEWTTLPVCIVEESTCGDIPELEHGWAQLSSPPYYYGDSVEFNCSESFTMIGHRSITCIHGVWTQLPQCVAIDKLKKCKSSNLIILEEHLKNKKEFDHNSNIRYRCRGKEGWIHTVCINGRWDPEVNCSMAQIQLCPPPPQIPNSHNMTTTLNYRDGEKVSVLCQENYLIQEGEEITCKDGRWQSIPLCVEKIPCSQPPQIEHGTINSSRSSQESYAHGTKLSYTCEGGFRISEENETTCYMGKWSSPPQCEGLPCKSPPEISHGVVAHMSDSYQYGEEVTYKCFEGFGIDGPAIAKCLGEKWSHPPSCIKTDCLSLPSFENAIPMGEKKDVYKAGEQVTYTCATYYKMDGASNVTCINSRWTGRPTCRDTSCVNPPTVQNAYIVSRQMSKYPSGERVRYQCRSPYEMFGDEEVMCLNGNWTEPPQCKDSTGKCGPPPPIDNGDITSFPLSVYAPASSVEYQCQNLYQLEGNKRITCRNGQWSEPPKCLHPCVISREIMENYNIALRWTAKQKLYSRTGESVEFVCKRGYRLSSRSHTLRTTCWDGKLEYPTCAKR

SEQ ID NO: 5408 - protein, 947 aa, Homo sapiens
MKRLTCFFICFFLSEVSGFEIPINGLSEFVDYEDLVELAPGKFQLVAENRRYQRSLPGESEEMMEEVDQVTLYSYKVQSTITSRMATTMIQSKVVNNSPQPQNVVFDVQIPKGAFISNFSMTVDGKTFRSSIKEKTVGRALYAQARAKGKTAGLVRSSALDMENFRTEVNVLPGAKVQFELHYQEVKWRKLGSYEHRIYLQPGRLAKHLEVDVWVIEPQGLRFLHVPDTFEGHFDGVPVISKGQQKAHVSFKPTVAQQRICPNCRETAVDGELVVLYDVKREEKAGELEVFNGYFVHFFAPDNLDPIPKNILFVIDVSGSMWGVKMKQTVEAMKTILDDLRAEDHFSVIDFNQNIRTWRNDLISATKTQVADAKRYIEKIQPSGGTNINEALLRAIFILNEANNLGLLDPNSVSLIILVSDGDPTVGKCELKLSKIQKNVKENIQDNISLFSLGMGFDVDYDFLKRLSNENHGIAQRIYGNQDTSSQLKKFYNQVSTPLLRNVQFNYPHTSVTDVTQNNFHNYFGGSEIVVAGKFDPAKLDQIESVITATSANTQLVLETLAQMDDLQDFLSKDKHADPDFTRKLWAYLTINQLLAERSLAPTAAAKRRITRSILQMSLDHHIVTPLTSLVIENEAGDERMLADAPPQDPSCCSGALYYGSKVVPDSTPSWANPSPTPVISMLAQGSQVLESTPPPHVMRVENDPHFIIYLPKSQKNICFNIDSEPGKILNLVSDPESGIVVNGQLVGAKKPNNGKLSTYFGKLGFYFQSEDIKIEISTETITLSHGSSTFSLSWSDTAQVTNQRQISVKKEKVVTITLDKEMSFSVLLHRVWKKHPVNVDFLGIYIPPTNKFSPKAHGLIGQFMQEPKIHIFNERPGKDPEKPEASMEVKGQKLIITRGLQKDYRTDLVFGTDVTCWFVHNSGKGFIDGHYKDYFVPQLYSFLKRP

SEQ ID NO: 5409 - protein, 495 aa, Homo sapiens [sequence omitted]

SEQ ID NO: 5410 - protein, 495 aa, Homo sapiens
MSMLVVFLLLWGVTWGPVTEAAIFYETQPSLWAESESLLKPLANVTLTCQAHLETPDFQLFKNGVAQEPVHLDSPAIKHQFLLTGDTQGRYRCRSGLSTGWTQLSKLLELTGPKSLPAPWLSMAPVSWITPGLKTTAVCRGVLRGVTFLLRREGDHEFLEVPEAQEDVEATFPVHQPGNYSCSYRTDGEGALSEPSATVTIEELAAPPPPVLMHHGESSQVLHPGNKVTLTCVAPLSGVDFQLRRGEKELLVPRSSTSPDRIFFHLNAVALGDGGHYTCRYRLHDNQNGWSGDSAPVELILSDETLPAPEFSPEPESGRALRLRCLAPLEGARFALVREDRGGRRVHRFQSPAGTEALFELHNISVADSANYSCVYVDLKPPFGGSAPSERLELHVDGPPPRPQLRATWSGAVLAGRDAVLRCEGPIPDVTFELLREGETKAVKTVRTPGAAANLELIFVGPQHAGNYRCRYRSWVPHTFESELSDPVELLVAES

SEQ ID NO: 5411 - protein, 260 aa, Homo sapiens [sequence omitted]

SEQ ID NO: 5412 - protein, 298 aa, Homo sapiens
MVRMVPVLLSLLLLLGPAVPQENQDGRYSLTYIYTGLSKHVEDVPAFQALGSLNDLQFFRYNSKDRKSQPMGLWRQVEGMEDWKQDSQLQKAREDIFMETLKDIVEYYNDSNGSHVLQGRFGCEIENNRSSGAFWKYYYDGKDYIEFNKEIPAWVPFDPAAQITKQKWEAEPVYVQRAKAYLEEECPATLRKYLKYSKNILDRQDPPSVVVTSHQAPGEKKKLKCLAYDFYPGKIDVHWTRAGEVQEPELRGDVLHNGNGTYQSWVVVAVPPQDTAPYSCHVQHSSLAQPLVVPWEAS

SEQ ID NO: 5413 - protein, 345 aa, Homo sapiens
MISPVLILFSSFLCHVAIAGRTCPKPDDLPFSTVVPLKTFYEPGEEITYSCKPGYVSRGGMRKFICPLTGLWPINTLKCTPRVCPFAGILENGAVRYTTFEYPNTISFSCNTGFYLNGADSAKCTEEGKWSPELPVCAPIICPPPSIPTFATLRVYKPSAGNNSLYRDTAVFECLPQHAMFGNDTITCTTHGNWTKLPECREVKCPFPSRPDNGFVNYPAKPTLYYKDKATFGCHDGYSLDGPEEIECTKLGNWSAMPSCKASCKVPVKKATVVYQGERVKIQEKFKNGMLHGDKVSFFCKNKEKKCSYTEDAQCIDGTIEVPKCFKEHSSLAFWKTDASDVKPC

SEQ ID NO: 5414 - protein, 476 aa, Homo sapiens
HNAASPGGARGHRVPLTEACKDSRIGGMMKTLLLFVGLLLTWESGQVLGDQTVSDNELQEMSNQGSKYVNKEIQNAVNGVKQIKTLIEKTNEERKTLLSNLEEAKKKKEDALNETRESETKLKELPGVCNETMMALWEECKPCLKQTCMKFYARVCRSGSGLVGRQLEEFLNQSSPFYFWMNGDRIDSLLENDRQQTHMLDVMQDHFSRASSIIDELFQDRFFTREPQDTYHYLPFSLPHRRPHFFFPKSRIVRSLMPFSPYEPLNFHAMFQPFLEMIHEAQQAMDIHFHSPAFQHPPTEFIREGDDDRTVCREIRHNSTGCLRMKDQCDKCREILSVDCSTNNPSQAKLRRELDESLQVAERLTRKYNELLKSYQWKMLNTSSLLEQLNEQFNWVSRLANLTQGEDQYYLRVTTVASHTSDSDVPSGVTEVVVKLFDSDPITVTVPVEVSRKNPKFMETVAEKALQEYRKKHREE

SEQ ID NO: 5415 - protein, 159 aa, Homo sapiens
MKNHLLFWGVLAVFIKAVHVKAQEDERIVLVDNKCKCARITSRIIRSSEDPNEDIVERNIRIIVPLNNRENISDPTSPLRTRFVYHLSDLCKKCDPTEVELDNQIVTATQSNICDEDSATETCYTYDRNKCYTAVVPLVYGGETKMVETALTPDACYPD

SEQ ID NO: 5416 - protein, 478 aa, Homo sapiens
MAPLRPLLILALLAWVALADQESCKGRCTEGFNVDKKCQCDELCSYYQSCCTDYTAECKPQVTRGDVFTMPEDEYTVYDDGEEKNNATVHEQVGGPSLTSDLQAQSKGNPEQTPVLKPEEEAPAPEVGASKPEGIDSRPETLHPGRPQPPAEEELCSGKPFDAFTDLKNGSLFAFRGQYCYELDEKAVRPGYPKLIRDVWGIEGPIDAAFTRINCQGKTYLFKGSQYWRFEDGVLDPDYPRNISDGFDGIPDNVDAALALPAHSYSGRERVYFFKGKQYWEYQFQHQPSQEECEGSSLSAVFEHFAMMQRDSWEDIFELLFWGRTSAGTRQPQFISRDWHGVPGQVDAAMAGRIYISGMAPRPSLAKKQRFRHRNRKGYRSQRGHSRGRNQNSRRPSRATWLSLFSSEESNLGANNYDDYRMDWLVPATCEPIQSVFFFSGDKYYRVNLRTRRVDTVDPPYPRSIAQYWLGCPAPGHL

SEQ ID NO: 5417 - protein, 245 aa, Homo sapiens
MEGPRGWLVLCVLAISLASMVTEDLCRAPDGKKGEAGRPGRRGRPGLKGEQGEPGAPGIRTGIQGLKGDQGEPGPSGNPGKVGYPGPSGPLGARGIPGIKGTKGSPGNIKDQPRPAFSAIRRNPPMGGNVVIFDTVITNQEEPYQNHSGRFVCTVPGYYYFTFQVLSQWEICLSIVSSSRGQVRRSLGFCDTTNKGLFQVVSGGMVLQLQQGDQVWVEKDPKKGHIYQGSEADSVFSGFLIFPSA

SEQ ID NO: 5418 - protein, 347 aa, Homo sapiens
MSSWSRQRPKSPGGIQPHVSRTLFLLLLLAASAWGVTLSPKDCQVFRSDHGSSISCQPPAEIPGYLPADTVHLAVEFFNLTHLPANLLQGASKLQELHLSSNGLESLSPEFLRPVPQLRVLDLTRNALTGLPPGLFQASATLDTLVLKENQLEVLEVSWLHGLKALGHLDLSGNRLRKLPPGLLANFTLLRTLDLGENQLETLPPDLLRGPLQLERLHLEGNKLQVLGKDLLLPQPDLRYLFLNGNKLARVAAGAFQGLRQLDMLDLSNNSLASVPEGLWASLGQPNWDMRDGFDISGNPWICDQNLSDLYRWLQAQKDKMFSQNDTRCAGPEAVKGQTLLAVAKSQ

SEQ ID NO: 5419 - protein, 338 aa, Homo sapiens
MSLSAFTLFLALIGGTSGQYYDYDFPLSIYGQSSPNCAPECNCPESYPSAMYCDELKLKSVPMVPPGIKYLYLRNNQIDHIDEKAFENVTDLQWLILDHNLLENSKIKGRVFSKLKQLKKLHINHNNLTESVGPLPKSLEDLQLTHNKITKLGSFEGLVNLTFIHLQHNRLKEDAVSAAFKGLKSLEYLDLSFNQIARLPSGLPVSLLTLYLDNNKISNIPDEYFKRFNALQYLRLSHNELADSGIPGNSFNVSSLVELDLSYNKLKNIPTVNENLENYYLEVNQLEKFDIKSFCKILGPLSYSKIKHLRLDGNRISETSLPPDMYECLRVANEVTLN

SEQ ID NO: 5420 - protein, 111 aa, Homo sapiens
DRASSNPNATSSSSQDPESLQDRGEGKVATTVISKMLFVEPILEVSSLPTTNSTTNSATKITANTTEAVLGDALVDFSLKLYHAFSAMKKVETNMAFSPFSIASLLTQVLL

SEQ ID NO: 5421 - protein, 616 aa, Homo sapiens
MKHLWFFLLLVAAPRWVLSQVQLQESGPGLVKPSETLSLTCTVSGGSISSYYWSWIRQPAGKGLEWIGRIYTSGSTNYNPSLKSRVTMSVDTSKNQFSLKLSSVTAADTAVYYCARDTVRGGTVSLCDAFDIWGQGTMVTVSSGSASAPTLFPLVSCENSPSDTSSVAVGCLAQDFLPDSITFSWKYKNNSDISSTRGFPSVLRGGKYAATSQVLLPSKDVMQGTDEHVVCKVQHPNGNKEKNVPLPVIAELPPKVSVFVPPRDGFFGNPRKSKLICQATGFSPRQIQVSWLREGKQVGSGVTTDQVQAEAKESGPTTYKVTSTLTIKESDWLSQSMFTCRVDHRGLTFQQNASSMCGPDQDTAIRVFAIPPSFASIFLTKSTKLTCLVTDLTTYDSVTISWTRQNGEAVKTHTNISESHPNATFSAVGEASICEDDWNSGERFTCTVTHTDLPSPLKQTISRPKGVALHRPDVYLLPPAREQLNLRESATITCLVTGFSPADVFVQWMQRGQPLSPEKYVTSAPMPEPQAPGRYFAHSILTVSEEEWNTGETYTCVVAHEALPNRVTERTVDKSTEGEVSADEEGFENLWATASTFIVLFLLSLFYSTTVTLFKV

SEQ ID NO: 5422 - protein, 597 aa, Homo sapiens
MEFGLSWLFLVAILKGVQCEVQLLESGGGLVQPGGSLRLSCAASGFSFSSYAMNWVRQAPGKGLEWVSAISGSGGSTYYADSVKGRFTISRDNSRDTLYLQMNSLRAEDTAVYYCAKDPRGYSASGNYTREDYWGQGTLVTVSSGSASAPTLFPLVSCENSPSDTSSVAVGCLAQDFLPDSITFSWKYKNNSDISSTRGFPSVLRGGKYAATSQVLLPSKDVMQGTDEHVVCKVQHPNGNKEKNVPLPVIAELPPKVSVFVPPRDGFFGNPRKSKLICQATGFSPRQIQVSWLREGKQVGSGVTTDQVQAEAKESGPTTYKVTSTLTIKESDWLSQSMFTCRVDHRGLTFQQNASSMCVPDQDTAIRVFAIPPSFASIFLTKSTKLTCLVTDLTTYDSVTISWTRQNGEAVKTHTNISESHPNATFSAVGEASICEDDWNSGERFTCTVTHTDLPSPLKQTISRPKGVALHRPDVYLLPPAREQLNLRESATITCLVTGFSPADVFVQWMQRGQPLSPEKYVTSAPMPEPQAPGRYFAHSILTVSEEEWNTGETYTCVVAHEALPNRVTERTVDKSTGKPTLYNVSLVMSDTAGTCY

SEQ ID NO: 5423 - protein, 614 aa, Homo sapiens [sequence omitted]

SEQ ID NO: 5424 - protein, 618 aa, Homo sapiens
MKHLWFFLLLVAAPRWVLSQVQLQQWGAGLLKPSETLSLTCGVYGGSFSGYYWSWIRQPPGKGLEWIGEINHSGSTNYNPSLKSRVTISVDTSKKQLSLKLSSVNAADTAVYYCARVITRASPGTDGRYGMDVWGQGTTVTVSSGSASAPTLFPLVSCENSPSDTSSVAVGCLAQDFLPDSITFSWKYKNNSDISSTRGFPSVLRGGKYAATSQVLLPSKDVMQGTDEHVVCKVQHPNGNKEKNVPLPVIAELPPKVSVFVPPRDGFFGNPRKSKLICQATGFSPRQIQVSWLREGKQVGSGVTTDQVQAEAKESGPTTYKVTSTLTIKESDWLSQSMFTCRVDHRGLTFQQNASSMCVPDQDTAIRVFAIPPSFASIFLTKSTKLTCLVTDLTTYDSVTISWTRQNGEAVKTHTNISESHPNATFSAVGEASICEDDWNSGERFTCTVTHTDLPSPLKQTISRPKGVALHRPDVYLLPPAREQLNLRESATITCLVTGFSPADVFVQWMQRGQPLSPEKYVTSAPMPEPQAPGRYFAHSILTVSEEEWNTGETYTCVVAHEALPNRVTERTVDKSTEGEVSADEEGFENLWATASTFIVLFLLSLFYSTTVTLFKVK

SEQ ID NO: 5425 - protein, 391 aa, Homo sapiens
DSPLEQSGHEVGILKETEAEDRIIKEEEARLSGRDMQVTSQPVIAELPPKVSVFVPPRDGFFGNPRKSKLICQATGFSPRQIEVSWLREGKQVGSGVTTDEVEAEAKESGPTTYKVTSTLTIKESDWLGQSMFTCRVDHRGLTFQQNASSMCGPDQDTAIRVFAIPPSFASIFLTKSTKLTCLVTDLTTYDSVTISWTRQDGEAVKTHTNISESHPNATFSAVGEASICEDDWDSGERFTCTVTHTDLPSPLKQTISRPKGVALHRPDVYLLPPAREQLNLRESATITCLVTGFSPADVFVQWMQRGQPLSPEKYVTSAPMPEPQAPGRYFAHSILTVSEEEWNTGETYTCVVAHEALPNRVTERTVDKSTGKPTLYNVSLVMSDTAGTCY

SEQ ID NO: 5426 - protein, 525 aa, Homo sapiens
MKALIAALLLITLQYSCAVSPTDCSAVEPEAEKALDLINKRRRDGYLFQLLRIADAHLDRVENTTVYYLVLDVQESDCSVLSRKYWNDCEPPDSRRPSEIVIGQCKVIATRHSHESQDLRVIDFNCTTSSVSSALANTKDSPVLIDFFEDTERYRKQANKALEKYKEENDDFASFRVDRIERVARVRGGEGTGYFVDFSVRNCPRHHFPRHPNVFGFCRADLFYDVEALDLESPKNLVINCEVFDPQEHENINGVPPHLGHPFHWGGHERSSTTKPPFKPHGSRDHHHPHKPHEHGPPPPPDERDHSHGPPLPQGPPPLLPMSCSSCQHATFGTNGAQRHSHNNNSSDLHPHKHHSHEQHPHGHHPHAHHPHEHDTHRQHPHGHHPHGHHPHGHHPHGHHPHGHHPHCHDFQDYGPCDPPPHNQGHCCHGHGPPPGHLRRRGPGKGPRPFHCRQIGSVYRLPPLRKGEVLPLPEANFPSFPLPHHKHPLKPDNQPFPQSVSESCPGKFKSGFPQVSMFFTHTFPK

SEQ ID NO: 5427 - protein, 355 aa, Homo sapiens [sequence omitted]

SEQ ID NO: 5428 - protein, 911 aa, Homo sapiens
MDGAMGPRGLLLCMYLVSLLILQAMPALGSATGRSKSSEKRQAVDTAVDGVFIRSLKVNCKVTSRFAHYVVTSQVVNTANEAREVAFDLEIPKTAFISDFAVTADGNAFIGDIKDKVTAWKQYRKAAISGENAGLVRASGRTMEQFTIHLTVNPQSKVTFQLTYEEVLKRNHMQYEIVIKVKPKQLVHHFEIDVDIFEPQGISKLDAQASFLPKELAAQTIKKSFSGKKGHVLFRPTVSQQQSCPTCSTSLLNGHFKVTYDVSRDKICDLLVANNHFAHFFAPQNLTNMNKNVVFVIDISGSMRGQKVKQTKEALLKILGDMQPGDYFDLVLFGTRVQSWKGSLVQASEANLQAAQDFVRGFSLDEATNLNGGLLRGIEILNQVQESLPELSNHASILIMLTDGDPTEGVTDRSQILKNVRNAIRGRFPLYNLGFGHNVDFNFLEVMSMENNGRAQRIYEDHDATQQLQGFYSQVAKPLLVDVDLQYPQDAVLALTQNHHKQYYEGSEIVVAGRIADNKQSSFKADVQAHGEGQEFSITCLVDEEEMKKLLRERGHMLENHVERLWAYLTIQELLAKRMKVDREERANLSSQALQMSLDYGFVTPLTSMSIRGMADQDGLKPTIDKPSEDSPPLEMLGPRRTFVLSALQPSPTHSSSNTQRLPDRVTGVDTDPHFIIHVPQKEDTLCFNINEEPGVILSLVQDPNTGFSVNGQLIGNKARSPGQHDGTYFGRLGIANPATDFQLEVTPQNITLNPGFGGPVFSWRDQAVLRQDGVVVTINKKRNLVVSVDDGGTFEVVLHRVWKGSSVHQDFLGFYVLDSHRMSARTHGLLGQFFHPIGFEVSDIHPGSDPTKPDATMVVRNRRLTVTRGLQKDYSKDPWHGAEVSCWFIHNNGAGLIDGAYTDYIVPDIF

SEQ ID NO: 5429 - protein, 427 aa, Homo sapiens
MHLIDYLLLLLVGLLALSHGQLHVEHDGESCSNSSHQQILETGEGSPSLKIAPANADFAFRFYYLIASETPGKNIFFSPLSISAAYAMLSLGACSHSRSQILEGLGFNLTELSESDVHRGFQHLLHTLNLPGHGLETRVGSALFLSHNLKFLAKFLNDTMAVYEAKLFHTNFYDTVGTIQLINDHVKKETRGKIVDLVSELKKDVLMVLVNYIYFKALWEKPFISSRTTPKDFYVDENTTVRVPMMLQDQEHHWYLHDRYLPCSVLRMDYKGDATVFFILPNQGKMREIEEVLTPEMLMRWNNLLRKRNFYKKLELHLPKFSISGSYVLDQILPRLGFTDLFSKWADLSGITKQQKLEASKSFHKATLDVDEAGTEAAAATSFAIKFFSAQTNRHILRFNRPFLVVIFSTSTQSVLFLGKVVDPTKP

SEQ ID NO: 5430 - protein, 445 aa, Homo sapiens
SHPGGPLQDRLCRLRVQRMHLIDYLLLLLVGLLALSHGQLHVEHDGESCSNSSHQQILETGEGSPSLKIAPANADFAFRFYYLIASETPGKNIFFSPLSISAAYAMLSLGACSHSRSQILEGLGFNLTELSESDVHRGFQHLLHTLNLPGHGLETRVGSALFLSHNLKFLAKFLNDTMAVYEAKLFHTNFYDTVGTIQLINDHVKKETRGKIVDLVSELKKDVLMVLVNYIYFKALWEKPFISSRTTPKDFYVDENTTVRVPMMLQDQEHHWYLHDRYLPCSVLRMDYKGDATVFFILPNQGKMREIEEVLTPEMLMRWNNLLRKRNFYKKLELHLPKFSISGSYVLDQILPRLGFTDLFSKWADLSGITKQQKLEASKSFHKATLDVDEAGTEAAAATSFAIKFFSAQTNRHILRFNRPFLVVIFSTSTQSVLFLGKVVDPTKP

SEQ ID NO: 5431 - protein, 414 aa, Homo sapiens
LLLVGLLALSHGQLHVEHDGESCSNSSHQQILETGEGSPSLKIAPANADFAFRFYYLIASETPGKNIFFSPLSISAAYAMLSLGACSHSRSQILEGLGFNLTELSESDVHRGFQHLLHTLNLPGHGLETRVGSALFLSHNLKFLAKFLNDTMAVYEAKLFHTNFYDTVGTIQLINDHVKKETRGKIVDLVSELKKDVLMVLVNYIYFKAKWETSFNHKGTQEQDFYVTSETVVRVPMMSREDQYHYLLDRNLSCRVVGVPYQGNATALFILPSEGKMQQVENGLSEKTLRKWLKMFKKRQLELYLPKFSIEGSYQLEKVLPSLGISNVFTSHADLSGISNHSNIQVSEVVHKAVLDVFEEGTEASAATAVKITLLSALVETRTIVRFNRPFLMIIVPTDTQNIFFMSKVTNPKQ

SEQ ID NO: 5432 - protein, 2446 aa, Homo sapiens
MLRGPGPGLLLLAVQCLGTAVPSTGASKSKRQAQQMVQPQSPVAVSQSKPGCYDNGKHYQINQQWERTYLGNALVCTCYGGSRGFNCESKPEAEETCFDKYTGNTYRVGDTYERPKDSMIWDCTCIGAGRGRISCTIANRCHEGGQSYKIGDTWRRPHETGGYMLECVCLGNGKGEWTCKPIAEKCFDHAAGTSYVVGETWEKPYQGWMMVDCTCLGEGSGRITCTSRNRCNDQDTRTSYRIGDTWSKKDNRGNLLQCICTGNGRGEWKCERHTSVQTTSSGSGPFTDVRAAVYQPQPHPQPPPYGHCVTDSGVVYSVGMQWLKTQGNKQMLCTCLGNGVSCQETAVTQTYGGNSNGEPCVLPFTYNGRTFYSCTTEGRQDGHLWCSTTSNYEQDQKYSFCTDHTVLVQTQGGNSNGALCHFPFLYNNHNYTDCTSEGRRDNMKWCGTTQNYDADQKFGFCPMAAHEEICTTNEGVMYRIGDQWDKQHDMGHMMRCTCVGNGRGEWTCIAYSQLRDQCIVDDITYNVNDTFHKRHEEGHMLNCTCFGQGRGRWKCDPVDQCQDSETGTFYQIGDSWEKYVHGVRYQCYCYGRGIGEWHCQPLQTYPSSSGPVEVFITETPSQPNSHPIQWNAPQPSHISKYILRWRPKNSVGRWKEATIPGHLNSYTIKGLKPGVVYEGQLISIQQYGHQEVTRFDFTTTSTSTPVTSNTVTGETTPFSPLVATSESVTEITASSFVVSWVSASDTVSGFRVEYELSEEGDEPQYLDLPSTATSVNIPDLLPGRKYIVNVYQISEDGEQSLILSTSQTTAPDAPPDPTVDQVDDTSIVVRWSRPQAPITGYRIVYSPSVEGSSTELNLPETANSVTLSDLQPGVQYNITIYAVEENQESTPVVIQQETTGTPRSDTVPSPRDLQFVEVTDVKVTIMWTPPESAVTGYRVDVIPVNLPGEHGQRLPISRNTFAEVTGLSPGVTYYFKVFAVSHGRESKPLTAQQTTKLDAPTNLQFVNETDSTVLVRWTPPRAQITGYRLTVGLTRRGQPRQYNVGPSVSKYPLRNLQPASEYTVSLVAIKGNQESPKATGVFTTLQPGSSIPPYNTEVTETTIVITWTPAPRIGFKLGVRPSQGGEAPREVTSDSGSIVVSGLTPGVEYVYTIQVLRDGQERDAPIVNKVVTPLSPPTNLHLEANPDTGVLTVSWERSTTPDITGYRITTTPTNGQQGNSLEEVVHADQSSCTFDNLSPGLEYNVSVYTVKDDKESVPISDTIIPEVPQLTDLSFVDITDSSIGLRWTPLNSSTIIGYRITVVAAGEGIPIFEDFVDSSVGYYTVTGLEPGIDYDISVITLINGGESAPTTLTQQTAVPPPTDLRFTNIGPDTMRVTWAPPPSIDLTNFLVRYSPVKNEEDVAELSISPSDNAVVLTNLLPGTEYVVSVSSVYEQHESTPLRGRQKTGLDSPTGIDFSDITANSFTVHWIAPRATITGYRIRHHPEHFSGRPREDRVPHSRNSITLTNLTPGTEYVVSIVALNGREESPLLIGQQSTVSDVPRDLEVVAATPTSLLISWDAPAVTVRYYRITYGETGGNSPVQEFTVPGSKSTATISGLKPGVDYTITVYAVTGRGDSPASSKPISINYRTEIDKPSQMQVTDVQDNSISVKWLPSSSPVTGYRVTTTPKNGPGPTKTKTAGPDQTEMTIEGLQPTVEYVVSVYAQNPSGESQPLVQTAVTNIDRPKGLAFTDVDVDSIKIAWESPQGQVSRYRVTYSSPEDGIHELFPAPDGEEDTAELQGLRPGSEYTVSVVALHDDMESQPLIGTQSTAIPAPTDLKFTQVTPTSLSAQWTPPNVQLTGYRVRVTPKEKTGPMKEINLAPDSSSVVVSGLMVATKYEVSVYALKDTLTSRPAQGVVTTLENVSPPRRARVTDATETTITISWRTKTETITGFQVDAVPANGQTPIQRTIKPDVRSYTITGLQPGTDYKIYLYTLNDNARSSPVVIDASTAIDAPSNLRFLATTPNSLLVSWQPPRARITGYIIKYEKPGSPPREVVPRPRPGVTEATITGLEPGTEYTIYVIALKNNQKSEPLIGRKKTDELPQLVTLPHPNLHGPEILDVPSTVQKTPFVTHPGYDTGNGIQLPGTSGQQPSVGQQMIFEEHGFRRTTPPTTATPIRHRPRPYPPNVGQEALSQTTISWAPFQDTSEYIISCHPVGTDEEPLQFRVPGTSTSATLTGLTRGATYNIIVEALKDQQRHKVREEVVTVGNSVNEGLNQPTDDSCFDPYTVSHYAVGDEWERMSESGFKLLCQCLGFGSGHFRCDSSRWCHDNGVNYKIGEKWDRQGENGQMMSCTCLGNGKGEFKCDPHEATCYDDGKTYHVGEQWQKEYLGAICSCTCFGGQRGWRCDNCRRPGGEPSPEGTTGQSYNQYSQRYHQRTNTNVNCPIECFMPLDVQADREDSRE

SEQ ID NO: 5433 - protein, 2386 aa, Homo sapiens
MLRGPGPGLLLLAVQCLGTAVPSTGASKSKRQAQQMVQPQSPVAVSQSKPGCYDNGKHYQINQQWERTYLGNALVCTCYGGSRGFNCESKPEAEETCFDKYTGNTYRVGDTYERPKDSMIWDCTCIGAGRGRISCTIANRCHEGGQSYKIGDTWRRPHETGGYMLECVCLGNGKGEWTCKPIAEKCFDHAAGTSYVVGETWEKPYQGWMMVDCTCLGEGSGRITCTSRNRCNDQDTRTSYRIGDTWSKKDNRGNLLQCICTGNGRGEWKCERHTSVQTTSSGSGPFTDVRAAVYQPQPHPQPPPYGHCVTDSGVVYSVGMQWLKTQGNKQMLCTCLGNGVSCQETAVTQTYGGNSNGEPCVLPFTYNGRTFYSCTTEGRQDGHLWCSTTSNYEQDQKYSFCTDHTVLVQTQGGNSNGALCHFPFLYNNHNYTDCTSEGRRDNMKWCGTTQNYDADQKFGFCPMAAHEEICTTNEGVMYRIGDQWDKQHDMGHMMRCTCVGNGRGEWTCIAYSQLRDQCIVDDITYNVNDTFHKRHEEGHMLNCTCFGQGRGRWKCDPVDQCQDSETGTFYQIGDSWEKYVHGVRYQCYCYGRGIGEWHCQPLQTYPSSSGPVEVFITETPSQPNSHPIQWNAPQPSHISKYILRWRPKNSVGRWKEATIPGHLNSYTIKGLKPGVVYEGQLISIQQYGHQEVTRFDFTTTSTSTPVTSNTVTGETTPFSPLVATSESVTEITASSFVVSWVSASDTVSGFRVEYELSEEGDEPQYLDLPSTATSVNIPDLLPGRKYIVNVYQISEDGEQSLILSTSQTTAPDAPPDPTVDQVDDTSIVVRWSRPQAPITGYRIVYSPSVEGSSTELNLPETANSVTLSDLQPGVQYNITIYAVEENQESTPVVIQQETTGTPRSDTVPSPRDLQFVEVTDVKVTIMWTPPESAVTGYRVDVIPVNLPGEHGQRLPISRNTFAEVTGLSPGVTYYFKVFAVSHGRESKPLTAQQTTKLDAPTNLQFVNETDSTVLVRWTPPRAQITGYRLTVGLTRRGQPRQYNVGPSVSKYPLRNLQPASEYTVSLVAIKGNQESPKATGVFTTLQPGSSIPPYNTEVTETTIVITWTPAPRIGFKLGVRPSQGGEAPREVTSDSGSIVVSGLTPGVEYVYTIQVLRDGQERDAPIVNKVVTPLSPPTNLHLEANPDTGVLTVSWERSTTPDITGYRITTTPTNGQQGNSLEEVVHADQSSCTFDNLSPGLEYNVSVYTVKDDKESVPISDTIIPEVPQLTDLSFVDITDSSIGLRWTPLNSSTIIGYRITVVAAGEGIPIFEDFVDSSVGYYTVTGLEPGIDYDISVITLINGGESAPTTLTQQTAVPPPTDLRFSDITANSFTVHWIAPRATITGYRIRHHPEHFSGRPREDRVPHSRNSITLTNLTPGTEYVVSIVALNGREESPLLIGQQSTVSDVPRDLEVVAATPTSLLISWDAPAVTVRYYRITYGETGGNSPVQEFTVPGSKSTATISGLKPGVDYTITVYAVTGRGDSPASSKPISINYRTEIDKPSQMQVTDVQDNSISVKWLPSSSPVTGYRVTTTPKNGPGPTKTKTAGPDQTEMTIEGLQPTVEYVVSVYAQNPSGESQPLVQTAVTNIDRPKGLAFTDVDVDSIKIAWESPQGQVSRYRVTYSSPEDGIHELFPAPDGEEDTAELQGLRPGSEYTVSVVALHDDMESQPLIGTQSTAIPAPTDLKFTQVTPTSLSAQWTPPNVQLTGYRVRVTPKEKTGPMKEINLAPDSSSVVVSGLMVATKYEVSVYALKDTLTSRPAQGVVTTLENVSPPRRARVTDATETTITISWRTKTETITGFQVDAVPANGQTPIQRTIKPDVRSYTITGLQPGTDYKIYLYTLNDNARSSPVVIDASTAIDAPSNLRFLATTPNSLLVSWQPPRARITGYIIKYEKPGSPPREVVPRPRPGVTEATITGLEPGTEYTIYVIALKNNQKSEPLIGRKKTDELPQLVTLPHPNLHGPEILDVPSTVQKTPFVTHPGYDTGNGIQLPGTSGQQPSVGQQMIFEEHGFRRTTPPTTATPIRHRPRPYPPNVGEEIQIGHIPREDVDYHLYPHGPGLNPNASTGQEALSQTTISWAPFQDTSEYIISCHPVGTDEEPLQFRVPGTSTSATLTGLTRGATYNIIVEALKDQQRHKVREEVVTVGNSVNEGLNQPTDDSCFDPYTVSHYAVGDEWERMSESGFKLLCQCLGFGSGHFRCDSSRWCHDNGVNYKIGEKWDRQGENGQMMSCTCLGNGKGEFKCDPHEATCYDDGKTYHVGEQWQKEYLGAICSCTCFGGQRGWRCDNCRRPGGEPSPEGTTGQSYNQYSQRYHQRTNTNVNCPIECFMPLDVQADREDSRE

SEQ ID NO: 5434 - protein, 2240 aa, Homo sapiens
MLRGPGPGLLLLAVQCLGTAVPSTGASKSKRQAQQMVQPQSPVAVSQSKPGCYDNGKHYQINQQWERTYLGNALVCTCYGGSRGFNCESKPEAEETCFDKYTGNTYRVGDTYERPKDSMIWDCTCIGAGRGRISCTIANRCHEGGQSYKIGDTWRRPHETGGYMLECVCLGNGKGEWTCKPIAEKCFDHAAGTSYVVGETWEKPYQGWMMVDCTCLGEGSGRITCTSRNRCNDQDTRTSYRIGDTWSKKDNRGNLLQCICTGNGRGEWKCERHTSVQTTSSGSGPFTDVRAAVYQPQPHPQPPPYGHCVTDSGVVYSVGMQWLKTQGNKQMLCTCLGNGVSCQETAVTQTYGGNSNGEPCVLPFTYNGRTFYSCTTEGRQDGHLWCSTTSNYEQDQKYSFCTDHTVLVQTQGGNSNGALCHFPFLYNNHNYTDCTSEGRRDNMKWCGTTQNYDADQKFGFCPMAAHEEICTTNEGVMYRIGDQWDKQHDMGHMMRCTCVGNGRGEWTCIAYSQLRDQCIVDDITYNVNDTFHKRHEEGHMLNCTCFGQGRGRWKCDPVDQCQDSETGTFYQIGDSWEKYVHGVRYQCYCYGRGIGEWHCQPLQTYPSSSGPVEVFITETPSQPNSHPIQWNAPQPSHISKYILRWRPKNSVGRWKEATIPGHLNSYTIKGLKPGVVYEGQLISIQQYGHQEVTRFDFTTTSTSTPVTSNTVTGETTPFSPLVATSESVTEITASSFVVSWVSASDTVSGFRVEYELSEEGDEPQYLDLPSTATSVNIPDLLPGRKYIVNVYQISEDGEQSLILSTSQTTAPDAPPDPTVDQVDDTSIVVRWSRPQAPITGYRIVYSPSVEGSSTELNLPETANSVTLSDLQPGVQYNITIYAVEENQESTPVVIQQETTGTPRSDTVPSPRDLQFVEVTDVKVTIMWTPPESAVTGYRVDVIPVNLPGEHGQRLPISRNTFAEVTGLSPGVTYYFKVFAVSHGRESKPLTAQQTTKLDAPTNLQFVNETDSTVLVRWTPPRAQITGYRLTVGLTRRGQPRQYNVGPSVSKYPLRNLQPASEYTVSLVAIKGNQESPKATGVFTTLQPGSSIPPYNTEVTETTIVITWTPAPRIGFKLGVRPSQGGEAPREVTSDSGSIVVSGLTPGVEYVYTIQVLRDGQERDAPIVNKVVTPLSPPTNLHLEANPDTGVLTVSWERSTTPDITGYRITTTPTNGQQGNSLEEVVHADQSSCTFDNLSPGLEYNVSVYTVKDDKESVPISDTIIPAVPPPTDLRFTNIGPDTMRVTWAPPPSIDLTNFLVRYSPVKNEEDVAELSISPSDNAVVLTNLLPGTEYVVSVSSVYEQHESTPLRGRQKTGLDSPTGIDFSDITANSFTVHWIAPRATITGYRIRHHPEHFSGRPREDRVPHSRNSITLTNLTPGTEYVVSIVALNGREESPLLIGQQSTVSDVPRDLEVVAATPTSLLISWDAPAVTVRYYRITYGETGGNSPVQEFTVPGSKSTATISGLKPGVDYTITVYAVTGRGDSPASSKPISINYRTEIDKPSQMQVTDVQDNSISVKWLPSSSPVTGYRVTTTPKNGPGPTKTKTAGPDQTEMTIEGLQPTVEYVVSVYAQNPSGESQPLVQTAVTTIPAPTDLKFTQVTPTSLSAQWTPPNVQLTGYRVRVTPKEKTGPMKEINLAPDSSSVVVSGLMVATKYEVSVYALKDTLTSRPAQGVVTTLENVSPPRRARVTDATETTITISWRTKTETITGFQVDAVPANGQTPIQRTIKPDVRSYTITGLQPGTDYKIYLYTLNDNARSSPVVIDASTAIDAPSNLRFLATTPNSLLVSWQPPRARITGYIIKYEKPGSPPREVVPRPRPGVTEATITGLEPGTEYTIYVIALKNNQKSEPLIGRKKTVQKTPFVTHPGYDTGNGIQLPGTSGQQPSVGQQMIFEEHGFRRTTPPTTATPIRHRPRPYPPNVGQEALSQTTISWAPFQDTSEYIISCHPVGTDEEPLQFRVPGTSTSATLTGLTRGATYNIIVEALKDQQRHKVREEVVTVGNSVNEGLNQPTDDSCFDPYTVSHYAVGDEWERMSESGFKLLCQCLGFGSGHFRCDSSRWCHDNGVNYKIGEKWDRQGENGQMMSCTCLGNGKGEFKCDPHEATCYDDGKTYHVGEQWQKEYLGAICSCTCFGGQRGWRCDNCRRPGGEPSPEGTTGQSYNQYSQRYHQRTNTNVNCPIECFMPLDVQADREDSRE

SEQ ID NO: 5435 - protein, 2031 aa, Homo sapiens
MLRGPGPGLLLLAVQCLGTAVPSTGASKSKRQAQQMVQPQSPVAVSQSKPGCYDNGKHYQINQQWERTYLGNALVCTCYGGSRGFNCESKPEAEETCFDKYTGNTYRVGDTYERPKDSMIWDCTCIGAGRGRISCTIANRCHEGGQSYKIGDTWRRPHETGGYMLECVCLGNGKGEWTCKPIAEKCFDHAAGTSYVVGETWEKPYQGWMMVDCTCLGEGSGRITCTSRNRCNDQDTRTSYRIGDTWSKKDNRGNLLQCICTGNGRGEWKCERHTSVQTTSSGSGPFTDVRAAVYQPQPHPQPPPYGHCVTDSGVVYSVGMQWLKTQGNKQMLCTCLGNGVSCQETAVTQTYGGNSNGEPCVLPFTYNGRTFYSCTTEGRQDGHLWCSTTSNYEQDQKYSFCTDHTVLVQTQGGNSNGALCHFPFLYNNHNYTDCTSEGRRDNMKWCGTTQNYDADQKFGFCPMAAHEEICTTNEGVMYRIGDQWDKQHDMGHMMRCTCVGNGRGEWTCIAYSQLRDQCIVDDITYNVNDTFHKRHEEGHMLNCTCFGQGRGRWKCDPVDQCQDSETGTFYQIGDSWEKYVHGVRYQCYCYGRGIGEWHCQPLQTYPSSSGPVEVFITETPSQPNSHPIQWNAPQPSHISKYILRWRPKNSVGRWKEATIPGHLNSYTIKGLKPGVVYEGQLISIQQYGHQEVTRFDFTTTSTSTPVTSNTVTGETTPFSPLVATSESVTEITASSFVVSWVSASDTVSGFRVEYELSEEGDEPQYLDLPSTATSVNIPDLLPGRKYIVNVYQISEDGEQSLILSTSQTTAPDAPPDPTVDQVDDTSIVVRWSRPQAPITGYRIVYSPSVEGSSTELNLPETANSVTLSDLQPGVQYNITIYAVEENQESTPVVIQQETTGTPRSDTVPSPRDLQFVEVTDVKVTIMWTPPESAVTGYRVDVIPVNLPGEHGQRLPISRNTFAEVTGLSPGVTYYFKVFAVSHGRESKPLTAQQTTKLDAPTNLQFVNETDSTVLVRWTPPRAQITGYRLTVGLTRRGQPRQYNVGPSVSKYPLRNLQPASEYTVSLVAIKGNQESPKATGVFTTLQPGSSIPPYNTEVTETTIVITWTPAPRIGFKLGVRPSQGGEAPREVTSDSGSIVVSGLTPGVEYVYTIQVLRDGQERDAPIVNKVVTPLSPPTNLHLEANPDTGVLTVSWERSTTPDITGYRITTTPTNGQQGNSLEEVVHADQSSCTFDNLSPGLEYNVSVYTVKDDKESVPISDTIIPAVPPPTDLRFTNIGPDTMRVTWAPPPSIDLTNFLVRYSPVKNEEDVAELSISPSDNAVVLTNLLPGTEYVVSVSSVYEQHESTPLRGRQKTGLDSPTGIDFSDITANSFTVHWIAPRATITGYRIRHHPEHFSGRPREDRVPHSRNSITLTNLTPGTEYVVSIVALNGREESPLLIGQQSTVSDVPRDLEVVAATPTSLLISWDAPAVTVRYYRITYGETGGNSPVQEFTVPGSKSTATISGLKPGVDYTITVYAVTGRGDSPASSKPISINYRTEIDKPSQMQVTDVQDNSISVKWLPSSSPVTGYRVTTTPKNGPGPTKTKTAGPDQTEMTIEGLQPTVEYVVSVYAQNPSGESQPLVQTAVTNIDRPKGLAFTDVDVDSIKIAWESPQGQVSRYRVTYSSPEDGIHELFPAPDGEEDTAELQGLRPGSEYTVSVVALHDDMESQPLIGTQSTAIPAPTDLKFTQVTPTSLSAQWTPPNVQLTGYRVRVTPKEKTGPMKEINLAPDSSSVVVSGLMVATKYEVSVYALKDTLTSRPAQGVVTTLENVSPPRRARVTDATETTITISWRTKTETITGFQVDAVPANGQTPIQRTIKPDVRSYTITGLQPGTDYKIYLYTLNDNARSSPVVIDASTAIDAPSNLRFLATTPNSLLVSWQPPRARITGYIIKYEKPGSPPREVVPRPRPGVTEATITGLEPGTEYTIYVIALKNNQKSEPLIGRKKTGQEALSQTTISWAPFQDTSEYIISCHPVGTDEEPLQSTKA

SEQ ID NO: 5436 - protein, 2296 aa, Homo sapiens
MLRGPGPGLLLLAVQCLGTAVPSTGASKSKRQAQQMVQPQSPVAVSQSKPGCYDNGKHYQINQQWERTYLGNALVCTCYGGSRGFNCESKPEAEETCFDKYTGNTYRVGDTYERPKDSMIWDCTCIGAGRGRISCTIANRCHEGGQSYKIGDTWRRPHETGGYMLECVCLGNGKGEWTCKPIAEKCFDHAAGTSYVVGETWEKPYQGWMMVDCTCLGEGSGRITCTSRNRCNDQDTRTSYRIGDTWSKKDNRGNLLQCICTGNGRGEWKCERHTSVQTTSSGSGPFTDVRAAVYQPQPHPQPPPYGHCVTDSGVVYSVGMQWLKTQGNKQMLCTCLGNGVSCQETAVTQTYGGNSNGEPCVLPFTYNGRTFYSCTTEGRQDGHLWCSTTSNYEQDQKYSFCTDHTVLVQTQGGNSNGALCHFPFLYNNHNYTDCTSEGRRDNMKWCGTTQNYDADQKFGFCPMAAHEEICTTNEGVMYRIGDQWDKQHDMGHMMRCTCVGNGRGEWTCIAYSQLRDQCIVDDITYNVNDTFHKRHEEGHMLNCTCFGQGRGRWKCDPVDQCQDSETGTFYQIGDSWEKYVHGVRYQCYCYGRGIGEWHCQPLQTYPSSSGPVEVFITETPSQPNSHPIQWNAPQPSHISKYILRWRPKNSVGRWKEATIPGHLNSYTIKGLKPGVVYEGQLISIQQYGHQEVTRFDFTTTSTSTPVTSNTVTGETTPFSPLVATSESVTEITASSFVVSWVSASDTVSGFRVEYELSEEGDEPQYLDLPSTATSVNIPDLLPGRKYIVNVYQISEDGEQSLILSTSQTTAPDAPPDPTVDQVDDTSIVVRWSRPQAPITGYRIVYSPSVEGSSTELNLPETANSVTLSDLQPGVQYNITIYAVEENQESTPVVIQQETTGTPRSDTVPSPRDLQFVEVTDVKVTIMWTPPESAVTGYRVDVIPVNLPGEHGQRLPISRNTFAEVTGLSPGVTYYFKVFAVSHGRESKPLTAQQTTKLDAPTNLQFVNETDSTVLVRWTPPRAQITGYRLTVGLTRRGQPRQYNVGPSVSKYPLRNLQPASEYTVSLVAIKGNQESPKATGVFTTLQPGSSIPPYNTEVTETTIVITWTPAPRIGFKLGVRPSQGGEAPREVTSDSGSIVVSGLTPGVEYVYTIQVLRDGQERDAPIVNKVVTPLSPPTNLHLEANPDTGVLTVSWERSTTPDITGYRITTTPTNGQQGNSLEEVVHADQSSCTFDNLSPGLEYNVSVYTVKDDKESVPISDTIIPAVPPPTDLRFTNIGPDTMRVTWAPPPSIDLTNFLVRYSPVKNEEDVAELSISPSDNAVVLTNLLPGTEYVVSVSSVYEQHESTPLRGRQKTGLDSPTGIDFSDITANSFTVHWIAPRATITGYRIRHHPEHFSGRPREDRVPHSRNSITLTNLTPGTEYVVSIVALNGREESPLLIGQQSTVSDVPRDLEVVAATPTSLLISWDAPAVTVRYYRITYGETGGNSPVQEFTVPGSKSTATISGLKPGVDYTITVYAVTGRGDSPASSKPISINYRTEIDKPSQMQVTDVQDNSISVKWLPSSSPVTGYRVTTTPKNGPGPTKTKTAGPDQTEMTIEGLQPTVEYVVSVYAQNPSGESQPLVQTAVTTIPAPTDLKFTQVTPTSLSAQWTPPNVQLTGYRVRVTPKEKTGPMKEINLAPDSSSVVVSGLMVATKYEVSVYALKDTLTSRPAQGVVTTLENVSPPRRARVTDATETTITISWRTKTETITGFQVDAVPANGQTPIQRTIKPDVRSYTITGLQPGTDYKIYLYTLNDNARSSPVVIDASTAIDAPSNLRFLATTPNSLLVSWQPPRARITGYIIKYEKPGSPPREVVPRPRPGVTEATITGLEPGTEYTIYVIALKNNQKSEPLIGRKKTDELPQLVTLPHPNLHGPEILDVPSTVQKTPFVTHPGYDTGNGIQLPGTSGQQPSVGQQMIFEEHGFRRTTPPTTATPIRHRPRPYPPNVGEEIQIGHIPREDVDYHLYPHGPGLNPNASTGQEALSQTTISWAPFQDTSEYIISCHPVGTDEEPLQFRVPGTSTSATLTGLTRGATYNIIVEALKDQQRHKVREEVVTVGNSVNEGLNQPTDDSCFDPYTVSHYAVGDEWERMSESGFKLLCQCLGFGSGHFRCDSSRWCHDNGVNYKIGEKWDRQGENGQMMSCTCLGNGKGEFKCDPHEATCYDDGKTYHVGEQWQKEYLGAICSCTCFGGQRGWRCDNCRRPGGEPSPEGTTGQSYNQYSQRYHQRTNTNVNCPIECFMPLDVQADREDSRE

SEQ ID NO: 5437 - protein, 2176 aa, Homo sapiens
MLRGPGPGLLLLAVQCLGTAVPSTGASKSKRQAQQMVQPQSPVAVSQSKPGCYDNGKHYQINQQWERTYLGNALVCTCYGGSRGFNCESKPEAEETCFDKYTGNTYRVGDTYERPKDSMIWDCTCIGAGRGRISCTIANRCHEGGQSYKIGDTWRRPHETGGYMLECVCLGNGKGEWTCKPIAEKCFDHAAGTSYVVGETWEKPYQGWMMVDCTCLGEGSGRITCTSRNRCNDQDTRTSYRIGDTWSKKDNRGNLLQCICTGNGRGEWKCERHTSVQTTSSGSGPFTDVRAAVYQPQPHPQPPPYGHCVTDSGVVYSVGMQWLKTQGNKQMLCTCLGNGVSCQETAVTQTYGGNSNGEPCVLPFTYNGRTFYSCTTEGRQDGHLWCSTTSNYEQDQKYSFCTDHTVLVQTQGGNSNGALCHFPFLYNNHNYTDCTSEGRRDNMKWCGTTQNYDADQKFGFCPMAAHEEICTTNEGVMYRIGDQWDKQHDMGHMMRCTCVGNGRGEWTCIAYSQLRDQCIVDDITYNVNDTFHKRHEEGHMLNCTCFGQGRGRWKCDPVDQCQDSETGTFYQIGDSWEKYVHGVRYQCYCYGRGIGEWHCQPLQTYPSSSGPVEVFITETPSQPNSHPIQWNAPQPSHISKYILRWRPKNSVGRWKEATIPGHLNSYTIKGLKPGVVYEGQLISIQQYGHQEVTRFDFTTTSTSTPVTSNTVTGETTPFSPLVATSESVTEITASSFVVSWVSASDTVSGFRVEYELSEEGDEPQYLDLPSTATSVNIPDLLPGRKYIVNVYQISEDGEQSLILSTSQTTAPDAPPDPTVDQVDDTSIVVRWSRPQAPITGYRIVYSPSVEGSSTELNLPETANSVTLSDLQPGVQYNITIYAVEENQESTPVVIQQETTGTPRSDTVPSPRDLQFVEVTDVKVTIMWTPPESAVTGYRVDVIPVNLPGEHGQRLPISRNTFAEVTGLSPGVTYYFKVFAVSHGRESKPLTAQQTTKLDAPTNLQFVNETDSTVLVRWTPPRAQITGYRLTVGLTRRGQPRQYNVGPSVSKYPLRNLQPASEYTVSLVAIKGNQESPKATGVFTTLQPGSSIPPYNTEVTETTIVITWTPAPRIGFKLGVRPSQGGEAPREVTSDSGSIVVSGLTPGVEYVYTIQVLRDGQERDAPIVNKVVTPLSPPTNLHLEANPDTGVLTVSWERSTTPDITGYRITTTPTNGQQGNSLEEVVHADQSSCTFDNLSPGLEYNVSVYTVKDDKESVPISDTIIPAVPPPTDLRFTNIGPDTMRVTWAPPPSIDLTNFLVRYSPVKNEEDVAELSISPSDNAVVLTNLLPGTEYVVSVSSVYEQHESTPLRGRQKTGLDSPTGIDFSDITANSFTVHWIAPRATITGYRIRHHPEHFSGRPREDRVPHSRNSITLTNLTPGTEYVVSIVALNGREESPLLIGQQSTVSDVPRDLEVVAATPTSLLISWDAPAVTVRYYRITYGETGGNSPVQEFTVPGSKSTATISGLKPGVDYTITVYAVTGRGDSPASSKPISINYRTEIDKPSQMQVTDVQDNSISVKWLPSSSPVTGYRVTTTPKNGPGPTKTKTAGPDQTEMTIEGLQPTVEYVVSVYAQNPSGESQPLVQTAVTTIPAPTDLKFTQVTPTSLSAQWTPPNVQLTGYRVRVTPKEKTGPMKEINLAPDSSSVVVSGLMVATKYEVSVYALKDTLTSRPAQGVVTTLENVSPPRRARVTDATETTITISWRTKTETITGFQVDAVPANGQTPIQRTIKPDVRSYTITGLQPGTDYKIYLYTLNDNARSSPVVIDASTAIDAPSNLRFLATTPNSLLVSWQPPRARITGYIIKYEKPGSPPREVVPRPRPGVTEATITGLEPGTEYTIYVIALKNNQKSEPLIGRKKTGQEALSQTTISWAPFQDTSEYIISCHPVGTDEEPLQFRVPGTSTSATLTGLTRGATYNIIVEALKDQQRHKVREEVVTVGNSVNEGLNQPTDDSCFDPYTVSHYAVGDEWERMSESGFKLLCQCLGFGSGHFRCDSSRWCHDNGVNYKIGEKWDRQGENGQMMSCTCLGNGKGEFKCDPHEATCYDDGKTYHVGEQWQKEYLGAICSCTCFGGQRGWRCDNCRRPGGEPSPEGTTGQSYNQYSQRYHQRTNTNVNCPIECFMPLDVQADREDSRE

SEQ ID NO: 5438 - protein, 2355 aa, Homo sapiens
MLRGPGPGLLLLAVQCLGTAVPSTGASKSKRQAQQMVQPQSPVAVSQSKPGCYDNGKHYQINQQWERTYLGNALVCTCYGGSRGFNCESKPEAEETCFDKYTGNTYRVGDTYERPKDSMIWDCTCIGAGRGRISCTIANRCHEGGQSYKIGDTWRRPHETGGYMLECVCLGNGKGEWTCKPIAEKCFDHAAGTSYVVGETWEKPYQGWMMVDCTCLGEGSGRITCTSRNRCNDQDTRTSYRIGDTWSKKDNRGNLLQCICTGNGRGEWKCERHTSVQTTSSGSGPFTDVRAAVYQPQPHPQPPPYGHCVTDSGVVYSVGMQWLKTQGNKQMLCTCLGNGVSCQETAVTQTYGGNSNGEPCVLPFTYNGRTFYSCTTEGRQDGHLWCSTTSNYEQDQKYSFCTDHTVLVQTQGGNSNGALCHFPFLYNNHNYTDCTSEGRRDNMKWCGTTQNYDADQKFGFCPMAAHEEICTTNEGVMYRIGDQWDKQHDMGHMMRCTCVGNGRGEWTCIAYSQLRDQCIVDDITYNVNDTFHKRHEEGHMLNCTCFGQGRGRWKCDPVDQCQDSETGTFYQIGDSWEKYVHGVRYQCYCYGRGIGEWHCQPLQTYPSSSGPVEVFITETPSQPNSHPIQWNAPQPSHISKYILRWRPKNSVGRWKEATIPGHLNSYTIKGLKPGVVYEGQLISIQQYGHQEVTRFDFTTTSTSTPVTSNTVTGETTPFSPLVATSESVTEITASSFVVSWVSASDTVSGFRVEYELSEEGDEPQYLDLPSTATSVNIPDLLPGRKYIVNVYQISEDGEQSLILSTSQTTAPDAPPDPTVDQVDDTSIVVRWSRPQAPITGYRIVYSPSVEGSSTELNLPETANSVTLSDLQPGVQYNITIYAVEENQESTPVVIQQETTGTPRSDTVPSPRDLQFVEVTDVKVTIMWTPPESAVTGYRVDVIPVNLPGEHGQRLPISRNTFAEVTGLSPGVTYYFKVFAVSHGRESKPLTAQQTTKLDAPTNLQFVNETDSTVLVRWTPPRAQITGYRLTVGLTRRGQPRQYNVGPSVSKYPLRNLQPASEYTVSLVAIKGNQESPKATGVFTTLQPGSSIPPYNTEVTETTIVITWTPAPRIGFKLGVRPSQGGEAPREVTSDSGSIVVSGLTPGVEYVYTIQVLRDGQERDAPIVNKVVTPLSPPTNLHLEANPDTGVLTVSWERSTTPDITGYRITTTPTNGQQGNSLEEVVHADQSSCTFDNLSPGLEYNVSVYTVKDDKESVPISDTIIPAVPPPTDLRFTNIGPDTMRVTWAPPPSIDLTNFLVRYSPVKNEEDVAELSISPSDNAVVLTNLLPGTEYVVSVSSVYEQHESTPLRGRQKTGLDSPTGIDFSDITANSFTVHWIAPRATITGYRIRHHPEHFSGRPREDRVPHSRNSITLTNLTPGTEYVVSIVALNGREESPLLIGQQSTVSDVPRDLEVVAATPTSLLISWDAPAVTVRYYRITYGETGGNSPVQEFTVPGSKSTATISGLKPGVDYTITVYAVTGRGDSPASSKPISINYRTEIDKPSQMQVTDVQDNSISVKWLPSSSPVTGYRVTTTPKNGPGPTKTKTAGPDQTEMTIEGLQPTVEYVVSVYAQNPSGESQPLVQTAVTNIDRPKGLAFTDVDVDSIKIAWESPQGQVSRYRVTYSSPEDGIHELFPAPDGEEDTAELQGLRPGSEYTVSVVALHDDMESQPLIGTQSTAIPAPTDLKFTQVTPTSLSAQWTPPNVQLTGYRVRVTPKEKTGPMKEINLAPDSSSVVVSGLMVATKYEVSVYALKDTLTSRPAQGVVTTLENVSPPRRARVTDATETTITISWRTKTETITGFQVDAVPANGQTPIQRTIKPDVRSYTITGLQPGTDYKIYLYTLNDNARSSPVVIDASTAIDAPSNLRFLATTPNSLLVSWQPPRARITGYIIKYEKPGSPPREVVPRPRPGVTEATITGLEPGTEYTIYVIALKNNQKSEPLIGRKKTDELPQLVTLPHPNLHGPEILDVPSTVQKTPFVTHPGYDTGNGIQLPGTSGQQPSVGQQMIFEEHGFRRTTPPTTATPIRHRPRPYPPNVGQEALSQTTISWAPFQDTSEYIISCHPVGTDEEPLQFRVPGTSTSATLTGLTRGATYNIIVEALKDQQRHKVREEVVTVGNSVNEGLNQPTDDSCFDPYTVSHYAVGDEWERMSESGFKLLCQCLGFGSGHFRCDSSRWCHDNGVNYKIGEKWDRQGENGQMMSCTCLGNGKGEFKCDPHEATCYDDGKTYHVGEQWQKEYLGAICSCTCFGGQRGWRCDNCRRPGGEPSPEGTTGQSYNQYSQRYHQRTNTNVNCPIECFMPLDVQADREDSRE

SEQ ID NO: 5439 - protein, 2386 aa, Homo sapiens
MLRGPGPGLLLLAVQCLGTAVPSTGASKSKRQAQQMVQPQSPVAVSQSKPGCYDNGKHYQINQQWERTYLGNALVCTCYGGSRGFNCESKPEAEETCFDKYTGNTYRVGDTYERPKDSMIWDCTCIGAGRGRISCTIANRCHEGGQSYKIGDTWRRPHETGGYMLECVCLGNGKGEWTCKPIAEKCFDHAAGTSYVVGETWEKPYQGWMMVDCTCLGEGSGRITCTSRNRCNDQDTRTSYRIGDTWSKKDNRGNLLQCICTGNGRGEWKCERHTSVQTTSSGSGPFTDVRAAVYQPQPHPQPPPYGHCVTDSGVVYSVGMQWLKTQGNKQMLCTCLGNGVSCQETAVTQTYGGNSNGEPCVLPFTYNGRTFYSCTTEGRQDGHLWCSTTSNYEQDQKYSFCTDHTVLVQTQGGNSNGALCHFPFLYNNHNYTDCTSEGRRDNMKWCGTTQNYDADQKFGFCPMAAHEEICTTNEGVMYRIGDQWDKQHDMGHMMRCTCVGNGRGEWTCIAYSQLRDQCIVDDITYNVNDTFHKRHEEGHMLNCTCFGQGRGRWKCDPVDQCQDSETGTFYQIGDSWEKYVHGVRYQCYCYGRGIGEWHCQPLQTYPSSSGPVEVFITETPSQPNSHPIQWNAPQPSHISKYILRWRPKNSVGRWKEATIPGHLNSYTIKGLKPGVVYEGQLISIQQYGHQEVTRFDFTTTSTSTPVTSNTVTGETTPFSPLVATSESVTEITASSFVVSWVSASDTVSGFRVEYELSEEGDEPQYLDLPSTATSVNIPDLLPGRKYIVNVYQISEDGEQSLILSTSQTTAPDAPPDPTVDQVDDTSIVVRWSRPQAPITGYRIVYSPSVEGSSTELNLPETANSVTLSDLQPGVQYNITIYAVEENQESTPVVIQQETTGTPRSDTVPSPRDLQFVEVTDVKVTIMWTPPESAVTGYRVDVIPVNLPGEHGQRLPISRNTFAEVTGLSPGVTYYFKVFAVSHGRESKPLTAQQTTKLDAPTNLQFVNETDSTVLVRWTPPRAQITGYRLTVGLTRRGQPRQYNVGPSVSKYPLRNLQPASEYTVSLVAIKGNQESPKATGVFTTLQPGSSIPPYNTEVTETTIVITWTPAPRIGFKLGVRPSQGGEAPREVTSDSGSIVVSGLTPGVEYVYTIQVLRDGQERDAPIVNKVVTPLSPPTNLHLEANPDTGVLTVSWERSTTPDITGYRITTTPTNGQQGNSLEEVVHADQSSCTFDNLSPGLEYNVSVYTVKDDKESVPISDTIIPAVPPPTDLRFTNIGPDTMRVTWAPPPSIDLTNFLVRYSPVKNEEDVAELSISPSDNAVVLTNLLPGTEYVVSVSSVYEQHESTPLRGRQKTGLDSPTGIDFSDITANSFTVHWIAPRATITGYRIRHHPEHFSGRPREDRVPHSRNSITLTNLTPGTEYVVSIVALNGREESPLLIGQQSTVSDVPRDLEVVAATPTSLLISWDAPAVTVRYYRITYGETGGNSPVQEFTVPGSKSTATISGLKPGVDYTITVYAVTGRGDSPASSKPISINYRTEIDKPSQMQVTDVQDNSISVKWLPSSSPVTGYRVTTTPKNGPGPTKTKTAGPDQTEMTIEGLQPTVEYVVSVYAQNPSGESQPLVQTAVTNIDRPKGLAFTDVDVDSIKIAWESPQGQVSRYRVTYSSPEDGIHELFPAPDGEEDTAELQGLRPGSEYTVSVVALHDDMESQPLIGTQSTAIPAPTDLKFTQVTPTSLSAQWTPPNVQLTGYRVRVTPKEKTGPMKEINLAPDSSSVVVSGLMVATKYEVSVYALKDTLTSRPAQGVVTTLENVSPPRRARVTDATETTITISWRTKTETITGFQVDAVPANGQTPIQRTIKPDVRSYTITGLQPGTDYKIYLYTLNDNARSSPVVIDASTAIDAPSNLRFLATTPNSLLVSWQPPRARITGYIIKYEKPGSPPREVVPRPRPGVTEATITGLEPGTEYTIYVIALKNNQKSEPLIGRKKTDELPQLVTLPHPNLHGPEILDVPSTVQKTPFVTHPGYDTGNGIQLPGTSGQQPSVGQQMIFEEHGFRRTTPPTTATPIRHRPRPYPPNVGEEIQIGHIPREDVDYHLYPHGPGLNPNASTGQEALSQTTISWAPFQDTSEYIISCHPVGTDEEPLQFRVPGTSTSATLTGLTRGATYNIIVEALKDQQRHKVREEVVTVGNSVNEGLNQPTDDSCFDPYTVSHYAVGDEWERMSESGFKLLCQCLGFGSGHFRCDSSRWCHDNGVNYKIGEKWDRQGENGQMMSCTCLGNGKGEFKCDPHEATCYDDGKTYHVGEQWQKEYLGAICSCTCFGGQRGWRCDNCRRPGGEPSPEGTTGQSYNQYSQRYHQRTNTNVNCPIECFMPLDVQADREDSRE

SEQ ID NO: 5440 - protein, 2184 aa, Homo sapiens
MLRGPGPGLLLLAVQCLGTAVPSTGASKSKRQAQQMVQPQSPVAVSQSKPGCYDNGKHYQINQQWERTYLGNALVCTCYGGSRGFNCESKPEAEETCFDKYTGNTYRVGDTYERPKDSMIWDCTCIGAGRGRISCTIANRCHEGGQSYKIGDTWRRPHETGGYMLECVCLGNGKGEWTCKPIAEKCFDHAAGTSYVVGETWEKPYQGWMMVDCTCLGEGSGRITCTSRNRCNDQDTRTSYRIGDTWSKKDNRGNLLQCICTGNGRGEWKCERHTSVQTTSSGSGPFTDVRAAVYQPQPHPQPPPYGHCVTDSGVVYSVGMQWLKTQGNKQMLCTCLGNGVSCQETAVTQTYGGNSNGEPCVLPFTYNGRTFYSCTTEGRQDGHLWCSTTSNYEQDQKYSFCTDHTVLVQTQGGNSNGALCHFPFLYNNHNYTDCTSEGRRDNMKWCGTTQNYDADQKFGFCPMAAHEEICTTNEGVMYRIGDQWDKQHDMGHMMRCTCVGNGRGEWTCIAYSQLRDQCIVDDITYNVNDTFHKRHEEGHMLNCTCFGQGRGRWKCDPVDQCQDSETGTFYQIGDSWEKYVHGVRYQCYCYGRGIGEWHCQPLQTYPSSSGPVEVFITETPSQPNSHPIQWNAPQPSHISKYILRWRPKNSVGRWKEATIPGHLNSYTIKGLKPGVVYEGQLISIQQYGHQEVTRFDFTTTSTSTPVTSNTVTGETTPFSPLVATSESVTEITASSFVVSWVSASDTVSGFRVEYELSEEGDEPQYLDLPSTATSVNIPDLLPGRKYIVNVYQISEDGEQSLILSTSQTTAPDAPPDPTVDQVDDTSIVVRWSRPQAPITGYRIVYSPSVEGSSTELNLPETANSVTLSDLQPGVQYNITIYAVEENQESTPVVIQQETTGTPRSDTVPSPRDLQFVEVTDVKVTIMWTPPESAVTGYRVDVIPVNLPGEHGQRLPISRNTFAEVTGLSPGVTYYFKVFAVSHGRESKPLTAQQTTKLDAPTNLQFVNETDSTVLVRWTPPRAQITGYRLTVGLTRRGQPRQYNVGPSVSKYPLRNLQPASEYTVSLVAIKGNQESPKATGVFTTLQPGSSIPPYNTEVTETTIVITWTPAPRIGFKLGVRPSQGGEAPREVTSDSGSIVVSGLTPGVEYVYTIQVLRDGQERDAPIVNKVVTPLSPPTNLHLEANPDTGVLTVSWERSTTPDITGYRITTTPTNGQQGNSLEEVVHADQSSCTFDNLSPGLEYNVSVYTVKDDKESVPISDTIIPAVPPPTDLRFTNIGPDTMRVTWAPPPSIDLTNFLVRYSPVKNEEDVAELSISPSDNAVVLTNLLPGTEYVVSVSSVYEQHESTPLRGRQKTGLDSPTGIDFSDITANSFTVHWIAPRATITGYRIRHHPEHFSGRPREDRVPHSRNSITLTNLTPGTEYVVSIVALNGREESPLLIGQQSTVSDVPRDLEVVAATPTSLLISWDAPAVTVRYYRITYGETGGNSPVQEFTVPGSKSTATISGLKPGVDYTITVYAVTGRGDSPASSKPISINYRTEIDKPSQMQVTDVQDNSISVKWLPSSSPVTGYRVTTTPKNGPGPTKTKTAGPDQTEMTIEGLQPTVEYVVSVYAQNPSGESQPLVQTAVTNIDRPKGLAFTDVDVDSIKIAWESPQGQVSRYRVTYSSPEDGIHELFPAPDGEEDTAELQGLRPGSEYTVSVVALHDDMESQPLIGTQSTAIPAPTDLKFTQVTPTSLSAQWTPPNVQLTGYRVRVTPKEKTGPMKEINLAPDSSSVVVSGLMVATKYEVSVYALKDTLTSRPAQGVVTTLENVSPPRRARVTDATETTITISWRTKTETITGFQVDAVPANGQTPIQRTIKPDVRSYTITGLQPGTDYKIYLYTLNDNARSSPVVIDASTAIDAPSNLRFLATTPNSLLVSWQPPRARITGYIIKYEKPGSPPREVVPRPRPGVTEATITGLEPGTEYTIYVIALKNNQKSEPLIGRKKTVNEGLNQPTDDSCFDPYTVSHYAVGDEWERMSESGFKLLCQCLGFGSGHFRCDSSRWCHDNGVNYKIGEKWDRQGENGQMMSCTCLGNGKGEFKCDPHEATCYDDGKTYHVGEQWQKEYLGAICSCTCFGGQRGWRCDNCRRPGGEPSPEGTTGQSYNQYSQRYHQRTNTNVNCPIECFMPLDVQADREDSRE

SEQ ID NO: 5441 - protein, 2211 aa, Homo sapiens
MLRGPGPGLLLLAVQCLGTAVPSTGASKSKRQAQQMVQPQSPVAVSQSKPGCYDNGKHYQINQQWERTYLGNALVCTCYGGSRGFNCESKPEAEETCFDKYTGNTYRVGDTYERPKDSMIWDCTCIGAGRGRISCTIANRCHEGGQSYKIGDTWRRPHETGGYMLECVCLGNGKGEWTCKPIAEKCFDHAAGTSYVVGETWEKPYQGWMMVDCTCLGEGSGRITCTSRNRCNDQDTRTSYRIGDTWSKKDNRGNLLQCICTGNGRGEWKCERHTSVQTTSSGSGPFTDVRAAVYQPQPHPQPPPYGHCVTDSGVVYSVGMQWLKTQGNKQMLCTCLGNGVSCQETAVTQTYGGNSNGEPCVLPFTYNGRTFYSCTTEGRQDGHLWCSTTSNYEQDQKYSFCTDHTVLVQTQGGNSNGALCHFPFLYNNHNYTDCTSEGRRDNMKWCGTTQNYDADQKFGFCPMAAHEEICTTNEGVMYRIGDQWDKQHDMGHMMRCTCVGNGRGEWTCIAYSQLRDQCIVDDITYNVNDTFHKRHEEGHMLNCTCFGQGRGRWKCDPVDQCQDSETGTFYQIGDSWEKYVHGVRYQCYCYGRGIGEWHCQPLQTYPSSSGPVEVFITETPSQPNSHPIQWNAPQPSHISKYILRWRPKNSVGRWKEATIPGHLNSYTIKGLKPGVVYEGQLISIQQYGHQEVTRFDFTTTSTSTPVTSNTVTGETTPFSPLVATSESVTEITASSFVVSWVSASDTVSGFRVEYELSEEGDEPQYLDLPSTATSVNIPDLLPGRKYIVNVYQISEDGEQSLILSTSQTTAPDAPPDPTVDQVDDTSIVVRWSRPQAPITGYRIVYSPSVEGSSTELNLPETANSVTLSDLQPGVQYNITIYAVEENQESTPVVIQQETTGTPRSDTVPSPRDLQFVEVTDVKVTIMWTPPESAVTGYRVDVIPVNLPGEHGQRLPISRNTFAEVTGLSPGVTYYFKVFAVSHGRESKPLTAQQTTKLDAPTNLQFVNETDSTVLVRWTPPRAQITGYRLTVGLTRRGQPRQYNVGPSVSKYPLRNLQPASEYTVSLVAIKGNQESPKATGVFTTLQPGSSIPPYNTEVTETTIVITWTPAPRIGFKLGVRPSQGGEAPREVTSDSGSIVVSGLTPGVEYVYTIQVLRDGQERDAPIVNKVVTPLSPPTNLHLEANPDTGVLTVSWERSTTPDITGYRITTTPTNGQQGNSLEEVVHADQSSCTFDNLSPGLEYNVSVYTVKDDKESVPISDTIIPAVPPPTDLRFTNIGPDTMRVTWAPPPSIDLTNFLVRYSPVKNEEDVAELSISPSDNAVVLTNLLPGTEYVVSVSSVYEQHESTPLRGRQKTGLDSPTGIDFSDITANSFTVHWIAPRATITGYRIRHHPEHFSGRPREDRVPHSRNSITLTNLTPGTEYVVSIVALNGREESPLLIGQQSTVSDVPRDLEVVAATPTSLLISWDAPAVTVRYYRITYGETGGNSPVQEFTVPGSKSTATISGLKPGVDYTITVYAVTGRGDSPASSKPISINYRTEIDKPSQMQVTDVQDNSISVKWLPSSSPVTGYRVTTTPKNGPGPTKTKTAGPDQTEMTIEGLQPTVEYVVSVYAQNPSGESQPLVQTAVTNIDRPKGLAFTDVDVDSIKIAWESPQGQVSRYRVTYSSPEDGIHELFPAPDGEEDTAELQGLRPGSEYTVSVVALHDDMESQPLIGTQSTAIPAPTDLKFTQVTPTSLSAQWTPPNVQLTGYRVRVTPKEKTGPMKEINLAPDSSSVVVSGLMVATKYEVSVYALKDTLTSRPAQGVVTTLENVSPPRRARVTDATETTITISWRTKTETITGFQVDAVPANGQTPIQRTIKPDVRSYTITGLQPGTDYKIYLYTLNDNARSSPVVIDASTAIDAPSNLRFLATTPNSLLVSWQPPRARITGYIIKYEKPGSPPREVVPRPRPGVTEATITGLEPGTEYTIYVIALKNNQKSEPLIGRKKTGQEALSQTTISWAPFQDTSEYIISCHPVGTDEEPLQFRVPGTSTSATLTGLTRGATYNIIVEALKDQQRHKVREEVVTVGNSRWCHDNGVNYKIGEKWDRQGENGQMMSCTCLGNGKGEFKCDPHEATCYDDGKTYHVGEQWQKEYLGAICSCTCFGGQRGWRCDNCRRPGGEPSPEGTTGQSYNQYSQRYHQRTNTNVNCPIECFMPLDVQADREDSRE

SEQ ID NO: 5442 - protein, 405 aa, Homo sapiens
MPLLLYTCLLWLPTSGLWTVQAMDPNAAYVNMSNHHRGLASANVDFAFSLYKHLVALSPKKNIFISPVSISMALAMLSLGTCGHTRAQLLQGLGFNLTERSETEIHQGFQHLHQLFAKSDTSLEMTMGNALFLDGSLELLESFSADIKHYYESEVLAMNFQDWATASRQINSYVKNKTQGKIVDLFSGLDSPAILVLVNYIFFKGTWTQPFDLASTREENFYVDETTVVKVPMMLQSSTISYLHDSELPCQLVQMNYVGNGTVFFILPDKGKMNTVIAALSRDTINRWSAGLTSSQVDLYIPKVTISGVYDLGDVLEEMGIADLFTNQANFSRITQDAQLKSSKVVHKAVLQLNEEGVDTAGSTGVTLNLTSKPIILRFNQPFIIMIFDHFTWSSLFLARVMNPV

SEQ ID NO: 5443 - protein, 327 aa, Homo sapiens
ASTKGPSVFPLAPCSRSTSESTAALGCLVKDYFPEPVTVSWNSGALTSGVHTFPAVLQSSGLYSLSSVVTVPSSSLGTKTYTCNVDHKPSNTKVDKRVESKYGPPCPSCPAPEFLGGPSVFLFPPKPKDTLMISRTPEVTCVVVDVSQEDPEVQFNWYVDGVEVHNAKTKPREEQFNSTYRVVSVLTVLHQDWLNGKEYKCKVSNKGLPSSIEKTISKAKGQPREPQVYTLPPSQEEMTKNQVSLTCLVKGFYPSDIAVEWESNGQPENNYKTTPPVLDSDGSFFLYSRLTVDKSRWQEGNVFSCSVMHEALHNHYTQKSLSLSLGK

SEQ ID NO: 5444 - protein, 418 aa, Homo sapiens [sequence omitted]

SEQ ID NO: 5445 - protein, 543 aa, Homo sapiens
MAHAHIQGGRRAKSRFVVCIMSGARSKLALFLCGCYVVALGAHTGEESVADHHEAEYYVAAVYEHPSILSLNPLALISRQEALELMNQNLDIYEQQVMTAAQKDVQIIVFPEDGIHGFNFTRTSIYPFLDFMPSPQVVRWNPCLEPHRFNDTEVLQRLSCMAIRGDMFLVANLGTKEPCHSSDPRCPKDGRYQFNTNVVFSNNGTLVDRYRKHNLYFEAAFDVPLKVDLITFDTPFAGRFGIFTCFDILFFDPAIRVLRDYKVKHVVYPTAWMNQLPLLAAIEIQKAFAVAFGINVLAANVHHPVLGMTGSGIHTPLESFWYHDMENPKSHLIIAQVAKNPVGLIGAENATGETDPSHSKFLKILSGDPYCEKDAQEVHCDEATKWNVNAPPTFHSEMMYDNFTLVPVWGKEGYLHVCSNGLCCYLLYERPTLSKELYALGVFDGLHTVHGTYYIQVCALVRCGGLGFDTCGQEITEATGIFEFHLWGNFSTSYIFPLFLTSGMTLEVPDQLGWENDHYFLRKSRLSSGLVTAALYGRLYERD

SEQ ID NO: 5446 - protein, 485 aa, Homo sapiens
MRKRAPQSEMAPAGVSLRATILCLLAWAGLAAGDRVYIHPFHLVIHNESTCEQLAKANAGKPKDPTFIPAPIQAKTSPVDEKALQDQLVLVAAKLDTEDKLRAAMVGMLANFLGFRIYGMHSELWGVVHGATVLSPTAVFGTLASLYLGALDHTADRLQAILGVPWKDKNCTSRLDAHKVLSALQAVQGLLVAQGRADSQAQLLLSTVVGVFTAPGLHLKQPFVQGLALYTPVVLPRSLDFTELDVAAEKIDRFMQAVTGWKTGCSLMGASVDSTLAFNTYVHFQGKMKGFSLLAEPQEFWVDNSTSVSVPMLSGMGTFQHWSDIQDNFSVTQVPFTESACLLLIQPHYASDLDKVEGLTFQQNSLNWMKKLSPRTIHLTMPQLVLQGSYDLQDLLAQAELPAILHTELNLQKLSNDRIRVGEVLNSIFFELEADEREPTESTQQLNKPEVLEVTLNRPFLFAVYDQSATALHFLGRVANPLSTA

SEQ ID NO: 5447 - protein, 352 aa, Homo sapiens
MRSLGALLLLLSACLAVSAGPVPTPPDNIQVQENFNISRIYGKWYNLAIGSTCPWLKKIMDRMTVSTLVLGEGATEAEISMTSTRWRKGVCEETSGAYEKTDTDGKFLYHKSKWNITMESYVVHTNYDEYAIFLTKKFSRHHGPTITAKLYGRAPQLRETLLQDFRVVAQGVGIPEDSIFTMADRGECVPGEQEPEPILIPRVRRAVLPQEEEGSGGGQLVTEVTKKEDSCQLGYSAGPCMGMTSRYFYNGTSMACETFQYGGCMGNGNNFVTEKECLQTCRTVAACNLPIVRGPCRAFIQLWAFDAVKGKCVLFPYGGCQGNGNKFYSEKECREYCGVPGDGDEELLRFSN

SEQ ID NO: 5448 - protein, 576 aa, Homo sapiens
MAQGVLWILLGLLLWSDPGTASLPLLMDSVIQALAELEQKVPAAKTRHTASAWLMSAPNSGPHNRLYHFLLGAWSLNATELDPCPLSPELLGLTKEVARHDVREGKEYGVVLAPDGSTVAVEPLLAGLEAGLQGRRVINLPLDSMAAPWETGDTFPDVVAIAPDVRATSSPGLRDGSPDVTTADIGANTPDATKGCPDVQASLPDAKAKSPPTMVDSLLAVTLAGNLGLTFLRGSQTQSHPDLGTEGCWDQLSAPRTFTLLDPKASLLTMAFLNGALDGVILGDYLSRTPEPRPSLSHLLSQYYGAGVARDPGFRSNFRRQNGAALTSASILAQQVWGTLVLLQRLEPVHLQLQCMSQEQLAQVAANATKEFTEAFLGCPAIHPRCRWGAAPYRGRPKLLQLPLGFLYVHHTYVPAPPCTDFTRCAANMRSMQRYHQDTQGWGDIGYSFVVGSDGYVYEGRGWHWVGAHTLGHNSRGFGVAIVGNYTAALPTEAALRTVRDTLPSCAVRAGLLRPDYALLGHRQLVRTDCPGDALFDLLRTWPHFTATVKPRPARSVSKRSRREPPPRTLPATDLQ

SEQ ID NO: 5449 - protein, 634 aa, Homo sapiens
MAQGVLWILLGLLLWSDPGTASLPLLMDSVIQALAELEQKVPAAKTRHTASAWLMSAPNSGPHNRLYHFLLGAWSLNATELDPCPLSPELLGLTKEVARHDVREGKEYGVVLAPDGSTVAVEPLLAGLEAGLQGRRVINLPLDSMAAPWETGDTFPDVVAIAPDVRATSSPGLRDGSPDVTTADIGANTPDATKGCPDVQASLPDAKAKSPPTMVDSLLAVTLAGNLGLTFLRGSQTQSHPDLGTEGCWDQLSAPRTFTLLDPKASLLTMAFLNGALDGVILGDYLSRTPEPRPSLSHLLSQYYGAGVARDPGFRSNFRRQNGAALTSASILAQQVWGTLVLLQRLEPVHLQLQCMSQEQLAQVAANATKEFTEAFLGCPAIHPRCRWGAAPYRGRPKLLQLPLGFLYVHHTYVPAPPCTDFTRCAANMRSMQRYHQDTQGWGDIGYSFVVGSDGYVYEGRGWHWVGAHTLGHNSRGFGVAIVGNYTAALPTEAALRTVRDTLPSCAVRAGLLRPDYALLGHRQLVRTDCPGDALFDLLRTWPHFTAVSLRSLHYTARRPSVYTSSTRPLPPACNSCARTASARPPTSRRHVYSGNLGPAFAGHSAGNIPDPVTSAYAASAQPQTQPACPFPSS

SEQ ID NO: 5450 - protein, 599 aa, Homo sapiens
MKLLKLTGFIFFLFFLTESLTLPTQPRDIENFNSTQKFIEDNIEYITIIAFAQYVQEATFEEMEKLVKDMVEYKDRCMADKTLPECSKLPNNVLQEKICAMEGLPQKHNFSHCCSKVDAQRRLCFFYNKKSDVGFLPPFPTLDPEEKCQAYESNRESLLNHFLYEVARRNPFVFAPTLLTVAVHFEEVAKSCCEEQNKVNCLQTRAIPVTQYLKAFSSYQKHVCGALLKFGTKVVHFIYIAILSQKFPKIEFKELISLVEDVSSNYDGCCEGDVVQCIRDTSKVMNHICSKQDSISSKIKECCEKKIPERGQCIINSNKDDRPKDLSLREGKFTDSENVCQERDADPDTFFAKFTFEYSRRHPDLSIPELLRIVQIYKDLLRNCCNTENPPGCYRYAEDKFNETTEKSLKMVQQECKHFQNLGKDGLKYHYLIRLTKIAPQLSTEELVSLGEKMVTAFTTCCTLSEEFACVDNLADLVFGELCGVNENRTINPAVDHCCKTNFAFRRPCFESLKADKTYVPPPFSQDLFTFHADMCQSQNEELQRKTDRFLVNLVKLKHELTDEELQSLFTNFANVVDKCCKAESPEVCFNEESPKIGN

SEQ ID NO: 5451 - protein, 4563 aa, Homo sapiens
MDPPRPALLALLALPALLLLLLAGARAEEEMLENVSLVCPKDATRFKHLRKYTYNYEAESSSGVPGTADSRSATRINCKVELEVPQLCSFILKTSQCTLKEVYGFNPEGKALLKKTKNSEEFAAAMSRYELKLAIPEGKQVFLYPEKDEPTYILNIKRGIISALLVPPETEEAKQVLFLDTVYGNCSTHFTVKTRKGNVATEISTERDLGQCDRFKPIRTGISPLALIKGMTRPLSTLISSSQSCQYTLDAKRKHVAEAICKEQHLFLPFSYNNKYGMVAQVTQTLKLEDTPKINSRFFGEGTKKMGLAFESTKSTSPPKQAEAVLKTLQELKKLTISEQNIQRANLFNKLVTELRGLSDEAVTSLLPQLIEVSSPITLQALVQCGQPQCSTHILQWLKRVHANPLLIDVVTYLVALIPEPSAQQLREIFNMARDQRSRATLYALSHAVNNYHKTNPTGTQELLDIANYLMEQIQDDCTGDEDYTYLILRVIGNMGQTMEQLTPELKSSILKCVQSTKPSLMIQKAAIQALRKMEPKDKDQEVLLQTFLDDASPGDKRLAAYLMLMRSPSQADINKIVQILPWEQNEQVKNFVASHIANILNSEELDIQDLKKLVKEALKESQLPTVMDFRKFSRNYQLYKSVSLPSLDPASAKIEGNLIFDPNNYLPKESMLKTTLTAFGFASADLIEIGLEGKGFEPTLEALFGKQGFFPDSVNKALYWVNGQVPDGVSKVLVDHFGYTKDDKHEQDMVNGIMLSVEKLIKDLKSKEVPEARAYLRILGEELGFASLHDLQLLGKLLLMGARTLQGIPQMIGEVIRKGSKNDFFLHYIFMENAFELPTGAGLQLQISSSGVIAPGAKAGVKLEVANMQAELVAKPSVSVEFVTNMGIIIPDFARSGVQMNTNFFHESGLEAHVALKAGKLKFIIPSPKRPVKLLSGGNTLHLVSTTKTEVIPPLIENRQSWSVCKQVFPGLNYCTSGAYSNASSTDSASYYPLTGDTRLELELRPTGEIEQYSVSATYELQREDRALVDTLKFVTQAEGAKQTEATMTFKYNRQSMTLSSEVQIPDFDVDLGTILRVNDESTEGKTSYRLTLDIQNKKITEVALMGHLSCDTKEERKIKGVISIPRLQAEARSEILAHWSPAKLLLQMDSSATAYGSTVSKRVAWHYDEEKIEFEWNTGTNVDTKKMTSNFPVDLSDYPKSLHMYANRLLDHRVPETDMTFRHVGSKLIVAMSSWLQKASGSLPYTQTLQDHLNSLKEFNLQNMGLPDFHIPENLFLKSDGRVKYTLNKNSLKIEIPLPFGGKSSRDLKMLETVRTPALHFKSVGFHLPSREFQVPTFTIPKLYQLQVPLLGVLDLSTNVYSNLYNWSASYSGGNTSTDHFSLRARYHMKADSVVDLLSYNVQGSGETTYDHKNTFTLSCDGSLRHKFLDSNIKFSHVEKLGNNPVSKGLLIFDASSSWGPQMSASVHLDSKKKQHLFVKEVKIDGQFRVSSFYAKGTYGLSCQRDPNTGRLNGESNLRFNSSYLQGTNQITGRYEDGTLSLTSTSDLQSGIIKNTASLKYENYELTLKSDTNGKYKNFATSNKMDMTFSKQNALLRSEYQADYESLRFFSLLSGSLNSHGLELNADILGTDKINSGAHKATLRIGQDGISTSATTNLKCSLLVLENELNAELGLSGASMKLTTNGRFREHNAKFSLDGKAALTELSLGSAYQAMILGVDSKNIFNFKVSQEGLKLSNDMMGSYAEMKFDHTNSLNIAGLSLDFSSKLDNIYSSDKFYKQTVNLQLQPYSLVTTLNSDLKYNALDLTNNGKLRLEPLKLHVAGNLKGAYQNNEIKHIYAISSAALSASYKADTVAKVQGVEFSHRLNTDIAGLASAIDMSTNYNSDSLHFSNVFRSVMAPFTMTIDAHTNGNGKLALWGEHTGQLYSKFLLKAEPLAFTFSHDYKGSTSHHLVSRKSISAALEHKVSALLTPAEQTGTWKLKTQFNNNEYSQDLDAYNTKDKIGVELTGRTLADLTLLDSPIKVPLLLSEPINIIDALEMRDAVEKPQEFTIVAFVKYDKNQDVHSINLPFFETLQEYFERNRQTIIVVVENVQRNLKHINIDQFVRKYRAALGKLPQQANDYLNSFNWERQVSHAKEKLTALTKKYRITENDIQIALDDAKINFNEKLSQLQTYMIQFDQYIKDSYDLHDLKIAIANIIDEIIEKLKSLDEHYHIRVNLVKTIHDLHLFIENIDFNKSGSSTASWIQNVDTKYQIRIQIQEKLQQLKRHIQNIDIQHLAGKLKQHIEAIDVRVLLDQLGTTISFERINDVLEHVKHFVINLIGDFEVAEKINAFRAKVHELIERYEVDQQIQVLMDKLVELTHQYKLKETIQKLSNVLQQVKIKDYFEKLVGFIDDAVKKLNELSFKTFIEDVNKFLDMLIKKLKSFDYHQFVDETNDKIREVTQRLNGEIQALELPQKAEALKLFLEETKATVAVYLESLQDTKITLIINWLQEALSSASLAHMKAKFRETLEDTRDRMYQMDIQQELQRYLSLVGQVYSTLVTYISDWWTLAAKNLTDFAEQYSIQDWAKRMKALVEQGFTVPEIKTILGTMPAFEVSLQALQKATFQTPDFIVPLTDLRIPSVQINFKDLKNIKIPSRFSTPEFTILNTFHIPSFTIDFVEMKVKIIRTIDQMQNSELQWPVPDIYLRDLKVEDIPLARITLPDFRLPEIAIPEFIIPTLNLNDFQVPDLHIPEFQLPHISHTIEVPTFGKLYSILKIQSPLFTLDANADIGNGTTSANEAGIAASITAKGESKLEVLNFDFQANAQLSNPKINPLALKESVKFSSKYLRTEHGSEMLFFGNAIEGKSNTVASLHTEKNTLELSNGVIVKINNQLTLDSNTKYFHKLNIPKLDFSSQADLRNEIKTLLKAGHIAWTSSGKGSWKWACPRFSDEGTHESQISFTIEGPLTSFGLSNKINSKHLRVNQNLVYESGSLNFSKLEIQSQVDSQHVGHSVLTAKGMALFGEGKAEFTGRHDAHLNGKVIGTLKNSLFFSAQPFEITASTNNEGNLKVRFPLRLTGKIDFLNNYALFLSPSAQQASWQVSARFNQYKYNQNFSAGNNENIMEAHVGINGEANLDFLNIPLTIPEMRLPYTIITTPPLKDFSLWEKTGLKEFLKTTKQSFDLSVKAQYKKNKHRHSITNPLAVLCEFISQSIKSFDRHFEKNRNNALDFVTKSYNETKIKFDKYKAEKSHDELPRTFQIPGYTVPVVNVEVSPFTIEMSAFGYVFPKAVSMPSFSILGSDVRVPSYTLILPSLELPVLHVPRNLKLSLPHFKELCTISHIFIPAMGNITYDFSFKSSVITLNTNAELFNQSDIVAHLLSSSSSVIDALQYKLEGTTRLTRKRGLKLATALSLSNKFVEGSHNSTVSLTTKNMEVSVAKTTKAEIPILRMNFKQELNGNTKSKPTVSSSMEFKYDFNSSMLYSTAKGAVDHKLSLESLTSYFSIESSTKGDVKGSVLSREYSGTIASEANTYLNSKSTRSSVKLQGTSKIDDIWNLEVKENFAGEATLQRIYSLWEHSTKNHLQLEGLFFTNGEHTSKATLELSPWQMSALVQVHASQPSSFHDFPDLGQEVALNANTKNQKIRWKNEVRIHSGSFQSQVELSNDQEKAHLDIAGSLEGHLRFLKNIILPVYDKSLWDFLKLDVTTSIGRRQHLRVSTAFVYTKNPNGYSFSIPVKVLADKFITPGLKLNDLNSVLVMPTFHVPFTDLQVPSCKLDFREIQIYKKLRTSSFALNLPTLPEVKFPEVDVLTKYSQPEDSLIPFFEITVPESQLTVSQFTLPKSVSDGIAALDLNAVANKIADFELPTIIVPEQTIEIPSIKFSVPAGIVIPSFQALTARFEVDSPVYNATWSASLKNKADYVETVLDSTCSSTVQFLEYELNVLGTHKIEDGTLASKTKGTLAHRDFSAEYEEDGKFEGLQEWEGKAHLNIKSPAFTDLHLRYQKDKKGISTSAASPAVGTVGMDMDEDDDFSKWNFYYSPQSSPDKKLTIFKTELRVRESDEETQIKVNWEEEAASGLLTSLKDNVPKATGVLYDYVNKYHWEHTGLTLREVSSKLRRNLQNNAEWVYQGAIRQIDDIDVRFQKAASGTTGTYQEWKDKAQNLYQELLTQEGQASFQGLKDNVFDGLVRVTQKFHMKVKHLIDSLIDFLNFPRFQFPGKPGIYTREELCTMFIREVGTVLSQVYSKVHNGSEILFSYFQDLVITLPFELRKHKLIDVISMYRELLKDLSKEAQEVFKAIQSLKTTEVLRNLQDLLQFIFQLIEDNIKQLKEMKFTYLINYIQDEINTIFNDYIPYVFKLLKENLCLNLHKFNEFIQNELQEASQELQQIHQYIMALREEYFDPSIVGWTVKYYELEEKIVSLIKNLLVALKDFHSEYIVSASNFTSQLSSQVEQFLHRNIQEYLSILTDPDGKGKEKIAELSATAQEIIKSQAIATKKIISDYHQQFRYKLQDFSDQLSDYYEKFIAESKRLIDLSIQNYHTFLIYITELLKKLQSTTVMNPYMKLAPGELTIIL

SEQ ID NO: 5452 - protein, 642 aa, Homo sapiens
MLRGPGPGLLLLAVQCLGTAVPSTGASKSKRQAQQMVQPQSPVAVSQSKPGCYDNGKHYQINQQWERTYLGNALVCTCYGGSRGFNCESKPEAEETCFDKYTGNTYRVGDTYERPKDSMIWDCTCIGAGRGRISCTIANRCHEGGQSYKIGDTWRRPHETGGYMLECVCLGNGKGEWTCKPIAEKCFDHAAGTSYVVGETWEKPYQGWMMVDCTCLGEGSGRITCTSRNRCNDQDTRTSYRIGDTWSKKDNRGNLLQCICTGNGRGEWKCERHTSVQTTSSGSGPFTDVRAAVYQPQPHPQPPPYGHCVTDSGVVYSVGMQWLKTQGNKQMLCTCLGNGVSCQETAVTQTYGGNSNGEPCVLPFTYNDRTDSTTSNYEQDQKYSFCTDHTVLVQTQGGNSNGALCHFPFLYNNHNYTDCTSEGRRDNMKWCGTTQNYDADQKFGFCPMAAHEEICTTNEGVMYRIGDQWDKQHDMGHMMRCTCVGNGRGEWTCIAYSQLRDQCIVDDITYNVNDTFHKRHEEGHMLNCTCFGQGRGRWKCDPVDQCQDSETGTFYQIGDSWEKYVHGVRYQCYCYGRGIGEWHCQPLQTYPSSSGPVEVFITETPSQPNSHPIQWNAPQPSHISKYILRWRPVSIPPRNLGY

SEQ ID NO: 5453 - protein, 583 aa, Homo sapiens
MKLLHVFLLFLCFHLRFCKVTYTSQEDLVEKKCLAKKYTHLSCDKVFCQPWQRCIEGTCVCKLPYQCPKNGTAVCATNRRSFPTYCQQKSLECLHPGTKFLNNGTCTAEGKFSVSLKHGNTDSEGIVEVKLVDQDKTMFICKSSWSMREANVACLDLGFQQGADTQRRFKLSDLSINSTECLHVHCRGLETSLAECTFTKRRTMGYQDFADVVCYTQKADSPMDDFFQCVNGKYISQMKACDGINDCGDQSDELCCKACQGKGFHCKSGVCIPSQYQCNGEVDCITGEDEVGCAGFASVAQEETEILTADMDAERRRIKSLLPKLSCGVKNRMHIRRKRIVGGKRAQLGDLPWQVAIKDASGITCGGIYIGGCWILTAAHCLRASKTHRYQIWTTVVDWIHPDLKRIVIEYVDRIIFHENYNAGTYQNDIALIEMKKDGNKKDCELPRSIPACVPWSPYLFQPNDTCIVSGWGREKDNERVFSLQWGEVKLISNCSKFYGNRFYEKEMECAGTYDGSIDACKGDSGGPLVCMDANNVTYVWGVVSWGENCGKPEFPGVYTKVANYFDWISYHVGRPFISQYNV

SEQ ID NO: 5454 - protein, 377 aa, Homo sapiens
MKLLHVFLLFLCFHLRFCKVTYTSQEDLVEKKCLAKKYTHLSCDKVFCQPWQRCIEGTCVCKLPYQCPKNGTAVCATNRRSFPTYCQQKSLECLHPGTKFLNNGTCTAEGKFSVSLKHGNTDSEGIVEVKLVDQDKTMFICKSSWSMREANVACLDLGFQQGADTQRRFKLSDLSINSTECLHVHCRGLETSLAECTFTKRRTMGYQDFADVVCYTQKADSPMDDFFQCVNGKYISQMKACDGINDCGDQSDELCCKACQGKGFHCKSGVCIPSQYQCNGEVDCITGEDEVGCAGFASVAQEETEILTADMDAERRRIKSLLPKLSCGVKNRMHIRRKRIVGGKRAQLGKMKQISLDIFKGLHRVYAILEFCCIILK

SEQ ID NO: 5455 - protein, 638 aa, Homo sapiens
MILFKQATYFISLFATVSCGCLTQLYENAFFRGGDVASMYTPNAQYCQMRCTFHPRCLLFSFLPASSINDMEKRFGCFLKDSVTGTLPKVHRTGAVSGHSLKQCGHQISACHRDIYKGVDMRGVNFNVSKVSSVEECQKRCTNNIRCQFFSYATQTFHKAEYRNNCLLKYSPGGTPTAIKVLSNVESGFSLKPCALSEIGCHMNIFQHLAFSDVDVARVLTPDAFVCRTICTYHPNCLFFTFYTNVWKIESQRNVCLLKTSESGTPSSSTPQENTISGYSLLTCKRTLPEPCHSKIYPGVDFGGEELNVTFVKGVNVCQETCTKMIRCQFFTYSLLPEDCKEEKCKCFLRLSMDGSPTRIAYGTQGSSGYSLRLCNTGDNSVCTTKTSTRIVGGTNSSWGEWPWQVSLQVKLTAQRHLCGGSLIGHQWVLTAAHCFDGLPLQDVWRIYSGILNLSDITKDTPFSQIKEIIIHQNYKVSEGNHDIALIKLQAPLNYTEFQKPICLPSKGDTSTIYTNCWVTGWGFSKEKGEIQNILQKVNIPLVTNEECQKRYQDYKITQRMVCAGYKEGGKDACKGDSGGPLVCKHNGMWRLVGITSWGEGCARREQPGVYTKVAEYMDWILEKTQSSDGKAQMQSPA

SEQ ID NO: 5456 - protein, 559 aa, Homo sapiens
MSACRSFAVAICILEISILTAQYTTSYDPELTESSGSASHIDCRMSPWSEWSQCDPCLRQMFRSRSIEVFGQFNGKRCTDAVGDRRQCVPTEPCEDAEDDCGNDFQCSTGRCIKMRLRCNGDNDCGDFSDEDDCESEPRPPCRDRVVEESELARTAGYGINILGMDPLSTPFDNEFYNGLCNRDRDGNTLTYYRRPWNVASLIYETKGEKNFRTEHYEEQIEAFKSIIQEKTSNFNAAISLKFTPTETNKAEQCCEETASSISLHGKGSFRFSYSKNETYQLFLSYSSKKEKMFLHVKGEIHLGRFVMRNRDVVLTTTFVDDIKALPTTYEKGEYFAFLETYGTHYSSSGSLGGLYELIYVLDKASMKRKGVELKDIKRCLGYHLDVSLAFSEISVGAEFNKDDCVKRGEGRAVNITSENLIDDVVSLIRGGTRKYAFELKEKLLRGTVIDVTDFVNWASSINDAPVLISQKLSPIYNLVPVKMKNAHLKKQNLERAIEDYINEFSVRKCHTCQNGGTVILMDGKCLCACPFKFEGIACEISKQKISEGLPALEFPNEK

SEQ ID NO: 5457 - protein, 330 aa, Homo sapiens
MWLLVSVILISRISSVGGEATFCDFPKINHGILYDEEKYKPFSQVPTGEVFYYSCEYNFVSPSKSFWTRITCTEEGWSPTPKCLRLCFFPFVENGHSESSGQTHLEGDTVQIICNTGYRLQNNENNISCVERGWSTPPKCRSTDTSCVNPPTVQNAHILSRQMSKYPSGERVRYECRSPYEMFGDEEVMCLNGNWTEPPQCKDSTGKCGPPPPIDNGDITSFPLSVYAPASSVEYQCQNLYQLEGNKRITCRNGQWSEPPKCLHPCVISREIMENYNIALRWTAKQKLYLRTGESAEFVCKRGYRLSSRSHTLRTTCWDGKLEYPTCAKR

SEQ ID NO: 5458 - protein, 330 aa, Homo sapiens
MWLLVSVILISRISSVGGEATFCDFPKINHGILYDEEKYKPFSQVPTGEVFYYSCEYNFVSPSKSFWTRITCTEEGWSPTPKCLRLCFFPFVENGHSESSGQTHLEGDTVQIICNTGYRLQNNENNISCVERGWSTPPKCRSTDTSCVNPPTVQNAYIVSRQMSKYPSGERVRYQCRSPYEMFGDEEVMCLNGNWTEPPQCKDSTGKCGPPPPIDNGDITSFPLSVYAPASSVEYQCQNLYQLEGNKRITCRNGQWSEPPKCLHPCVISREIMENYNIALRWTAKQKLYLRTGESAEFVCKRGYRLSSRSHTLRTTCWDGKLEYPTCAKR

SEQ ID NO: 5459 - protein, 272 aa, Homo sapiens
MLLLINVILTLWVSCANGQEVKPCDFPEIQHGGLYYKSLRRLYFPAAAGQSYSYYCDQNFVTPSGSYWDYIHCTQDGWSPTVPCLNTSCVNPPTVQNAHILSRQMSKYPSGERVRYECRSPYEMFGDEEVMCLNGNWTEPPQCKDSTGKCGPPPPIDNGDITSFPLSVYAPASSVEYQCQNLYQLEGNKRITCRNGQWSEPPKCLHPCVISREIMENYNIALRWTAKQKLYLRTGESAEFVCKRGYRLSSRSHTLRTTCWDGKLEYPTCAKR

SEQ ID NO: 5460 - protein, 622 aa, Homo sapiens
MAHVRGLQLPGCLALAALCSLVHSQHVFLAPQQARSLLQRVRRANTFLEEVRKGNLERECVEETCSYEEAFEALESSTATDVFWAKYTACETARTPRDKLAACLEGNCAEGLGTNYRGHVNITRSGIECQLWRSRYPHKPEINSTTHPGADLQENFCRNPDSSTTGPWCYTTDPTVRRQECSIPVCGQDQVTVAMTPRSEGSSVNLSPPLEQCVPDRGQQYQGRLAVTTHGLPCLAWASAQAKALSKHQDFNSAVQLVENFCRNPDGDEEGVWCYVAGKPGDFGYCDLNYCEEAVEEETGDGLDEDSDRAIEGRTATSEYQTFFNPRTFGSGEADCGLRPLFEKKSLEDKTERELLESYIDGRIVEGSDAEIGMSPWQVMLFRKSPQELLCGASLISDRWVLTAAHCLLYPPWDKNFTENDLLVRIGKHSRTRYERNIEKISMLEKIYIHPRYNWRENLDRDIALMKLKKPVAFSDYIHPVCLPDRETAASLLQAGYKGRVTGWGNLKETWTANVGKGQPSVLQVVNLPIVERPVCKDSTRIRITDNMFCAGYKPDEGKRGDACEGDSGGPFVMKSPFNNRWYQMGIVSWGEGCDRDGKYGFYTHVFRLKKWIQKVIDQFGE

SEQ ID NO: 5461 - protein, 522 aa, Homo sapiens
MELGLSWVFLVAILEGVQCEVQLVESGGGLVQPGGSLRLSCAASGFTFSSYWMSWVRQAPGKGLEWVANIKQDGSEKYYVDSVKGRFTISRDNAKNSLYLQMNSLRAEDTAVYYCARDTVRGRGQRLCYWYFDLWGRGTLVTVSSASTKGPSVFPLAPCSRSTSGGTAALGCLVKDYFPEPVTVSWNSGALTSGVHTFPAVLQSSGLYSLSSVVTVPSSSLGTQTYTCNVNHKPSNTKVDKRVELKTPLGDTTHTCPRCPEPKSCDTPPPCPRCPEPKSCDTPPPCPRCPEPKSCDTPPPCPRCPAPELLGGPSVFLFPPKPKDTLMISRTPEVTCVVVDVSHEDPEVQFKWYVDGVEVHNAKTKPREEQYNSTFRVVSVLTVLHQDWLNGKEYKCKVSNKALPAPIEKTISKTKGQPREPQVYTLPPSREEMTKNQVSLTCLVKGFYPSDIAVEWESSGQPENNYNTTPPMLDSDGSFFLYSKLTVDKSRWQQGNIFSCSVMHEALHNRFTQKSLSLSPGK

SEQ ID NO: 5462 - protein, 381 aa, Homo sapiens
MWRSLGLALALCLLPSGGTESQDQSSLCKQPPAWSIRDQDPMLNSNGSVTVVALLQASCYLCIIEASKLEDLRVKLKKEGYSNISYIVVNHQGISSRLKYTHLKNKVSEHIPVYQQEENQTDVWTLLNGSKDDFLIYDRCGRLVYHLGLPFSFLTFPYVEEAIKIAYCEKKCGNCSLTTLKDEDFCKRVSLATVDKTVETPSPHYHHEHHHNHGHQHLGSSELSENQQPGAPNAPTHPAPPGLHHHHKHKGQHRQGHPENRDMPASEDLQDLQKKLCRKRCINQLLCKLPTDSELAPRSCCCHCRHLIFEKTGSAITCQCKENLPSLCSCQGLRAEENITESCQCRLPPAACQISQQLIPTEASASCRCKNQAKKCECPSN

SEQ ID NO: 5463 - protein, 557 aa, Homo sapiens
GQPGATRSALTKMLPGAWLLWTSLLLLARPAQPCPMGCDCFVQEVFCSDEELATVPLDIPPYTKNIIFVETSFTTLETRAFGSNPNLTKVVFLNTQLCQFRPDAFGGLPRLEDLEVTGSSFLNLSTNIFSNLTSLGKLTLNFNMLEALPEGLFQHLAALESLHLQGNQLQALPRRLFQPLTHLKTLNLAQNLLAQLPEELFHPLTSLQTLKLSNNALSGLPQGVFGKLGSLQELFLDSNNISELPPQVFSQLFCLERLWLQRNAITHLPLSIFASLGNLTFLSLQWNMLRVLPAGLFAHTPCLVGLSLTHNQLETVAEGTFAHLSNLRSLMLSYNAITHLPAGIFRDLEELVKLYLGSNNLTALHPALFQNLSKLELLSLSKNQLTTLPEGIFDTNYNLFNLALHGNPWQCDCHLAYLFNWLQQYTDRLLNIQTYCAGPAYLKGQVVPALNEKQLVCPVTRDHLGFQVTWPDESKAGGSWDLAVQERAARSQCTYSNPEGTVVLACDQAQCRWLNVQLSPWQGSLGLQYNASQEWDLRSSCGSLRLTVSIEARAAGP

SEQ ID NO: 5464 - protein, 536 aa, Homo sapiens
QPMGCDCFVQEVFCSDEELATVPLDIPPYTKNIIFVETSFTTLETRAFGSNPNLTKVVFLDTQLCQFRPDAFGGLPRLEDLEVTGSSFLNLSTNIFSNLTSLGKLTLNFNMLEALPEGLFQHLAALESLHLQGNQLQALPRRLFQPLTHLKTLNLAQNLLAQLPEELFHPLTSLQTLKLSNNALSGLPQGVFGKLGSLQELFLDSNNISELPPQVFSQLFCLERLWLQRNAITHLPLSIFASLGNLTFLSLQWNMLRVLPAGLFAHTPCLVGLSLTHNQLETVTEGTFAHLSNLRSLMLSYNAITHLPAGIFRDLEELVKLYLGSNNLTALHPALFQNLSKLELLSLSKNQLTTLPEASSTPTTTCSTWPCTVTPGSATAPGLPLQLAAAVHRSAPEHPDLLRCPAYLKGQVVHALNEKQLVSVTRDHLGFQVTWPDESKAGGSWDLAVQERAARSQCTYSNPEGTVVLACDQAQCRWLNVQLSPRQGSLGLQYNASQEWDLRRAAVLCGSPCLSRLGQQGPSSSHTGAGEGGLWG

SEQ ID NO: 5465 - protein, 597 aa, Homo sapiens
MHPPKTPSGALHRKRKMAAWPFSRLWKVSDPILFQMTLIAALLPAVLGNCGPPPTLSFAAPMDITLTETRFKTGTTLKYTCLPGYVRSHSTQTLTCNSDGEWVYNTFCIYKRCRHPGELRNGQVEIKTDLSFGSQIEFSCSEGFFLIGSTTSRCEVQDRGVGWSHPLPQCEIVKCKPPPDIRNGRHSGEENFYAYGFSVTYSCDPRFSLLGHASISCTVENETIGVWRPSPPTCEKITCRKPDVSHGEMVSGFGPIYNYKDTIVFKCQKGFVLRGSSVIHCDADSKWNPSPPACEPNSCINLPDIPHASWETYPRPTKEDVYVVGTVLRYRCHPGYKPTTDEPTTVICQKNLRWTPYQGCEALCCPEPKLNNGEITQHRKSRPANHCVYFYGDEISFSCHETSRFSAICQGDGTWSPRTPSCGDICNFPPKIAHGHYKQSSSYSFFKEEIIYECDKGYILVGQAKLSCSYSHWSAPAPQCKALCRKPELVNGRLSVDKDQYVEPENVTIQCDSGYGVVGPQSITCSGNRTWYPEVPKCEWETPEGCEQVLTGKRLMQCLPNPEDVKMALEVYKLSLEIEQLELQRDSARQSTLDKEL

SEQ ID NO: 5466 - protein, 415 aa, Homo sapiens
MSPFLYLVLLVLGLHATIHCASPEGKVTACHSSQPNATLYKMSSINADFAFNLYRRFTVETPDKNIFFSPVSISAALVMLSFGACCSTQTEIVETLGFNLTDTPMVEIQHGFQHLICSLNFPKKELELQIGNALFIGKHLKPLAKFLNDVKTLYETEVFSTDFSNISAAKQEINSHVEMQTKGKVVGLIQDLKPNTIMVLVNYIHFKAQWANPFDPSKTEDSSSFLIDKTTTVQVPMMHQMEQYYHLVDMELNCTVLQMDYSKNALALFVLPKEGQMESVEAAMSSKTLKKWNRLLQKGWVDLFVPKFSISATYDLGATLLKMGIQHAYSENADFSGLTEDNGLKLSNAAHKAVLHIGEKGTEAAAVPEVELSDQPENTFLHPIIQIDRSFMLLILERSTRSILFLGKVVNPTEA

SEQ ID NO: 5467 - protein, 243 aa, Homo sapiens
MWLLVSVILISRISSVGGEAMFCDFPKINHGILYDEEKYKPFSQVPTGEVFYYSCEYNFVSPSKSFWTRITCAEEGWSPTPKCLRLCFFPFVENGHSESSGQTHLEGDTVQIICNTGYRLQNNENNISCVERGWSTPPKCRSTSSSVEYQCQNLYQLEGNNQITCRNGQWSEPPKCLDPCVISQEIMEKYNIKLKWTNQQKLYSRTGDIVEFVCKSGYHPTKSHSFRAMCQNGKLVYPSCEEK

SEQ ID NO: 5468 - protein, 270 aa, Homo sapiens
MWLLVSVILISRISSVGGEAMFCDFPKINHGILYDEEKYKPFSQVPTGEVFYYSCEYNFVSPSKSFWTRITCAEEGWSPTPKCLRLCFFPFVENGHSESSGQTHLEGDTVQIICNTGYRLQNNENNISCVERGWSTPPKCRSTISAEKCGPPPPIDNGDITSFLLSVYAPGSSVEYQCQNLYQLEGNNQITCRNGQWSEPPKCLDPCVISQEIMEKYNIKLKWTNQQKLYSRTGDIVEFVCKSGYHPTKSHSFRAMCQNGKLVYPSCEEK

SEQ ID NO: 5469 - protein, 290 aa, Homo sapiens
QMQGVNCTVSSELKTPLGDTTHTCPRCPEPKSCDTPPPCPRCPEPKSCDTPPPCPRCPEPKSCDTPPPCPRCPAPELLGGPSVFLFPPKPKDTLMISRTPEVTCVVVDVSHEDPEVQFKWYVDGVQVHNAKTKPREQQFNSTFRVVSVLTVLHQNWLDGKEYKCKVSNKALPAPIEKTISKTKGQPREPQVYTLPPSREEMTKNQVSLTCLVKGFYPSDIAVEWESSGQPENNYNTTPPMLDSDGSFFLYSKLTVDKSRWQQGNIFSCSVMHEALHNRFTQKSLSLSPGK

SEQ ID NO: 5470 - protein, 437 aa, Homo sapiens
MSWSLHPRNLILYFYALLFLSSTCVAYVATRDNCCILDERFGSYCPTTCGIADFLSTYQTKVDKDLQSLEDILHQVENKTSEVKQLIKAIQLTYNPDESSKPNMIDAATLKSRKMLEEIMKYEASILTHDSSIRYLQEIYNSNNQKIVNLKEKVAQLEAQCQEPCKDTVQIHDITGKDCQDIANKGAKQSGLYFIKPLKANQQFLVYCEIDGSGNGWTVFQKRLDGSVDFKKNWIQYKEGFGHLSPTGTTEFWLGNEKIHLISTQSAIPYALRVELEDWNGRTSTADYAMFKVGPEADKYRLTYAYFAGGDAGDAFDGFDFGDDPSDKFFTSHNGMQFSTWDNDNDKFEGNCAEQDGSGWWMNKCHAGHLNGVYYQGGTYSKASTPNGYDNGIIWATWKTRWYSMKKTTMKIIPFNRLTIGEGQQHHLGGAKQAGDV

SEQ ID NO: 5471 - protein, 453 aa, Homo sapiens
MSWSLHPRNLILYFYALLFLSSTCVAYVATRDNCCILDERFGSYCPTTCGIADFLSTYQTKVDKDLQSLEDILHQVENKTSEVKQLIKAIQLTYNPDESSKPNMIDAATLKSRKMLEEIMKYEASILTHDSSIRYLQEIYNSNNQKIVNLKEKVAQLEAQCQEPCKDTVQIHDITGKDCQDIANKGAKQSGLYFIKPLKANQQFLVYCEIDGSGNGWTVFQKRLDGSVDFKKNWIQYKEGFGHLSPTGTTEFWLGNEKIHLISTQSAIPYALRVELEDWNGRTSTADYAMFKVGPEADKYRLTYAYFAGGDAGDAFDGFDFGDDPSDKFFTSHNGMQFSTWDNDNDKFEGNCAEQDGSGWWMNKCHAGHLNGVYYQGGTYSKASTPNGYDNGIIWATWKTRWYSMKKTTMKIIPFNRLTIGEGQQHHLGGAKQVRPEHPAETEYDSLYPEDDL

SEQ ID NO: 5472 - protein, 188 aa, Homo sapiens
MFHQIWAALLYFYGIILNSIYQCPEHSQLTTLGVDGKEFPEVHLGQWYFIAGAAPTKEELATFDPVDNIVFNMAAGSAPMQLHLRATIRMKDGLCVPRKWIYHLTEGSTDLRTEGRPDMKTELFSSSCPGGIMLNETGQGYQRFLLYNRSPHPPEKCVEEFKSLTSCLDSKAFLLTPRNQEACELSNN

SEQ ID NO: 5473 - protein, 223 aa, Homo sapiens
MNKPLLWISVLTSLLEAFAHTDLSGKVFVFPRESVTDHVNLITPLEKPLQNFTLCFRAYSDLSRAYSLFSYNTQGRDNELLVYKERVGEYSLYIGRHKVTSKVIEKFPAPVHICVSWESSSGIAEFWINGTPLVKKGLRQGYFVEAQPKIVLGQEQDSYGGKFDRSQSFVGEIGDLYMWDSVLPPENILSAYQGTPLPANILDWQALNYEIRGYVIIKPLVWV

SEQ ID NO: 5474 - protein, 840 aa, Homo sapiens [sequence omitted]

SEQ ID NO: 5475 - protein, 840 aa, Homo sapiens [sequence omitted]

SEQ ID NO: 5476 - protein, 661 aa, Homo sapiens
MRLKNLTFIIILIISGELYAEEKPCGFPHVENGRIAQYYYTFKSFYFPMSIDKKLSFFCLAGYTTESGRQEEQTTCTTEGWSPEPRCFKKCTKPDLSNGYISDVKLLYKIQENMHYGCASGYKTTGGKDEEVVQCLSDGWSSQPTCRKEHETCLAPELYNGNYSTTQKTFKVKDKVQYECATGYYTAGGKKTEEVECLTYGWSLTPKCTKLKCSSLRLIENGYFHPVKQTYEEGDVVQFFCHENYYLSGSDLIQCYNFGWYPESPVCEGRRNRCPPPPLPINSKIQTHSTTYRHGEIVHIECELNFEIHGSAEIRCEDGKWTEPPKCIEGQEKVACEEPPFIENGAANLHSKIYYNGDKVTYACKSGYLLHGSNEITCNRGKWTLPPECVENNENCKHPPVVMNGAVADGILASYATGSSVEYRCNEYYLLRGSKISRCEQGKWSSPPVCLEPCTVNVDYMNRNNIEMKWKYEGKVLHGDLIDFVCKQGYDLSPLTPLSELSVQCNRGEVKYPLCTRKESKGMCTSPPLIKHGVIISSTVDTYENGSSVEYRCFDHHFLEGSREAYCLDGMWTTPPLCLEPCTLSFTEMEKNNLLLKWDFDNRPHILHGEYIEFICRGDTYPAELYITGSILRMQCDRGQLKYPRCIPRQSTLSYQEPLRT

SEQ ID NO: 5477 - protein, 591 aa, Homo sapiens
MKNSRTWAWRAPVELFLLCAALGCLSLPGSRGERPHSFGSNAVNKSFAKSRQMRSVDVTLMPIDCELSSWSSWTTCDPCQKKRYRYAYLLQPSQFHGEPCNFSDKEVEDCVTNRPCRSQVRCEGFVCAQTGRCVNRRLLCNGDNDCGDQSDEANCRRIYKKCQHEMDQYWGIGSLASGINLFTNSFEGPVLDHRYYAGGCSPHYILNTRFRKPYNVESYTPQTQGKYEFILKEYESYSDFERNVTEKMASKSGFSFGFKIPGIFELGISSQSDRGKHYIRRTKRFSHTKSVFLHARSDLEVAHYKLKPRSLMLHYEFLQRVKRLPLEYSYGEYRDLFRDFGTHYITEAVLGGIYEYTLVMNKEAMERGDYTLNNVHACAKNDFKIGGAIEEVYVSLGVSVGKCRGILNEIKDRNKRDTMVEDLVVLVRGGASEHITTLAYQELPTADLMQEWGDAVQYNPAIIKVKVEPLYELVTATDFAYSSTVRQNMKQALEEFQKEVSSCHCAPCQGNGVPVLKGSRCDCICPVGSQGLACEVSYRKNTPIDGKWNCWSNWSSCSGRRKTRQRQCNNPPPQNGGSPCSGPASETLDCS

SEQ ID NO: 5478 - protein, 499 aa, Homo sapiens
MKHSLNALLIFLIITSAWGGSKGPLDQLEKGGETAQSADPQWEQLNNKNLSMPLLPADFHKENTVTNDWIPEGEEDDDYLDLEKIFSEDDDYIDIVDSLSVSPTDSDVSAGNILQLFHGKSRIQRLNILNAKFAFNLYRVLKDQVNTFDNIFIAPVGISTAMGMISLGLKGETHEQVHSILHFKDFVNASSKYEITTIHNLFRKLTHRLFRRNFGYTLRSVNDLYIQKQFPILLDFKTKVREYYFAEAQIADFSDPAFISKTNNHIMKLTKGLIKDALENIDPATQMMILNCIYFKGSWVNKFPVEMTHNHNFRLNEREVVKVSMMQTKGNFLAANDQELDCDILQLEYVGGISMLIVVPHKMSGMKTLEAQLTPRVVERWQKSMTNRTREVLLPKFKLEKNYNLVESLKLMGIRMLFDKNGNMAGISDQRIAIDLFKHQGTITVNEEGTQATTVTTVGFMPLSTQVRFTVDRPFLFLIYEHRTSCLLFMGRVANPSRS

SEQ ID NO: 5479 - protein, 584 aa, Homo sapiens
MFAVVFFILSLMTCQPGVTAQEKVNQRVRRAATPAAVTCQLSNWSEWTDCFPCQDKKYRHRSLLQPNKFGGTICSGDIWDQASCSSSTTCVRQAQCGQDFQCKETGRCLKRHLVCNGDQDCLDGSDEDDCEDVRAIDEDCSQYEPIPGSQKAALGYNILTQEDAQSVYDASYYGGQCETVYNGEWRELRYDSTCERLYYGDDEKYFRKPYNFLKYHFEALADTGISSEFYDNANDLLSKVKKDKSDSFGVTIGIGPAGSPLLVGVGVSHSQDTSFLNELNKYNEKKFIFTRIFTKVQTAHFKMRKDDIMLDEGMLQSLMELPDQYNYGMYAKFINDYGTHYITSGSMGGIYEYILVIDKAKMESLGITSRDITTCFGGSLGIQYEDKINVGGGLSGDHCKKFGGGKTERARKAMAVEDIISRVRGGSSGWSGGLAQNRSTITYRSWGRSLKYNPVVIDFEMQPIHEVLRHTSLGPLEAKRQNLRRALDQYLMEFNACRCGPCFNNGVPILEGTSCRCQCRLGSLGAACEQTQTEGAKADGSWSCWSSWSVCRAGIQERRRECDNPAPQNGGASCPGRKVQTQAC

SEQ ID NO: 5480 - protein, 252 aa, Homo sapiens
MFFWCACCLMVAWRVSASDAEHCPELPPVDNSIFVAKEVEGQILGTYVCIKGYHLVGKKTLFCNASKEWDNTTTECRLGHCPDPVLVNGEFSSSGPVNVSDKITFMCNDHYILKGSNRSQCLEDHTWAPPFPICKSRDCDPPGNPVHGYFEGNNFTLGSTISYYCEDRYYLVGVQEQQCVDGEWSSALPVCKLIQEAPKPECEKALLAFQESKNLCEAMENFMQQLKESGMTMEELKYSLELKKAELKAKLL

SEQ ID NO: 5481 - protein, 494 aa, Homo sapiens
MLTDGDPTEGVTDRSQILKNVRNAIRGRFPLYNLGFGHNVDFNFLEVMSMENNGRAQRIYEDHDATQQLQGFYSQVAKPLLVDVDLQYPQDAVLALTQNHHKQYYEGSEIVVAGRIADNKQSSFKADVQAHGEGQEFSITCLVDEEEMKKLLRERGHMLENHVERLWAYLTIQELLAKRMKVDREERANLSSQALQMSLDYGFVTPLTSMSIRGMADQDGLKPTIDKPSEDSPPLEMLGPRRTFVLSALQPSPTHSSSNTQRLPDRVTGVDTDPHFIIHVPQKEDTLCFNINEEPGVILSLVQDPNTGFSVNGQLIGNKARSPGQHDGTYFGRLGIANPATDFQLEVTPQNITLNPGFGGPVFSWRDQAVLRQDGVVVTINKKRNLVVSVDDGGTFEVVLHRVWKGSSVHQDFLGFYVLDSHRMSARTHGLLGQFFHPIGFEVSDIHPGSDPTKPDATMVGFAKRLQQGPVAWGRGVLLVHSQQWGWTHRWCLH

SEQ ID NO: 5482 - protein, 440 aa, Homo sapiens
MGPPGSPWQWVTLLLGLLLPPAAPFWLLNVLFPPHTTPKAELSNHTRPVILVPGCLGNQLEAKLDKPDVVNWMCYRKTEDFFTIWLDLNMFLPLGVDCWIDNTRVVYNRSSGLVSNAPGVQIRVPGFGKTYSVEYLDSSKLAGYLHTLVQNLVNNGYVRDETVRAAPYDWRLEPGQQEEYYRKLAGLVEEMHAAYGKPVFLIGHSLGCLHLLYFLLRQPQAWKDRFIDGFISLGAPWGGSIKPMLVLASGDNQGIPIMSSIKLKEEQRITTTSPWMFPSRMAWPEDHVFISTPSFNYTGRDFQRFFADLHFEEGWYMWLQSRDLLAGLPAPGVEVYCLYGVGLPTPRTYIYDHGFPYTDPVGVLYEDGDDTVATRSTELCGLWQGRQPQPVHLLPLHGIQHLNMVFSNLTLEHINAILLGAYRQGPPASPTASPEPPPPE

SEQ ID NO: 5483 - protein, 382 aa, Homo sapiens
MGLLLPLALCILVLCCGKLSPPQLALNPSALLSRGCNDSDVLAVAGFALRDINKDRKDGYVLRLNRVNDAQEYRRGGLGSLFYLTLDVLETDCHVLRKKAWQDCGMRIFFESVYGQCKAIFYMNNPSRVLYLAAYNCTLRPVSKKKIYMTCPDCPSSIPTDSSNHQVLEAATESLAKYNNENTSKQYSLFKVTRASSQWVVGPSYFVEYLIKESPCTKSQASSCSLQSSDSVPVGLCKGSLTRTHWEKFVSVTCDFFESQAPATGSENSAVNQKPTNLPKVEESQQKNTPPTDSPSKAGPRGSVQYLPDLDDKNSQEKGPQEAFPVHLDLTTNPQGETLDISFLFLEPMEEKLVVLPFPKEKARTAECPGPAQNASPLVLPP

SEQ ID NO: 5484 - protein, 423 aa, Homo sapiens
MKLCSLAVLVPIVLFCEQHVFAFQSGQVLAALPRTSRQVQVLQNLTTTYEIVLWQPVTADLIVKKKQVHFFVNASDVDNVKAHLNVSGIPCSVLLADVEDLIQQQISNDTVSPRASASYYEQYHSLNEIYSWIEFITERHPDMLTKIHIGSSFEKYPLYVLKVSGKEQTAKNAIWIDCGIHAREWISPAFCLWFIGHITQFYGIIGQYTNLLRLVDFYVMPVVNVDGYDYSWKKNRMWRKNRSFYANNHCIGTDLNRNFASKHWCEEGASSSSCSETYCGLYPESEPEVKAVASFLRRNINQIKAYISMHSYSQHIVFPYSYTRSKSKDHEELSLVASEAVRAIEKTSKNTRYTHGHGSETLYLAPGGGDDWIYDLGIKYSFTIELRDTGTYGFLLPERYIKPTCREAFAAVSKIAWHVIRNV

SEQ ID NO: 5485 - protein, 360 aa, Homo sapiens [sequence omitted]

SEQ ID NO: 5486 - protein, 705 aa, Homo sapiens
MWLLYLLVPALFCRAGGSIPIPQKLFGEVTSPLFPKPYPNNFETTTVITVPTGYRVKLVFQQFDLEPSEGCFYDYVKISADKKSLGRFCGQLGSPLGNPPGKKEFMSQGNKMLLTFHTDFSNEENGTIMFYKGFLAYYQAVDLDECASRSKSGEEDPQPQCQHLCHNYVGGYFCSCRPGYELQEDRHSCQAECSSELYTEASGYISSLEYPRSYPPDLRCNYSIRVERGLTLHLKFLEPFDIDDHQQVHCPYDQLQIYANGKNIGEFCGKQRPPDLDTSSNAVDLLFFTDESGDSRGWKLRYTTEIIKCPQPKTLDEFTIIQNLQPQYQFRDYFIATCKQGYQLIEGNQVLHSFTAVCQDDGTWHRAMPRCKIKDCGQPRNLPNGDFRYTTTMGVNTYKARIQYYCHEPYYKMQTRAGSRESEQGVYTCTAQGIWKNEQKGEKIPRCLPVCGKPVNPVEQRQRIIGGQKAKMGNFPWQVFTNIHGRGGGALLGDRWILTAAHTLYPKEHEAQSNASLDVFLGHTNVEELMKLGNHPIRRVSVHPDYRQDESYNFEGDIALLELENSVTLGPNLLPICLPDNDTFYDLGLMGYVSGFGVMEEKIAHDLRFVRLPVANPQACENWLRGKNRMDVFSQNMFCAGHPSLKQDACQGDSGGVFAVRDPNTDRWVATGIVSWGIGCSRGYGFYTKVLNYVDWIKKEMEEED

SEQ ID NO: 5487 - protein, 585 aa, Homo sapiens
MTPPRLFWVWLLVAGTQGVNDGDMRLADGGATNQGRVEIFYRGQWGTVCDNLWDLTDASVVCRALGFENATQALGRAAFGQGSGPIMLDEVQCTGTEASLADCKSLGWLKSNCRHERDAGVVCTNETRSTHTLDLSRELSEALGQIFDSQRGCDLSISVNVQGEDALGFCGHTVILTANLEAQALWKEPGSNVTMSVDAECVPMVRDLLRYFYSRRIDITLSSVKCFHKLASAYGARQLQGYCASLFAILLPQDPSFQMPLDLYAYAVATGDALLEKLCLQFLAWNFEALTQAEAWPSVPTDLLQLLLPRSDLAVPSELALLKAVDTWSWGERASHEEVEGLVEKIRFPMMLPEELFELQFNLSLYWSHEALFQKKTLQALEFHTVPFQLLARYKGLNLTEDTYKPRIYTSPTWSAFVTDSSWSARKSQLVYQSRRGPLVKYSSDYFQAPSDYRYYPYQSFQTPQHPSFLFQDKRVSWSLVYLPTIQSCWNYGFSCSSDELPVLGLTKSGGSDRTIAYENKALMLCEGLFVADVTDFEGWKAAIPSALDTNSSKSTSSFPCPAGHFNGFRTVIRPFYLTNSSGVD

SEQ ID NO: 5488 - protein, 688 aa, Homo sapiens
MWCIVLFSLLAWVYAEPTMYGEILSPNYPQAYPSEVEKSWDIEVPEGYGIHLYFTHLDIELSENCAYDSVQIISGDTEEGRLCGQRSSNNPHSPIVEEFQVPYNKLQVIFKSDFSNEERFTGFAAYYVATDINECTDFVDVPCSHFCNNFIGGYFCSCPPEYFLHDDMKNCGVNCSGDVFTALIGEIASPNYPKPYPENSRCEYQIRLEKGFQVVVTLRREDFDVEAADSAGNCLDSLVFVAGDRQFGPYCGHGFPGPLNIETKSNALDIIFQTDLTGQKKGWKLRYHGDPMPCPKEDTPNSVWEPAKAKYVFRDVVQITCLDGFEVVEGRVGATSFYSTCQSNGKWSNSKLKCQPVDCGIPESIENGKVEDPESTLFGSVIRYTCEEPYYYMENGGGGEYHCAGNGSWVNEVLGPELPKCVPVCGVPREPFEEKQRIIGGSDADIKNFPWQVFFDNPWAGGALINEYWVLTAAHVVEGNREPTMYVGSTSVQTSRLAKSKMLTPEHVFIHPGWKLLEVPEGRTNFDNDIALVRLKDPVKMGPTVSPICLPGTSSDYNLMDGDLGLISGWGRTEKRDRAVRLKAARLPVAPLRKCKEVKVEKPTADAEAYVFTPNMICAGGEKGMDSCKGDSGGAFAVQDPNDKTKFYAAGLVSWGPQCGTYGLYTRVKNYVDWIMKTMQENSTPRED

SEQ ID NO: 5489 - protein, 752 aa, Homo sapiens
MGPLMVLFCLLFLYPGLADSAPSCPQNVNISGGTFTLSHGWAPGSLLTYSCPQGLYPSPASRLCKSSGQWQTPGATRSLSKAVCKPVRCPAPVSFENGIYTPRLGSYPVGGNVSFECEDGFILRGSPVRQCRPNGMWDGETAVCDNGAGHCPNPGISLGAVRTGFRFGHGDKVRYRCSSNLVLTGSSERECQGNGVWSGTEPICRQPYSYDFPEDVAPALGTSFSHMLGATNPTQKTKESLGRKIQIQRSGHLNLYLLLDCSQSVSENDFLIFKESASLMVDRIFSFEINVSVAIITFASEPKVLMSVLNDNSRDMTEVISSLENANYKDHENGTGTNTYAALNSVYLMMNNQMRLLGMETMAWQEIRHAIILLTDGKSNMGGSPKTAVDHIREILNINQKRNDYLDIYAIGVGKLDVDWRELNELGSKKDGERHAFILQDTKALHQVFEHMLDVSKLTDTICGVGNMSANASDQERTPWHVTIKPKSQETCRGALISDQWVLTAAHCFRDGNDHSLWRVNVGDPKSQWGKEFLIEKAVISPGFDVFAKKNQGILEFYGDDIALLKLAQKVKMSTHARPICLPCTMEANLALRRPQGSTCRDHENELLNKQSVPAHFVALNGSKLNINLKMGVEWTSCAEVVSQEKTMFPNLTDVREVVTDQFLCSGTQEDESPCKGESGGAVFLERRFRFFQVGLVSWGLYNPCLGSADKNSRKRAPRSKVPPPRDFHINLFRMQPWLRQHLGDVLNFLPL

SEQ ID NO: 5490 - protein, 493 aa, Homo sapiens
MALFGALFLALLAGAHAEFPGCKIRVTSKALELVKQEGLRFLEQELETITIPDLRGKEGHFYYNISEVKVTELQLTSSELDFQPQQELMLQITNASLGLRFRRQLLYWFFYDGGYINASAEGVSIRTGLELSRDPAGRMKVSNVSCQASVSRMHAAFGGTFKKVYDFLSTFITSGMRFLLNQQICPVLYHAGTVLLNSLLDTVPVRSSVDELVGIDYSLMKDPVASTSNLDMDFRGAFFPLTERNWSLPNRAVEPQLQEEERMVYVAFSEFFFDSAMESYFRAGALQLLLVGDKVPHDLDMLLRATYFGSIVLLSPAVIDSPLKLELRVLAPPRCTIKPSGTTISVTASVTIALVPPDQPEVQLSSMTMDARLSAKMALRGKALRTQLDLRRFRIYSNHSALESLALIPLQAPLKTMLQIGVMPMLNERTWRGVQIPLPEGINFVHEVVTNHAGFLTIGADLHFAKGLREVIEKNRPADVRASTAPTPSTAAV

SEQ ID NO: 5491 - protein, 441 aa, Homo sapiens
MALFGALFLALLAGAHAEFPGCKIRVTSKALELVKQEGLRFLEQELETITIPDLRGKEGHFYYNISEVKVTELQLTSSELDFQPQQELMLQITNASLGLRFRRQLLYWFLKVYDFLSTFITSGMRFLLNQQICPVLYHAGTVLLNSLLDTVPVRSSVDELVGIDYSLMKDPVASTSNLDMDFRGAFFPLTERNWSLPNRAVEPQLQEEERMVYVAFSEFFFDSAMESYFRAGALQLLLVGDKVPHDLDMLLRATYFGSIVLLSPAVIDSPLKLELRVLAPPRCTIKPSGTTISVTASVTIALVPPDQPEVQLSSMTMDARLSAKMALRGKALRTQLDLRRFRIYSNHSALESLALIPLQAPLKTMLQIGVMPMLNERTWRGVQIPLPEGINFVHEVVTNHAGFLTIGADLHFAKGLREVIEKNRPADVRASTAPTPSTAAV

SEQ ID NO: 5492 - protein, 291 aa, Homo sapiens
MQRARPTLWAAALTLLVLLRGPPVARAGASSGGLGPVVRCEPCDARALAQCAPPPAVCAELVREPGCGCCLTCALSEGQPCGIYTERCGSGLRCQPSPDEARPLQALLDGRGLCVNASAVSRLRAYLLPAPPAPGNASESEEDRSAGSVESPSVSSTHRVSDPKFHPLHSKIIIIKKGHAKDSQRYKVDYESQSTDTQNFSSESKRETEYGPCRREMEDTLNHLKFLNVLSPRGVHIPNCDKKGFYKKKQCRPSKGRKRGFCWCVDKYGQPLPGYTTKGKEDVHCYSMQSK

SEQ ID NO: 5493 - protein, 487 aa, Homo sapiens
MPGPRVWGKYLWRSPHSKGCPGAMWWLLLWGVLQACPTRGSVLLAQELPQQLTSPGYPEPYGKGQESSTDIKAPEGFAVRLVFQDFDLEPSQDCAGDSVTISFVGSDPSQFCGQQGSPLGRPPGQREFVSSGRSLRLTFRTQPSSENKTAHLHKGFLALYQTVAVNYSQPISEASRGSEAINAPGDNPAKVQNHCQEPYYQAAAAGALTCATPGTWKDRQDGEEVLQCMPVCGRPVTPIAQNQTTLGSSRAKLGNFPWQAFTSIHGRGGGALLGDRWILTAAHTVYPKDSVSLRKNQSVNVFLGHTAIDEMLKLGNHPVHRVVVHPDYRQNESHNFSGDIALLELQHSIPLGPNVLPVCLPDNETLYRSGLLGYVSGFGMEMGWLTTELKYSRLPVAPREACNAWLQKRQRPEVFSDNMFCVGDETQRHSVCQGDSGSVYVVWDNHAHHWVATGIVSWGIGCGEGYDFYTKVLSYVDWIKGVMNGKN

SEQ ID NO: 5494 - protein, 491 aa, Homo sapiens
MALLWGLLVLSWSCLQGPCSVFSPVSAMEPLGRQLTSGPNQEQVSPLTLLKLGNQEPGGQTALKSPPGVCSRDPTPEQTHRLARAMMAFTADLFSLVAQTSTCPNLILSPLSVALALSHLALGAQNHTLQRLQQVLHAGSGPCLPHLLSRLCQDLGPGAFRLAARMYLQKGFPIKEDFLEQSEQLFGAKPVSLTGKQEDDLANINQWVKEATEGKIQEFLSGLPEDTVLLLLNAIHFQGFWRNKFDPSLTQRDSFHLDEQFTVPVEMMQARTYPLRWFLLEQPEIQVAHFPFKNNMSFVVLVPTHFEWNVSQVLANLSWDTLHPPLVWERPTKVRLPKLYLKHQMDLVATLSQLGLQELFQAPDLRGISEQSLVVSGVQHQSTLELSEVGVEAAAATSIAMSRMSLSSFSVNRPFLFFIFEDTTGLPLFVGSVRNPNPSAPRELKEQQDSPGNKDFLQSLKGFPRGDKLFGPDLKLVPPMEEDYPQFGSPK

SEQ ID NO: 5495 - protein, 1236 aa, Homo sapiens
MVAAAAATEARLRRRTAATAALAGRSGGPHWDWDVTRAGRPGLGAGLRLPRLLSPPLRPRLLLLLLLLSPPLLLLLLPCEAEAAAAAAAVSGSAAAEAKECDRPCVNGGRCNPGTGQCVCPAGWVGEQCQHCGGRFRLTGSSGFVTDGPGNYKYKTKCTWLIEGQPNRIMRLRFNHFATECSWDHLYVYDGDSIYAPLVAAFSGLIVPERDGNETVPEVVATSGYALLHFFSDAAYNLTGFNITYSFDMCPNNCSGRGECKISNSSDTVECECSENWKGEACDIPHCTDNCGFPHRGICNSSDVRGCSCFSDWQGPGCSVPVPANQSFWTREEYSNLKLPRASHKAVVNGNIMWVVGGYMFNHSDYNMVLAYDLASREWLPLNRSVNNVVVRYGHSLALYKDKIYMYGGKIDSTGNVTNELRVFHIHNESWVLLTPKAKEQYAVVGHSAHIVTLKNGRVVMLVIFGHCPLYGYISNVQEYDLDKNTWSILHTQGALVQGGYGHSSVYDHRTRALYVHGGYKAFSANKYRLADDLYRYDVDTQMWTILKDSRFFRYLHTAVIVSGTMLVFGGNTHNDTSMSHGAKCFSSDFMAYDIACDRWSVLPRPDLHHDVNRFGHSAVLHNSTMYVFGGFNSLLLSDILVFTSEQCDAHRSEAACLAAGPGIRCLLTMTDVTSTQIVTAAQPTPMTATGAMTIVSPGTTAAQKARYENCPKDNPMYYCNKKTSCRSCALDQNCQWEPRNQECIALPENICGIGWHLVGNSCLKITTAKENYDNAKLFCRNHNALLASLTTQKKVEFVLKQLRIMQSSQSMSKLTLTPWVGLRKINVSYWCWEDMSPFTNSLLQWMPSEPSDAGFCGILSEPSTRGLKAATCINPLNGSVCERPANHSAKQCRTPCALRTACGDCTSGSSECMWCSNMKQCVDSNAYVASFPFGQCMEWYTMSTCPPENCSGYCTCSHCLEQPGCGWCTDPSNTGKGKCIEGSYKGPVKMPSQAPTGNFYPQPLLNSSMCLEDSRYNWSFIHCPACQCNGHSKCINQSICEKCENLTTGKHCETCISGFYGDPTNGGKCQPCKCNGHASLCNTNTGKCFCTTKGVKGDECQLCEVENRYQGNPLRGTCYYTLLIDYQFTFSLSQEDDRYYTAINFVATPDEQNRDLDMFINASKNFNLNITWAASFSAGTQAGEEMPVVSKTNIKEYKDSFSNEKFDFRNHPNITFFVYVSNFTWPIKIQVQTEQ

SEQ ID NO: 5496 - protein, 1198 aa, Homo sapiens
MVAAAAATEARLRRRTAATAALAGRSGGPHCVNGGRCNPGTGQCVCPAGWVGEQCQHCGGRFRLTGSSGFVTDGPGNYKYKTKCTWLIEGQPNRIMRLRFNHFATECSWDHLYVYDGDSIYAPLVAAFSGLIVPERDGNETVPEVVATSGYALLHFFSDAAYNLTGFNITYSFDMCPNNCSGRGECKISNSSDTVECECSENWKGEACDIPHCTDNCGFPHRGICNSSDVRGCSCFSDWQGPGCSVPVPANQSFWTREEYSNLKLPRASHKAVVNGNIMWVVGGYMFNHSDYNMVLAYDLASREWLPLNRSVNNVVVRYGHSLALYKDKIYMYGGKIDSTGNVTNELRVFHIHNESWVLLTPKAKEQYAVVGHSAHIVTLKNGRVVMLVIFGHCPLYGYISNVQEYDLDKNTWSILHTQGALVQGGYGHSSVYDHRTRALYVHGGYKAFSANKYRLADDLYRYDVDTQMWTILKDSRFFRYLHTAVIVSGTMLVFGGNTHNDTSMSHGAKCFSSDFMAYDIACDRWSVLPRPDSTMMSTDLAIPAVLHNSTMYVFGGFNSLLLSDILVFTSEQCDAHRSEAACLAAGPGIRCVWNTGSSQCISWALATDEQEEKLKSECFSKRTLDHDRCDQHTDCYSCTANTNDCHWCNDHCVPRNHSCSEGQISIFRYENCPKDNPMYYCNKKTSCRSCALDQNCQWEPRNQECIALPENICGIGWHLVGNSCLKITTAKENYDNAKLFCRNHNALLASLTTQKKVEFVLKQLRIMQSSQSMSKLTLTPWVGLRKINVSYWCWEDMSPFTNSLLQWMPSEPSDAGFCGILSEPSTRGLKAATCINPLNGSVCERPANHSAKQCRTPCALRTACGDCTSGSSECMWCSNMKQCVDSNAYVASFPFGQCMEWYTMSTCPPENCSGYCTCSHCLEQPGCGWCTDPSNTGKGKCIEGSYKGPVKMPSQAPTGNFYPQPLLNSSMCLEDSRYNWSFIHCPACQCNGHSKCINQSICEKCENLTTGKHCETCISGFYGDPTNGGKCQPCKCNGHASLCNTNTGKCFCTTKGVKGDECQLCEVENRYQGNPLRGTCYYTLLIDYQFTFSLSQEDDRYYTAINFVATPDEQNRDLDMFINASKNFNLNITWAASFSAGTQAGEEMPVVSKTNIKEYKDSFSNEKFDFRNHPNITFFVYVSNFTWPIKIQVQTEQ

SEQ ID NO: 5497 - protein, 1272 aa, Homo sapiens
MVAAAAATEARLRRRTAATAALAGRSGGPHWDWDVTRAGRPGLGAGLRLPRLLSPPLRPRLLLLLLLLSPPLLLLLLPCEAEAAAAAAAVSGSAAAEAKECDRPCVNGGRCNPGTGQCVCPAGWVGEQCQHCGGRFRLTGSSGFVTDGPGNYKYKTKCTWLIEGQPNRIMRLRFNHFATECSWDHLYVYDGDSIYAPLVAAFSGLIVPERDGNETVPEVVATSGYALLHFFSDAAYNLTGFNITYSFDMCPNNCSGRGECKISNSSDTVECECSENWKGEACDIPHCTDNCGFPHRGICNSSDVRGCSCFSDWQGPGCSVPVPANQSFWTREEYSNLKLPRASHKAVVNGNIMWVVGGYMFNHSDYNMVLAYDLASREWLPLNRSVNNVVVRYGHSLALYKDKIYMYGGKIDSTGNVTNELRVFHIHNESWVLLTPKAKEQYAVVGHSAHIVTLKNGRVVMLVIFGHCPLYGYISNVQEYDLDKNTWSILHTQGALVQGGYGHSSVYDHRTRALYVHGGYKAFSANKYRLADDLYRYDVDTQMWTILKDSRFFRYLHTAVIVSGTMLVFGGNTHNDTSMSHGAKCFSSDFMAYDIACDRWSVLPRPDLHHDVNRFGHSAVLHNSTMYVFGGFNSLLLSDILVFTSEQCDAHRSEAACLAAGPGIRCVWNTGSSQCISWALATDEQEEKLKSECFSKRTLDHDRCDQHTDCYSCTANTNDCHWCNDHCVPRNHSCSEGQISIFRYENCPKDNPMYYCNKKTSCRSCALDQNCQWEPRNQECIALPENICGIGWHLVGNSCLKITTAKENYDNAKLFCRNHNALLASLTTQKKVEFVLKQLRIMQSSQSMSKLTLTPWVGLRKINVSYWCWEDMSPFTNSLLQWMPSEPSDAGFCGILSEPSTRGLKAATCINPLNGSVCERPANHSAKQCRTPCALRTACGDCTSGSSECMWCSNMKQCVDSNAYVASFPFGQCMEWYTMSTCPPENCSGYCTCSHCLEQPGCGWCTDPSNTGKGKCIEGSYKGPVKMPSQAPTGNFYPQPLLNSSMCLEDSRYNWSFIHCPACQCNGHSKCINQSICEKCENLTTGKHCETCISGFYGDPTNGGKCQPCKCNGHASLCNTNTGKCFCTTKGVKGDECQLCEVENRYQGNPLRGTCYYTLLIDYQFTFSLSQEDDRYYTAINFVATPDEQNRDLDMFINASKNFNLNITWAASFSAGTQAGEEMPVVSKTNIKEYKDSFSNEKFDFRNHPNITFFVYVSNFTWPIKIQVQTEQ

SEQ ID NO: 5498 - protein, 1393 aa, Homo sapiens
MVAAAAATEARLRRRTAATAALAGRSGGPHWDWDVTRAGRPGLGAGLRLPRLLSPPLRPRLLLLLLLLSPPLLLLLLPCEAEAAAAAAAVSGSAAAEAKECDRPCVNGGRCNPGTGQCVCPAGWVGEQCQHCGGRFRLTGSSGFVTDGPGNYKYKTKCTWLIEGQPNRIMRLRFNHFATECSWDHLYVYDGDSIYAPLVAAFSGLIVPERDGNETVPEVVATSGYALLHFFSDAAYNLTGFNITYSFDMCPNNCSGRGECKISNSSDTVECECSENWKGEACDIPHCTDNCGFPHRGICNSSDVRGCSCFSDWQGPGCSVPVPANQSFWTREEYSNLKLPRASHKAVVNGNIMWVVGGYMFNHSDYNMVLAYDLASREWLPLNRSVNNVVVRYGHSLALYKDKIYMYGGKIDSTGNVTNELRVFHIHNESWVLLTPKAKEQYAVVGHSAHIVTLKNGRVVMLVIFGHCPLYGYISNVQEYDLDKNTWSILHTQGALVQGGYGHSSVYDHRTRALYVHGGYKAFSANKYRLADDLYRYDVDTQMWTILKDSRFFRYLHTAVIVSGTMLVFGGNTHNDTSMSHGAKCFSSDFMAYDIACDRWSVLPRPDLHHDVNRFGHSAVLHNSTMYVFGGFNSLLLSDILVFTSEQCDAHRSEAACLAAGPGIRCLLTMTDVTSTQIVTAAQPTPMTATGAMTIVSPGTTAAQKARYENCPKDNPMYYCNKKTSCRSCALDQNCQWEPRNQECIALPENICGIGWHLVGNSCLKITTAKENYDNAKLFCRNHNALLASLTTQKKVEFVLKQLRIMQSSQSMSKLTLTPWVGLRKINVSYWCWEDMSPFTNSLLQWMPSEPSDAGFCGILSEPSTRGLKAATCINPLNGSVCERPANHSAKQCRTPCALRTACGDCTSGSSECMWCSNMKQCVDSNAYVASFPFGQCMEWYTMSTCPPENCSGYCTCSHCLEQPGCGWCTDPSNTGKGKCIEGSYKGPVKMPSQAPTGNFYPQPLLNSSMCLEDSRYNWSFIHCPACQCNGHSKCINQSICEKCENLTTGKHCETCISGFYGDPTNGGKCQPCKCNGHASLCNTNTGKCFCTTKGVKGDECQLCEVENRYQGNPLRGTCYYTLLIDYQFTFSLSQEDDRYYTAINFVATPDEQNRDLDMFINASKNFNLNITWAASFSAGTQAGEEMPVVSKTNIKEYKDSFSNEKFDFRNHPNITFFVYVSNFTWPIKIQIAFSQHSNFMDLVQFFVTFFSCFLSLLLVAAVVWKIKQSCWASRRREQLLREMQQMASRPFASVNVALETDEEPPDLIGGSIKTVPKPIALEPCFGNKAAVLSVFVRLPRGLGGIPPPGQSGLAVASALVDISQQMPIVYKEKSGAVRNRKQQPPAQPGTCI

SEQ ID NO: 5499 - protein, 1429 aa, Homo sapiens
MVAAAAATEARLRRRTAATAALAGRSGGPHWDWDVTRAGRPGLGAGLRLPRLLSPPLRPRLLLLLLLLSPPLLLLLLPCEAEAAAAAAAVSGSAAAEAKECDRPCVNGGRCNPGTGQCVCPAGWVGEQCQHCGGRFRLTGSSGFVTDGPGNYKYKTKCTWLIEGQPNRIMRLRFNHFATECSWDHLYVYDGDSIYAPLVAAFSGLIVPERDGNETVPEVVATSGYALLHFFSDAAYNLTGFNITYSFDMCPNNCSGRGECKISNSSDTVECECSENWKGEACDIPHCTDNCGFPHRGICNSSDVRGCSCFSDWQGPGCSVPVPANQSFWTREEYSNLKLPRASHKAVVNGNIMWVVGGYMFNHSDYNMVLAYDLASREWLPLNRSVNNVVVRYGHSLALYKDKIYMYGGKIDSTGNVTNELRVFHIHNESWVLLTPKAKEQYAVVGHSAHIVTLKNGRVVMLVIFGHCPLYGYISNVQEYDLDKNTWSILHTQGALVQGGYGHSSVYDHRTRALYVHGGYKAFSANKYRLADDLYRYDVDTQMWTILKDSRFFRYLHTAVIVSGTMLVFGGNTHNDTSMSHGAKCFSSDFMAYDIACDRWSVLPRPDLHHDVNRFGHSAVLHNSTMYVFGGFNSLLLSDILVFTSEQCDAHRSEAACLAAGPGIRCVWNTGSSQCISWALATDEQEEKLKSECFSKRTLDHDRCDQHTDCYSCTANTNDCHWCNDHCVPRNHSCSEGQISIFRYENCPKDNPMYYCNKKTSCRSCALDQNCQWEPRNQECIALPENICGIGWHLVGNSCLKITTAKENYDNAKLFCRNHNALLASLTTQKKVEFVLKQLRIMQSSQSMSKLTLTPWVGLRKINVSYWCWEDMSPFTNSLLQWMPSEPSDAGFCGILSEPSTRGLKAATCINPLNGSVCERPANHSAKQCRTPCALRTACGDCTSGSSECMWCSNMKQCVDSNAYVASFPFGQCMEWYTMSTCPPENCSGYCTCSHCLEQPGCGWCTDPSNTGKGKCIEGSYKGPVKMPSQAPTGNFYPQPLLNSSMCLEDSRYNWSFIHCPACQCNGHSKCINQSICEKCENLTTGKHCETCISGFYGDPTNGGKCQPCKCNGHASLCNTNTGKCFCTTKGVKGDECQLCEVENRYQGNPLRGTCYYTLLIDYQFTFSLSQEDDRYYTAINFVATPDEQNRDLDMFINASKNFNLNITWAASFSAGTQAGEEMPVVSKTNIKEYKDSFSNEKFDFRNHPNITFFVYVSNFTWPIKIQIAFSQHSNFMDLVQFFVTFFSCFLSLLLVAAVVWKIKQSCWASRRREQLLREMQQMASRPFASVNVALETDEEPPDLIGGSIKTVPKPIALEPCFGNKAAVLSVFVRLPRGLGGIPPPGQSGLAVASALVDISQQMPIVYKEKSGAVRNRKQQPPAQPGTCI

SEQ ID NO: 5500 - protein, 130 aa, Homo sapiens
MRLFTGIVFCSLVMGVTSESWRSFFKEALQGVGDMGRAYWDIMISNHQNSNRYLYARGNYDAAQRGPGGVWAAKLISRSRVYLQGLIDYYLFGNSSTVLEDSKSNEKAEEWGRSGKDPDRFRPDGLPKKY

SEQ ID NO: 5501 - protein, 406 aa, Homo sapiens
MQLFLLLCLVLLSPQGASLHRHHPREMKKRVEDLHVGATVAPSSRRDFTFDLYRALASAAPSQNIFFSPVSISMSLAMLSLGAGSSTKMQILEGLGLNLQKSSEKELHRGFQQLLQELNQPRDGFQLSLGNALFTDLVVDLQDTFVSAMKTLYLADTFPTNFRDSAGAMKQINDYVAKQTKGKIVDLLKNLDSNAVVIMVNYIFFKAKWETSFNHKGTQEQDFYVTSETVVRVPMMSREDQYHYLLDRNLSCRVVGVPYQGNATALFILPSEGKMQQVENGLSEKTLRKWLKMFKKRQLELYLPKFSIEGSYQLEKVLPSLGISNVFTSHADLSGISNHSNIQVSEMVHKAVVEVDESGTRAAAATGTIFTFRSARLNSQRLVFNRPFLMFIVDNNILFLGKVNRP

SEQ ID NO: 5502 - protein, 491 aa, Homo sapiens
MKRMVSWSFHKLKTMKHLLLLLLCVFLVKSQGVNDNEEGFFSARGHRPLDKKREEAPSLRPAPPPISGGGYRARPAKAAATQKKVERKAPDAGGCLHADPDLGVLCPTGCQLQEALLQQERPIRNSVDELNNNVEAVSQTSSSSFQYMYLLKDLWQKRQKQVKDNENVVNEYSSELEKHQLYIDETVNSNIPTNLRVLRSILENLRSKIQKLESDVSAQMEYCRTPCTVSCNIPVVSGKECEEIIRKGGETSEMYLIQPDSSVKPYRVYCDMNTENGGWTVIQNRQDGSVDFGRKWDPYKQGFGNVATNTDGKNYCGLPGEYWLGNDKISQLTRMGPTELLIEMEDWKGDKVKAHYGGFTVQNEANKYQISVNKYRGTAGNALMDGASQLMGENRTMTIHNGMFFSTYDRDNDGWLTSDPRKQCSKEDGGGWWYNRCHAANPNGRYYWGGQYTWDMAKHGTDDGVVWMNWKGSWYSMRKMSMKIRPFFPQQ

SEQ ID NO: 5503 - protein, 655 aa, Homo sapiens
MGRWAWVPSPWPPPGLGPFLLLLLLLLLLPRGFQPQPGGNRTESPEPNATATPAIPTILVTSVTSETPATSAPEAEGPQSGGLPPPPRAVPSSSSPQAQALTEDGRPCRFPFRYGGRMLHACTSEGSAHRKWCATTHNYDRDRAWGYCVEATPPPGGPAALDPCASGPCLNGGSCSNTQDPQSYHCSCPRAFTGKDCGTEKCFDETRYEYLEGGDRWARVRQGHVEQCECFGGRTWCEGTRHTACLSSPCLNGGTCHLIVATGTTVCACPPGFAGRLCNIEPDERCFLGNGTGYRGVASTSASGLSCLAWNSDLLYQELHVDSVGAAALLGLGPHAYCRNPDNDERPWCYVVKDSALSWEYCRLEACESLTRVQLSPDLLATLPEPASPGRQACGRRHKKRTFLRPRIIGGSSSLPGSHPWLAAIYIGDSFCAGSLVHTCWVVSAAHCFSHSPPRDSVSVVLGQHFFNRTTDVTQTFGIEKYIPYTLYSVFNPSDHDLVLIRLKKKGDRCATRSQFVQPICLPEPGSTFPAGHKCQIAGWGHLDENVSGYSSSLREALVPLVADHKCSSPEVYGADISPNMLCAGYFDCKSDACQGDSGGPLACEKNGVAYLYGIISWGDGCGRLHKPGVYTRVANYVDWINDRIRPPRRLVAPS

SEQ ID NO: 5504 - protein, 881 aa, Homo sapiens
RERQRGRQPAGLFLLLKTYPALTEEIFLLSSALNVFPNMKVISLFILVGFIGEFQSFSSASSPVNCQWDFYAPWSECNGCTKTQTRRRSVAVYGQYGGQPCVGNAFETQSCEPTRGCPTEEGCGERFRCFSGQCISKSLVCNGDSDCDEDSADEDRCEDSERRPSCDIDKPPPNIELTGNGYNELTGQFRNRVINTKSFGGQCRKVFSGDGKDFYRLSGNVLSYTFQVKINNDFNYEFYNSTWSYVKHTSTEHTSSSRKRSFFRSSSSSSRSYTSHTNEIHKGKSYQLLVVENTVEVAQFINNNPEFLQLAEPFWKELSHLPSLYDYSAYRRLIDQYGTHYLQSGSLGGEYRVLFYVDSEKLKQNDFNSVEEKKCKSSGWHFVVKFSSHGCKELENALKAASGTQNNVLRGEPFIRGGGAGFISGLSYLELDNPAGNKRRYSAWAESVTNLPQVIKQKLTPLYELVKEVPCASVKKLYLKWALEEYLDEFDPCHCRPCQNGGLATVEGTHCLCHCKPYTFGAACEQGVLVGNQAGGVDGGWSCWSSWSPCVQGKKTRSRECNNPPPSGGGRSCVGETTESTQCEDEELEHLRLLEPHCFPLSLVPTEFCPSPPALKDGFVQDEGTMFPVGKNVVYTCNEGYSLIGNPVARCGEDLRWLVGEMHCQKIACVLPVLMDGIQSHPQKPFYTVGEKVTVSCSGGMSLEGPSAFLCGSSLKWSPEMKNARCVQKENPLTQAVPKCQRWEKLQNSRCVCKMPYECGPSLDVCAQDERSKRILPLTVCKMHVLHCQGRNYTLTGRDSCTLPASAEKACGACPLWGKCDAESSKCVCREASECEEEGFSICVEVNGKEQTMSECEAGALRCRGQSISVTSIRPCAAETQ

SEQ ID NO: 5505 - protein, 190 aa, Homo sapiens
MATHHTLWMGLALLGVLGDLQAAPEAQVSVQPNFQQDKFLGRWFSAGLASNSSWLREKKAALSMCKSVVAPATDGGLNLTSTFLRKNQCETRTMLLQPAGSLGSYSYRSPHWGSTYSVSVVETDYDQYALLYSQGSKGPGEDFRMATLYSRTQTPRAELKEKFTAFCKAQGFTEDTIVFLPQTDKCMTEQ

SEQ ID NO: 5506 - protein, 885 aa, Homo sapiens
MVALSHLGSALQLGSLCFPRSPFRLLGKRSLPEGVANGIEVYSTKINSKVTSRFAHNVVTMRAVNRADTAKEVSFDVELPKTAFITNFTLTIDGVTYPGNVKEKEVAKKQYEKAVSQGKTAGLVKASGRKLEKFTVSVNVAAGSKVTFELTYEELLKRHKGKYEMYLKVQPKQLVKHFEIEVDIFEPQGISMLDAEASFITNDLLGSALTKSFSGKKGHVSFKPSLDQQRSCPTCTDSLLNGDFTITYDVNRESPGNVQIVNGYFVHFFAPQGLPVVPKNVAFVIDISGSMAGRKLEQTKEALLRILEDMKEEDYLNFILFSGDVSTWKEHLVQATPENLQEARTFVKSMEDKGMTNINDGLLRGISMLNKAREEHRIPERSTSIVIMLTDGDANVGESRPEKIQENVRNAIGGKFPLYNLGFGNNLNYNFLENMALENHGFARRIYEDSDADLQLQGFYEEVANPLLTGVEMEYPENAILDLTQNTYQHFYDGSEIVVAGRLVDEDMNSFKADVKGHGATNDLTFTEEVDMKEMEKALQERDYIFGNYIERLWAYLTIEQLLEKRKNAHGEEKENLTARALDLSLKYHFVTPLTSMVVTKPEDNEDERAIADKPGEDAEATPVSPAMSYLTSYQPPQNPYYYVDGDPHFIIQIPEKDDALCFNIDEAPGTVLRLIQDAVTGLTVNGQITGDKRGSPDSKTRKTYFGKLGIRNAQMDFQVEVTTEKITCGTGRASTFSWLDTVTVTQDGLSMMINRKNMVVSFGDGVTFVVVLHQVWKKHPVHRDFLGFYVVDSHRMSAQTHGLLGQFFQPFDFKVSDIRPGSDPTKPDATLVVKNHQLIVTRGSQKDYRKDASIGTKVVCWFVHNNGEGLIDGVHTDYIVPNLF

SEQ ID NO: 5507 - protein, 1228 aa, Homo sapiens
MKGARLFVLLSSLWSGGIGLNNSKHSWTIPEDGNSQKTMPSASVPPNKIQSLQILPTTRVMSAEIATTPEARTSEDSLLKSTLPPSETSAPAEGVRNQTLTSTEKAEGVVKLQNLTLPTNASIKFNPGAESVVLSNSTLKFLQSFARKSNEQATSLNTVGGTGGIGGVGGTGGVGNRAPRETYLSRGDSSSSQRTDYQKSNFETTRGKNWCAYVHTRLSPTVTLDNQVTYVPGGKGPCGWTGGSCPQRSQKISNPVYRMQHKIVTSLDWRCCPGYSGPKCQLRAQEQQSLIHTNQAESHTAVGRGVAEQQQQQGCGDPEVMQKMTDQVNYQAMKLTLLQKKIDNISLTVNDVRNTYSSLEGKVSEDKSREFQSLLKGLKSKSINVLIRDIVREQFKIFQNDMQETVAQLFKTVSSLSEDLESTRQIIQKVNESVVSIAAQQKFVLVQENRPTLTDIVELRNHIVNVRQEMTLTCEKPIKELEVKQTHLEGALEQEHSRSILYYESLNKTLSKLKEVHEQLLSTEQVSDQKNAPAAESVSNNVTEYMSTLHENIKKQSLMMLQMFEDLHIQESKINNLTVSLEMEKESLRGECEDMLSKCRNDFKFQLKDTEENLHVLNQTLAEVLFPMDNKMDKMSEQLNDLTYDMEILQPLLEQGASLRQTMTYEQPKEAIVIRKKIENLTSAVNSLNFIIKELTKRHNLLRNEVQGRDDALERRINEYALEMEDGLNKTMTIINNAIDFIQDNYALKETLSTIKDNSEIHHKCTSDMETILTFIPQFHRLNDSIQTLVNDNQRYNFVLQVAKTLAGIPRDEKLNQSNFQKMYQMFNETTSQVRKYQQNMSHLEEKLLLTTKISKNFETRLQDIESKVTQTLIPYYISVKKGSVVTNERDQALQLQVLNSRFKALEAKSIHLSINFFSLNKTLHEVLTMCHNASTSVSELNATIPKWIKHSLPDIQLLQKGLTEFVEPIIQIKTQAALSNSTCCIDRSLPGSLANVVKSQKQVKSLPKKINALKKPTVNLTTVLIGRTQRNTDNIIYPEEYSSCSRHPCQNGGTCINGRTSFTCACRHPFTGDNCTIKLVEENALAPDFSKGSYRYAPMVAFFASHTYGMTIPGPILFNNLDVNYGASYTPRTGKFRIPYLGVYVFKYTIESFSAHISGFLVVDGIDKLAFESENINSEIHCDRVLTGDALLELNYGQEVWLRLAKGTIPAKFPPVTTFSGYLLYRT

SEQ ID NO: 5508 - protein, 385 aa, Homo sapiens
MGCRRTREGPSKAMIFPWKCQSTQRDLWNIFKLWGWTMLCCDFLAHHGTDCWTYHYSEKPMNWQRARRFCRDNYTDLVAIQNKAEIEYLEKTLPFSRSYYWIGIRKIGGIWTWVGTNKSLTEEAENWGDGEPNNKKNKEDCVEIYIKRNKDAGKWNDDACHKLKAALCYTASCQPWSCSGHGECVEIINNYTCNCDVGYYGPQCQFVIQCEPLEAPELGTMDCTHPLGNFSFSSQCAFSCSEGTNLTGIEETTCGPFGNWSSPEPTCQVIQCEPLSAPDLGIMNCSHPLASFSFTSACTFICSEGTELIGKKKTICESSGIWSNPSPICQKLDKSFSMIKEGDYNPLFIPVAVMVTAFSGLAFIIWLARRLKKGKKSKRSMNDPY

SEQ ID NO: 5509 - protein, 2224 aa, Homo sapiens
MFPGCPRLWVLVVLGTSWVGWGSQGTEAAQLRQFYVAAQGISWSYRPEPTNSSLNLSVTSFKKIVYREYEPYFKKEKPQSTISGLLGPTLYAEVGDIIKVHFKNKADKPLSIHPQGIRYSKLSEGASYLDHTFPAEKMDDAVAPGREYTYEWSISEDSGPTHDDPPCLTHIYYSHENLIEDFNSGLIGPLLICKKGTLTEGGTQKTFDKQIVLLFAVFDESKSWSQSSSLMYTVNGYVNGTMPDITVCAHDHISWHLLGMSSGPELFSIHFNGQVLEQNHHKVSAITLVSATSTTANMTVGPEGKWIISSLTPKHLQAGMQAYIDIKNCPKKTRNLKKITREQRRHMKRWEYFIAAEEVIWDYAPVIPANMDKKYRSQHLDNFSNQIGKHYKKVMYTQYEDESFTKHTVNPNMKEDGILGPIIRAQVRDTLKIVFKNMASRPYSIYPHGVTFSPYEDEVNSSFTSGRNNTMIRAVQPGETYTYKWNILEFDEPTENDAQCLTRPYYSDVDIMRDIASGLIGLLLICKSRSLDRRGIQRAADIEQQAVFAVFDENKSWYLEDNINKFCENPDEVKRDDPKFYESNIMSTINGYVPESITTLGFCFDDTVQWHFCSVGTQNEILTIHFTGHSFIYGKRHEDTLTLFPMRGESVTVTMDNVGTWMLTSMNSSPRSKKLRLKFRDVKCIPDDDEDSYEIFEPPESTVMATRKMHDRLEPEDEESDADYDYQNRLAAALGIRSFRNSSLNQEEEEFNLTALALENGTEFVSSNTDIIVGSNYSSPSNISKFTVNNLAEPQKAPSHQQATTAGSPLRHLIGKNSVLNSSTAEHSSPYSEDPIEDPLQPDVTGIRLLSLGAGEFKSQEHAKHKGPKVERDQAAKHRFSWMKLLAHKVGRHLSQDTGSPSGMRPWEDLPSQDTGSPSRMRPWKDPPSDLLLLKQSNSSKILVGRWHLASEKGSYEIIQDTDEDTAVNNWLISPQNASRAWGESTPLANKPGKQSGHPKFPRVRHKSLQVRQDGGKSRLKKSQFLIKTRKKKKEKHTHHAPLSPRTFHPLRSEAYNTFSERRLKHSLVLHKSNETSLPTDLNQTLPSMDFGWIASLPDHNQNSSNDTGQASCPPGLYQTVPPEEHYQTFPIQDPDQMHSTSDPSHRSSSPELSEMLEYDRSHKSFPTDISQMSPSSEHEVWQTVISPDLSQVTLSPELSQTNLSPDLSHTTLSPELIQRNLSPALGQMPISPDLSHTTLSPDLSHTTLSLDLSQTNLSPELSQTNLSPALGQMPLSPDLSHTTLSLDFSQTNLSPELSHMTLSPELSQTNLSPALGQMPISPDLSHTTLSLDFSQTNLSPELSQTNLSPALGQMPLSPDPSHTTLSLDLSQTNLSPELSQTNLSPDLSEMPLFADLSQIPLTPDLDQMTLSPDLGETDLSPNFGQMSLSPDLSQVTLSPDISDTTLLPDLSQISPPPDLDQIFYPSESSQSLLLQEFNESFPYPDLGQMPSPSSPTLNDTFLSKEFNPLVIVGLSKDGTDYIEIIPKEEVQSSEDDYAEIDYVPYDDPYKTDVRTNINSSRDPDNIAAWYLRSNNGNRRNYYIAAEEISWDYSEFVQRETDIEDSDDIPEDTTYKKVVFRKYLDSTFTKRDPRGEYEEHLGILGPIIRAEVDDVIQVRFKNLASRPYSLHAHGLSYEKSSEGKTYEDDSPEWFKEDNAVQPNSSYTYVWHATERSGPESPGSACRAWAYYSAVNPEKDIHSGLIGPLLICQKGILHKDSNMPVDMREFVLLFMTFDEKKSWYYEKKSRSSWRLTSSEMKKSHEFHAINGMIYSLPGLKMYEQEWVRLHLLNIGGSQDIHVVHFHGQTLLENGNKQHQLGVWPLLPGSFKTLEMKASKPGWWLLNTEVGENQRAGMQTPFLIMDRDCRMPMGLSTGIISDSQIKASEFLGYWEPRLARLNNGGSYNAWSVEKLAAEFASKPWIQVDMQKEVIITGIQTQGAKHYLKSCYTTEFYVAYSSNQINWQIFKGNSTRNVMYFNGNSDASTIKENQFDPPIVARYIRISPTRAYNRPTLRLELQGCEVNGCSTPLGMENGKIENKQITASSFKKSWWGDYWEPFRARLNAQGRVNAWQAKANNNKQWLEIDLLKIKKITAIITQGCKSLSSEMYVKSYTIHYSEQGVEWKPYRLKSSMVDKIFEGNTNTKGHVKNFFNPPIISRFIRVIPKTWNQSITLRLELFGCDIY

SEQ ID NO: 5510 - protein, 841 aa, Homo sapiens
MSAFRLWPGLLMIVMASLCHRGSSCGLSTHIEIGHRALEFLHLHNGHVNYKELLLEHQDAYQAGTVFPDCFYPSLCKGGKFHDVSESTHWTPFLNASVHYIRENYPLPWEKDTEKLVAFLFGITSHMVADVSWHSLGIEQGFLRTMGAIDFHGSYSEAHSAGDFGGDVLSQFEFNFNYLARRWYVPVKDLLGIYEKLYGREVITENVIVDCSHIQFLEMYGEMLAVSKLYPSYSTKSPFLVEQFQEYFLGGLDDMAFWSTNIYHLTSFMLENGTSDCSLPENPLFIACGGQQNHTQGSKMQKNDFHRNLTSSLTENIDRNINYTERGVFFSVNSWTPDSMSFIYKALERNVRTMFIGGSQLSQKHISSPLASYFLSFPYARLGWAMTSADLNQDGYGDLVVGAPGYSRPGRIHIGRVYLIYGNELGLPPVDLDLDKEAHGILEGFQPSGRFGSALAMLDFNMDGVPDLAVGAPSVGSEQLTYKGAVYVYFGSKQGRMSSSPNITISCQDIYCNLGWTLLAADVNGDSEPDLVIGSPFAPGGGKQKGIVAAFYSGPSLSNKEKLNVEAANWTVRGEEDFAWFGYSLHGVTVDNRTLLLVGSPTWKNASRLGRLLHIRDEKKSLGRVYGYFPPNSQSWFTIVGDKAMGKLGTSLSSGHVLMNGTLTQVLLVGAPTRDDVSKMAFLTMTLHQGGATRMYALTSDLQPPLLSTFSGDRRFSRFGGVLHLSDLDDDGVDEIIVAAPLRIADVTSGLIGGEDGRVYVYNGKETTLGDMTGKCKSWMTPCPEEKAQYVLISPEASSRFGSSLITVRSKAKNQVVIAAGRSSLGARLSGALHVYSFGSD

SEQ ID NO: 5511 - protein, 605 aa, Homo sapiens
MALRKGGLALALLLLSWVALGPRSLEGADPGTPGEAEGPACPAACVCSYDDDADELSVFCSSRNLTRLPDGVPGGTQALWLDGNNLSSVPPAAFQNLSSLGFLNLQGGQLGSLEPQALLGLENLCHLHLERNQLRSLALGTFAHTPALASLGLSNNRLSRLEDGLFEGLGSLWDLNLGWNSLAVLPDAAFRGLGSLRELVLAGNRLAYLQPALFSGLAELRELDLSRNALRAIKANVFVQLPRLQKLYLDRNLIAAVAPGAFLGLKALRWLDLSHNRVAGLLEDTFPGLLGLRVLRLSHNAIASLRPRTFKDLHFLEELQLGHNRIRQLAERSFEGLGQLEVLTLDHNQLQEVKAGAFLGLTNVAVMNLSGNCLRNLPEQVFRGLGKLHSLHLEGSCLGRIRPHTFTGLSGLRRLFLKDNGLVGIEEQSLWGLAELLELDLTSNQLTHLPHRLFQGLGKLEYLLLSRNRLAELPADALGPLQRAFWLDVSHNRLEALPNSLLAPLGRLRYLSLRNNSLRTFTPQPPGLERLWLEGNPWDCGCPLKALRDFALQNPSAVPRFVQAICEGDDCQPPAYTYNNITCASPPEVVGLDLRDLSEAHFAPC

SEQ ID NO: 5512 - protein, 934 aa, Homo sapiens
MARRSVLYFILLNALINKGQACFCDHYAWTQWTSCSKTCNSGTQSRHRQIVVDKYYQENFCEQICSKQETRECNWQRCPINCLLGDFGPWSDCDPCIEKQSKVRSVLRPSQFGGQPCTEPLVAFQPCIPSKLCKIEEADCKNKFRCDSGRCIARKLECNGENDCGDNSDERDCGRTKAVCTRKYNPIPSVQLMGNGFHFLAGEPRGEVLDNSFTGGICKTVKSSRTSNPYRVPANLENVGFEVQTAEDDLKTDFYKDLTSLGHNENQQGSFSSQGGSSFSVPIFYSSKRSENINHNSAFKQAIQASHKKDSSFIRIHKVMKVLNFTTKAKDLHLSDVFLKALNHLPLEYNSALYSRIFDDFGTHYFTSGSLGGVYDLLYQFSSEELKNSGLTEEEAKHCVRIETKKRVLFAKKTKVEHRCTTNKLSEKHEGSFIQGAEKSISLIRGGRSEYGAALAWEKGSSGLEEKTFSEWLESVKENPAVIDFELAPIVDLVRNIPCAVTKRNNLRKALQEYAAKFDPCQCAPCPNNGRPTLSGTECLCVCQSGTYGENCEKQSPDYKSNAVDGQWGCWSSWSTCDATYKRSRTRECNNPAPQRGGKRCEGEKRQEEDCTFSIMENNGQPCINDDEEMKEVDLPEIEADSGCPQPVPPENGFIRNEKQLYLVGEDVEISCLTGFETVGYQYFRCLPDGTWRQGDVECQRTECIKPVVQEVLTITPFQRLYRIGESIELTCPKGFVVAGPSRYTCQGNSWTPPISNSLTCEKDTLTKLKGHCQLGQKQSGSECICMSPEEDCSHHSEDLCVFDTDSNDYFTSPACKFLAEKCLNNQQLHFLHIGSCQDGRQLEWGLERTRLSSNSTKKESCGYDTCYDWEKCSASTSKCVCLLPPQCFKGGNQLYCVKMGSSTSEKTLNICEVGTIRCANRKMEILHPGKCLA

SEQ ID NO: 5513 - protein, 330 aa, Homo sapiens
MLLLINVILTLWVSCANGQVKPCDFPDIKHGGLFHENMRRPYFPVAVGKYYSYYCDEHFETPSGSYWDYIHCTQNGWSPAVPCLRKCYFPYLENGYNQNYGRKFVQGNSTEVACHPGYGLPKAQTTVTCTEKGWSPTPRCIRVRTCSKSDIEIENGFISESSSIYILNKEIQYKCKPGYATADGNSSGSITCLQNGWSAQPICINSSEKCGPPPPISNGDTTSFLLKVYVPQSRVEYQCQPYYELQGSNYVTCSNGEWSEPPRCIHPCIITEENMNKNNIKLKGRSDRKYYAKTGDTIEFMCKLGYNANTSILSFQAVCREGIVEYPRCE

SEQ ID NO: 5514 - protein, 147 aa, Homo sapiens
MASHRLLLLCLAGLVFVSEAGPTGTGESKCPLMVKVLDAVRGSPAINVAVHVFRKAADDTWEPFASGKTSESGELHGLTTEEEFVEGIYKVEIDTKSYWKALGISPFHEHAEVVFTANDSGPRRYTIAALLSPYSYSTTAVVTNPKE

SEQ ID NO: 5515 - protein, 288 aa, Homo sapiens
MDLLWILPSLWLLLLGGPACLKTQEHPSCPGPRELEASKVVLLPSCPGAPGSPGEKGAPGPQGPPGPPGKMGPKGEPGPRNCRELLSQGATLSGWYHLCLPEGRALPVFCDMDTEGGGWLVFQRRQDGSVDFFRSWSSYRAGFGNQESEFWLGNENLHQLTLQGNWELRVELEDFNGNRTFAHYATFRLLGEVDHYQLALGKFSEGTAGDSLSLHSGRPFTTYDADHDSSNSNCAVIVHGAWWYASCYRSNLNGRYAVSDAAAHKYGIDWASGRGVGHPYRRVRMMLR

SEQ ID NO: 5516 - protein, 299 aa, Homo sapiens [sequence omitted]

SEQ ID NO: 5517 - protein, 402 aa, Homo sapiens
MESRGPLATSRLLLLLLLLLLRHTRQGWALRPVLPTQSAHDPPAVHLSNGPGQEPIAVMTFDLTKITKTSSSFEVRTWDPEGVIFYGDTNPKDDWFMLGLRDGRPEIQLHNHWAQLTVGAGPRLDDGRWHQVEVKMEGDSVLLEVDGEEVLRLRQVSGPLTSKRHPIMRIALGGLLFPASNLRLPLVPALDGCLRRDSWLDKQAEISASAPTSLRSCDVESNPGIFLPPGTQAEFNLRDIPQPHAEPWAFSLDLGLKQAAGSGHLLALGTPENPSWLSLHLQDQKVVLSSGSGPGLDLPLVLGLPLQLKLSMSRVVLSQGSKMKALALPPLGLAPLLNLWAKPQGRLFLGALPGEDSSTSFCLNGLWAQGQRLDVDQALNRSHEIWTHSCPQSPGNGTDASH

SEQ ID NO: 5518 - protein, 615 aa, Homo sapiens
MRALLLLGFLLVSLESTLSIPPWEAPKEHKYKAEEHTVVLTVTGEPCHFPFQYHRQLYHKCTHKGRPGPQPWCATTPNFDQDQRWGYCLEPKKVKDHCSKHSPCQKGGTCVNMPSGPHCLCPQHLTGNHCQKEKCFEPQLLRFFHKNEIWYRTEQAAVARCQCKGPDAHCQRLASQACRTNPCLHGGRCLEVEGHRLCHCPVGYTGPFCDVDTKASCYDGRGLSYRGLARTTLSGAPCQPWASEATYRNVTAEQARNWGLGGHAFCRNPDNDIRPWCFVLNRDRLSWEYCDLAQCQTPTQAAPPTPVSPRLHVPLMPAQPAPPKPQPTTRTPPQSQTPGALPAKREQPPSLTRNGPLSCGQRLRKSLSSMTRVVGGLVALRGAHPYIAALYWGHSFCAGSLIAPCWVLTAAHCLQDRPAPEDLTVVLGQERRNHSCEPCQTLAVRSYRLHEAFSPVSYQHDLALLRLQEDADGSCALLSPYVQPVCLPSGAARPSETTLCQVAGWGHQFEGAEEYASFLQEAQVPFLSLERCSAPDVHGSSILPGMLCAGFLEGGTDACQGDSGGPLVCEDQAAERRLTLQGIISWGSGCGDRNKPGVYTDVAYYLAWIREHTVS

SEQ ID NO: 5519 - protein, 176 aa, Homo sapiens
MSAFRLWPGLLIMLGSLCHRGSPCGLSTHVEIGHRALEFLQLHNGRVNYRELLLEHQDAYQAGIVFPDCFYPSICKGGKFHDVSESTHWTPFLNASVHYIRENYPLPWEKDTEKLVAFLFGITSHMAADVSWHSLGLEQGFLRTMGAIDFHGSYSEAHSAGDFGTVYLHLLNFLVV

SEQ ID NO: 5520 - protein, 625 aa, Homo sapiens
MIFLYQVVHFILFTSVSGECVTQLLKDTCFEGGDITTVFTPSAKYCQVVCTYHPRCLLFTFTAESPSEDPTRWFTCVLKDSVTETLPRVNRTAAISGYSFKQCSHQISACNKDIYVDLDMKGINYNSSVAKSAQECQERCTDDVHCHFFTYATRQFPSLEHRNICLLKHTQTGTPTRITKLDKVVSGFSLKSCALSNLACIRDIFPNTVFADSNIDSVMAPDAFVCGRICTHHPGCLFFTFFSQEWPKESQRNLCLLKTSESGLPSTRIKKSKALSGFSLQSCRHSIPVFCHSSFYHDTDFLGEELDIVAAKSHEACQKLCTNAVRCQFFTYTPAQASCNEGKGKCYLKLSSNGSPTKILHGRGGISGYTLRLCKMDNECTTKIKPRIVGGTASVRGEWPWQVTLHTTSPTQRHLCGGSIIGNQWILTAAHCFYGVESPKILRVYSGILNQSEIKEDTSFFGVQEIIIHDQYKMAESGYDIALLKLETTVNYTDSQRPICLPSKGDRNVIYTDCWVTGWGYRKLRDKIQNTLQKAKIPLVTNEECQKRYRGHKITHKMICAGYREGGKDACKGDSGGPLSCKHNEVWHLVGITSWGEGCAQRERPGVYTNVVEYVDWILEKTQAV

SEQ ID NO: 5521 - protein, 571 aa, Homo sapiens
MIFLYQVVHFILFTSVSGECVTQLLKDTCFEGGDITTVFTPSAKYCQVVCTYHPRCLLFTFTAESPSEDPTRWFTCVLKDSVTETLPRVNRTAAISGYSFKQCSHQISNICLLKHTQTGTPTRITKLDKVVSGFSLKSCALSNLACIRDIFPNTVFADSNIDSVMAPDAFVCGRICTHHPGCLFFTFFSQEWPKESQRNLCLLKTSESGLPSTRIKKSKALSGFSLQSCRHSIPVFCHSSFYHDTDFLGEELDIVAAKSHEACQKLCTNAVRCQFFTYTPAQASCNEGKGKCYLKLSSNGSPTKILHGRGGISGYTLRLCKMDNECTTKIKPRIVGGTASVRGEWPWQVTLHTTSPTQRHLCGGSIIGNQWILTAAHCFYGVESPKILRVYSGILNQSEIKEDTSFFGVQEIIIHDQYKMAESGYDIALLKLETTVNYTDSQRPICLPSKGDRNVIYTDCWVTGWGYRKLRDKIQNTLQKAKIPLVTNEECQKRYRGHKITHKMICAGYREGGKDACKGDSGGPLSCKHNEVWHLVGITSWGEGCAQRERPGVYTNVVEYVDWILEKTQAV

SEQ ID NO: 5522 - protein, 676 aa, Homo sapiens
MRVLGGRCGALLACLLLVLPVSEANFLSKQQASQVLVRKRRANSLLEETKQGNLERECIEELCNKEEAREVFENDPETDYFYPKYLVCLRSFQTGLFTAARQSTNAYPDLRSCVNAIPDQCSPLPCNEDGYMSCKDGKASFTCTCKPGWQGEKCEFDINECKDPSNINGGCSQICDNTPGSYHCSCKNGFVMLSNKKDCKDVDECSLKPSICGTAVCKNIPGDFECECPEGYRYNLKSKSCEDIDECSENMCAQLCVNYPGGYTCYCDGKKGFKLAQDQKSCEVVSVCLPLNLDTKYELLYLAEQFAGVVLYLKFRLPEISRFSAEFDFRTYDSEGVILYAESIDHSAWLLIALRGGKIEVQLKNEHTSKITTGGDVINNGLWNMVSVEELEHSISIKIAKEAVMDINKPGPLFKPENGLLETKVYFAGFPRKVESELIKPINPRLDGCIRSWNLMKQGASGIKEIIQEKQNKHCLVTVEKGSYYPGSGIAQFHIDYNNVSSAEGWHVNVTLNIRPSTGTGVMLALVSGNNTVPFAVSLVDSTSEKSQDILLSVENTVIYRIQALSLCSDQQSHLEFRVNRNNLELSTPLKIETISHEDLQRQLAVLDKAMKAKVATYLGGLPDVPFSATPVNAFYNGCMEVNINGVQLDLDEAISKHNDIRAHSCPSVWKKTKNS

SEQ ID NO: 5523 - protein, 764 aa, Homo sapiens
MLLFVLTCLLAVFPAISTKSPIFGPEEVNSVEGNSVSITCYYPPTSVNRHTRKYWCRQGARGGCITLISSEGYVSSKYAGRANLTNFPENGTFVVNIAQLSQDDSGRYKCGLGINSRGLSFDVSLEVSQGPGLLNDTKVYTVDLGRTVTINCPFKTENAQKRKSLYKQIGLYPVLVIDSSGYVNPNYTGRIRLDIQGTGQLLFSVVINQLRLSDAGQYLCQAGDDSNSNKKNADLQVLKPEPELVYEDLRGSVTFHCALGPEVANVAKFLCRQSSGENCDVVVNTLGKRAPAFEGRILLNPQDKDGSFSVVITGLRKEDAGRYLCGAHSDGQLQEGSPIQAWQLFVNEESTIPRSPTVVKGVAGGSVAVLCPYNRKESKSIKYWCLWEGAQNGRCPLLVDSEGWVKAQYEGRLSLLEEPGNGTFTVILNQLTSRDAGFYWCLTNGDTLWRTTVEIKIIEGEPNLKVPGNVTAVLGETLKVPCHFPCKFSSYEKYWCKWNNTGCQALPSQDEGPSKAFVNCDENSRLVSLTLNLVTRADEGWYWCGVKQGHFYGETAAVYVAVEERKAAGSRDVSLAKADAAPDEKVLDSGFREIENKAIQDPRLFAEEKAVADTRDQADGSRASVDSGSSEEQGGSSRALVSTLVPLGLVLAVGAVAVGVARARHRKNVDRVSIRSYRTDISMSDFENSREFGANDNMGASSITQETSLGGKEEFVATTESTTETKEPKKAKRSSKEEAEMAYKDFLLQSSTVAAEAQDGPQEA

SEQ ID NO: 5524 - protein, 764 aa, Homo sapiens
MLLFVLTCLLAVFPAISTKSPIFGPEEVNSVEGNSVSITCYYPPTSVNRHTRKYWCRQGARGGCITLISSEGYVSSKYAGRANLTNFPENGTFVVNIAQLSQDDSGRYKCGLGINSRGLSFDVSLEVSQGPGLLNDTKVYTVDLGRTVTINCPFKTENAQKRKSLYKQIGLYPVLVIDSSGYVNPNYTGRIRLDIQGTGQLLFSVVINQLRLSDAGQYLCQAGDDSNSNKKNADLQVLKPEPELVYEDLRGSVTFHCALGPEVANVAKFLCRQSSGENCDVVVNTLGKRAPAFEGRILLNPQDKDGSFSVVITGLRKEDAGRYLCGAHSDGQLQEGSPIQAWQLFVNEESTIPRSPTVVKGVAGSSVAVLCPYNRKESKSIKYWCLWEGAQNGRCPLLVDSEGWVKAQYEGRLSLLEEPGNGTFTVILNQLTSRDAGFYWCLTNGDTLWRTTVEIKIIEGEPNLKVPGNVTAVLGETLKVPCHFPCKFSSYEKYWCKWNNTGCQALPSQDEGPSKAFVNCDENSRLVSLTLNLVTRADEGWYWCGVKQGHFYGETAAVYVAVEERKAAGSRDVSLAKADAAPDEKVLDSGFREIENKAIQDPRLFAEEKAVADTRDQADGSRASVDSGSSEEQGGSSRALVSTLVPLGLVLAVGAVAVGVARARHRKNVDRVSIRSYRTDISMSDFENSREFGANDNMGASSITQETSLGGKEEFVATTESTTETKEPKKAKRSSKEEAEMAYKDFLLQSSTVAAEAQDGPQEA

SEQ ID NO: 5525 - protein, 505 aa, Homo sapiens
MGRVVAELVSSLLGLWLLLCSCGCPEGAELRAPPDKIAIIGAGIGGTSAAYYLRQKFGKDVKIDLFEREEVGGRLATMMVQGQEYEAGGSVIHPLNLHMKRFVKDLGLSAVQASGGLLGIYNGETLVFEESNWFIINVIKLVWRYGFQSLRMHMWVEDVLDKFMRIYRYQSHDYAFSSVEKLLHALGGDDFLGMLNRTLLETLQKAGFSEKFLNEMIAPVMRVNYGQSTDINAFVGAVSLSCSDSGLWAVEGGNKLVCSGLLQASKSNLISGSVMYIEEKTKTKYTGNPTKMYEVVYQIGTETRSDFYDIVLVATPLNRKMSNITFLNFDPPIEEFHQYYQHIVTTLVKGELNTSIFSSRPIDKFGLNTVLTTDNSDLFINSIGIVPSVREKEDPEPSTDGTYVWKIFSQETLTKAQILKLFLSYDYAVKKPWLAYPHYKPPEKCPSIILHDRLYYLNGIECAASAMEMSAIAAHNAALLAYHRWNGHTDMIDQDGLYEKLKTEL

SEQ ID NO: 5526 - protein, 505 aa, Homo sapiens
MGRVVAELVSSLLGLWLLLCSCGCPEGAELRAPPDKIAIIGAGIGGTSAAYYLRQKFGKDVKIDLFEREEVGGRLATMMVQGQEYEAGGSVIHPLNLHMKRFVKDLGLSAVQASGGLLGIYNGETLVFEESNWFIINVIKLVWRYGFQSLRMHMWVEDVLDKFMRIYRYQSHDYAFSSVEKLLHALGGDDFLGMLNRTLLETLQKAGFSEKFLNEMIAPVMRVNYGQSTDINAFVGAVSLSCSDSGLWAVEGGNKLVCSGLLQASKSNLISGSVMYIEEKTKTKYTGNPTKMYEVVYQIGTETRSDFYDIVLVATPLNRKMSNITFLNFDPPIEEFHQYYHHIVTTLVKGELNTSIFSSRPIDKFGLNTVLTTDNSDLFINSIGIVPSVREKEDPEPSTDGTYVWKIFSQETLTKAQILKLFLSYDYAVKKPWLAYPHYKPPEKCPSIILHDRLYYLNGIECAASAMEMSAIAAHNAALLAYHRWNGHTDMIDQDGLYEKLKTEL

SEQ ID NO: 5527 - protein, 508 aa, Homo sapiens [sequence omitted]

SEQ ID NO: 5528 - protein, 127 aa, Homo sapiens
MSLLRNRLQALPALCLCVLVLACIGACQPEAQEGTLSPPPKLKMSRWSLVRGRMKELLETVVNRTRDGWQWFWSPSTFRGFMQTYYDDHLRDLGPLTKAWFLESKDSLLKKTHSLCPRLVCGDKDQG

SEQ ID NO: 5529 - protein, 760 aa, Homo sapiens
MMDQARSAFSNLFGGEPLSYTRFSLARQVDGDNSHVEMKLAVDEEENADNNTKANVTKPKRCSGSICYGTIAVIVFFLIGFMIGYLGYCKGVEPKTECERLAGTESPVREEPGEDFPAARRLYWDDLKRKLSEKLDSTDFTSTIKLLNENSYVPREAGSQKDENLALYVENQFREFKLSKVWRDQHFVKIQVKDSAQNSVIIVDKNGRLVYLVENPGGYVAYSKAATVTGKLVHANFGTKKDFEDLYTPVNGSIVIVRAGKITFAEKVANAESLNAIGVLIYMDQTKFPIVNAELSFFGHAHLGTGDPYTPGFPSFNHTQFPPSRSSGLPNIPVQTISRAAAEKLFGNMEGDCPSDWKTDSTCRMVTSESKNVKLTVSNVLKEIKILNIFGVIKGFVEPDHYVVVGAQRDAWGPGAAKSGVGTALLLKLAQMFSDMVLKDGFQPSRSIIFASWSAGDFGSVGATEWLEGYLSSLHLKAFTYINLDKAVLGTSNFKVSASPLLYTLIEKTMQNVKHPVTGQFLYQDSNWASKVEKLTLDNAAFPFLAYSGIPAVSFCFCEDTDYPYLGTTMDTYKELIERIPELNKVARAAAEVAGQFVIKLTHDVELNLDYERYNSQLLSFVRDLNQYRADIKEMGLSLQWLYSARGDFFRATSRLTTDFGNAEKTDRFVMKKLNDRVMRVEYHFLSPYVSPKESPFRHVFWGSGSHTLPALLENLKLRKQNNGAFNETLFRNQLALATWTIQGAANALSGDVWDIDNEF

SEQ ID NO: 5530 - protein, 949 aa, Homo sapiens
MILSLLFSLGGPLGWGLLGAWAQASSTSLSDLQSSRTPGVWKAEAEDTSKDPVGRNWCPYPMSKLVTLLALCKTEKFLIHSQQPCPQGAPDCQKVKVMYRMAHKPVYQVKQKVLTSLAWRCCPGYTGPNCEHHDSMAIPEPADPGDSHQEPQDGPVSFKPGHLAAVINEVEVQQEQQEHLLGDLQNDVHRVADSLPGLWKALPGNLTAAVMEANQTGHEFPDRSLEQVLLPHVDTFLQVHFSPIWRSFNQSLHSLTQAIRNLSLDVEANRQAISRVQDSAVARADFQELGAKFEAKVQENTQRVGQLRQDVEDRLHAQHFTLHRSISELQADVDTKLKRLHKAQEAPGTNGSLVLATPGAGARPEPDSLQARLGQLQRNLSELHMTTARREEELQYTLEDMRATLTRHVDEIKELYSESDETFDQISKVERQVEELQVNHTALRELRVILMEKSLIMEENKEEVERQLLELNLTLQHLQGGHADLIKYVKDCNCQKLYLDLDVIREGQRDATRALEETQVSLDERRQLDGSSLQALQNAVDAVSLAVDAHKAEGERARAATSRLRSQVQALDDEVGALKAAAAEARHEVRQLHSAFAALLEDALRHEAVLAALFGEEVLEEMSEQTPGPLPLSYEQIRVALQDAASGLQEQALGWDELAARVTALEQASEPPRPAEHLEPSHDAGREEAATTALAGLARELQSLSNDVKNVGRCCEAEAGAGAASLNASLDGLHNALFATQRSLEQHQRLFHSLFGNFQGLMEANVSLDLGKLQTMLSRKGKKQQKDLEAPRKRDKKEAEPLVDIRVTGPVPGALGAALWEAGSPVAFYASFSEGTAALQTVKFNTTYINIGSSYFPEHGYFRAPERGVYLFAVSVEFGPGPGTGQLVFGGHHRTPVCTTGQGSGSTATVFAMAELQKGERVWFELTQGSITKRSLSGTAFGGFLMFKT

SEQ ID NO: 5531 - protein, 1676 aa, Homo sapiens
MGLLGILCFLIFLGKTWGQEQTYVISAPKIFRVGASENIVIQVYGYTEAFDATISIKSYPDKKFSYSSGHVHLSSENKFQNSAILTIQPKQLPGGQNPVSYVYLEVVSKHFSKSKRMPITYDNGFLFIHTDKPVYTPDQSVKVRVYSLNDDLKPAKRETVLTFIDPEGSEVDMVEEIDHIGIISFPDFKIPSNPRYGMWTIKAKYKEDFSTTGTAYFEVKEYVLPHFSVSIEPEYNFIGYKNFKNFEITIKARYFYNKVVTEADVYITFGIREDLKDDQKEMMQTAMQNTMLINGIAQVTFDSETAVKELSYYSLEDLNNKYLYIAVTVIESTGGFSEEAEIPGIKYVLSPYKLNLVATPLFLKPGIPYPIKVQVKDSLDQLVGGVPVILNAQTIDVNQETSDLDPSKSVTRVDDGVASFVLNLPSGVTVLEFNVKTDAPDLPEENQAREGYRAIAYSSLSQSYLYIDWTDNHKALLVGEHLNIIVTPKSPYIDKITHYNYLILSKGKIIHFGTREKFSDASYQSINIPVTQNMVPSSRLLVYYIVTGEQTAELVSDSVWLNIEEKCGNQLQVHLSPDADAYSPGQTVSLNMATGMDSWVALAAVDSAVYGVQRGAKKPLERVFQFLEKSDLGCGAGGGLNNANVFHLAGLTFLTNANADDSQENDEPCKEILRPRRTLQKKIEEIAAKYKHSVVKKCCYDGACVNNDETCEQRAARISLGPRCIKAFTECCVVASQLRANISHKDMQLGRLHMKTLLPVSKPEIRSYFPESWLWEVHLVPRRKQLQFALPDSLTTWEIQGIGISNTGICVADTVKAKVFKDVFLEMNIPYSVVRGEQIQLKGTVYNYRTSGMQFCVKMSAVEGICTSESPVIDHQGTKSSKCVRQKVEGSSSHLVTFTVLPLEIGLHNINFSLETWFGKEILVKTLRVVPEGVKRESYSGVTLDPRGIYGTISRRKEFPYRIPLDLVPKTEIKRILSVKGLLVGEILSAVLSQEGINILTHLPKGSAEAELMSVVPVFYVFHYLETGNHWNIFHSDPLIEKQKLKKKLKEGMLSIMSYRNADYSYSVWKGGSASTWLTAFALRVLGQVNKYVEQNQNSICNSLLWLVENYQLDNGSFKENSQYQPIKLQGTLPVEARENSLYLTAFTVIGIRKAFDICPLVKIDTALIKADNFLLENTLPAQSTFTLAISAYALSLGDKTHPQFRSIVSALKREALVKGNPPIYRFWKDNLQHKDSSVPNTGTARMVETTAYALLTSLNLKDINYVNPVIKWLSEEQRYGGGFYSTQDTINAIEGLTEYSLLVKQLRLSMDIDVSYKHKGALHNYKMTDKNFLGRPVEVLLNDDLIVSTGFGSGLATVHVTTVVHKTSTSEEVCSFYLKIDTQDIEASHYRGYGNSDYKRIVACASYKPSREESSSGSSHAVMDISLPTGISANEEDLKALVEGVDQLFTDYQIKDGHVILQLNSIPSSDFLCVRFRIFELFEVGFLSPATFTVYEYHRPDKQCTMFYSTSNIKIQKVCEGAACKCVEADCGQMQEELDLTISAETRKQTACKPEIAYAYKVSITSITVENVFVKYKATLLDIYKTGEAVAEKDSEITFIKKVTCTNAELVKGRQYLIMGKEALQIKYNFSFRYIYPLDSLTWIEYWPRDTTCSSCQAFLANLDEFAEDIFLNGC

SEQ ID NO: 5532 - protein, 676 aa, Homo sapiens
LNITCRFAGVFHVEKNGRYSISRTEAADLCKAFNSTLPTMAQMEKALSIGFETCRYGFIEGHVVIPRIHPNSICAANNTGVYILTSNTSQYDTYCFNASAPPEEDCTSVTDLPNAFDGPITITIVNRDGTRYVQKGEYRTNPEDIYPSNPTDDDVSSGSSSERSSTSGGYIFYTFSTVHPIPDEDSPWITDSTDRIPATSTSSNTISAGWEPNEENEDERDRHLSFSGSGIDDDEDFISSTISTTPRAFDHTKQNQDWTQWNPSHSNPEVLLQTTTRMTDVDRNGTTAYEGNWNPEAHPPLIHHEHHEEEETPHSTSTIQATPSSTTEETATQKEQWFGNRWHEGYRQTPKEDSHSTTGTAAASAHTSHPMQGRTTPSPEDSSWTDFFNPISHPMGRGHQAGRRMDMDSSHSITLQPTANPNTGLVEDLDRTGPLSMTTQQSNSQSFSTSHEGLEEDKDHPTTSTLTSSNRNDVTGGRRDPNHSEGSTTLLEGYTSHYPHTKESRTFIPVTSAKTGSFGVTAVTVGDSNSNVNRSLSGDQDTFHPSGGSHTTHGSESDGHSHGSQEGGANTTSGPIRTPQIPEWLIILASLLALALILAVCIAVNSRRRCGQKKKLVINSGNGAVEDRKPSGLNGEASKSQEMVHLVNKESSETPDQFMTADETRNLQNVDMKIGV

SEQ ID NO: 5533 - protein, 361 aa, Homo sapiens [sequence omitted]

SEQ ID NO: 5534 - protein, 742 aa, Homo sapiens [sequence omitted]

SEQ ID NO: 5535 - protein, 470 aa, Homo sapiens
LNITCRFAGVFHVEKNGRYSISRTEAADLCKAFNSTLPTMAQMEKALSIGFETCRYGFIEGHVVIPRIHPNSICAANNTGVYILTSNTSQYDTYCFNASAPPEEDCTSVTDLPNAFDGPITITIVNRDGTRYVQKGEYRTNPEDIYPSNPTDDDVSSGSSSERSSTSGGYIFYTFSTVHPIPDEDSPWITDSTDRIPATNMDSSHSITLQPTANPNTGLVEDLDRTGPLSMTTQQSNSQSFSTSHEGLEEDKDHPTTSTLTSSNRNDVTGGRRDPNHSEGSTTLLEGYTSHYPHTKESRTFIPVTSAKTGSFGVTAVTVGDSNSNVNRSLSGDQDTFHPSGGSHTTHGSESDGHSHGSQEGGANTTSGPIRTPQIPEWLIILASLLALALILAVCIAVNSRRRCGQKKKLVINSGNGAVEDRKPSGLNGEASKSQEMVHLVNKESSETPDQFMTADETRNLQNVDMKIGV

SEQ ID NO: 5536 - protein, 139 aa, Homo sapiens
MDKFWWHAAWGLCLVPLSLAQIDLNITCRFAGVFHVEKNGRYSISRTEAADLCKAFNSTLPTMAQMEKALSIGFETCSLHCSQQSKKVWAEEKASDQQWQWSCGGQKAKWTQRRGQQVSGNGAFGEQGVVRNSRPVYDS

SEQ ID NO: 5537 - protein, 461 aa, Homo sapiens
MWQLTSLLLFVATWGISGTPAPLDSVFSSSERAHQVLRIRKRANSFLEELRHSSLERECIEEICDFEEAKEIFQNVDDTLAFWSKHVDGDQCLVLPLEHPCASLCCGHGTCIDGIGSFSCDCRSGWEGRFCQREVSFLNCSLDNGGCTHYCLEEVGWRRCSCAPGYKLGDDLLQCHPAVKFPCGRPWKRMEKKRSHLKRDTEDQEDQVDPRLIDGKMTRRGDSPWQVVLLDSKKKLACGAVLIHPSWVLTAAHCMDESKKLLVRLGEYDLRRWEKWELDLDIKEVFVHPNYSKSTTDNDIALLHLAQPATLSQTIVPICLPDSGLAERELNQAGQETLVTGWGYHSSREKEAKRNRTFVLNFIKIPVVPHNECSEVMSNMVSENMLCAGILGDRQDACEGDSGGPMVASFHGTWFLVGLVSWGEGCGLLHNYGVYTKVSRYLDWIHGHIRDKEAPQKSWAP

SEQ ID NO: 5538 - protein, 286 aa, Homo sapiens
SHGPWCYTMDPRTPFDYCALRRCADDQPPSILDPPDQVQFEKCGKRVDRLDQRRSKLRVAGGHPGNSPWTVSLRNRQGQHFCAGSLVKEQWILTARQCFSSCHMPLTGYEVWLGTLFQNPQHGEPGLQRVPVAKMLCGPSGSQLVLLKLERSVTLNQRVALICLPPEWYVVPPGTKCEIAGWGETKGTGNDTVLNVALLNVISNQECNIKHRGHVRESEMCTEGLLAPVGACEGDYGGPLACFTHNCWVLKGIRIPNRVCTRSRWPAVFTRVSVFVDWIHKVMRLG

SEQ ID NO: 5539 - protein, 726 aa, Homo sapiens
MGWLPLLLLLTQCLGVPGQRSPLNDFQVLRGTELQHLLHAVVPGPWQEDVADAEECAGRCGPLMDCRAFHYNVSSHGCQLLPWTQHSPHTRLRRSGRCDLFQKKGKGPQPKLIFCLLLPDYVRTCIMNNGVGYRGTMATTVGGLPCQAWSHKFPNDHKYTPTLRNGLEENFCRNPDGDPGGPWCYTTDPAVRFQSCGIKSCREAACVWCNGEEYRGAVDRTESGRECQRWDLQHPHQHPFEPGKFLDQGLDDNYCRNPDGSERPWCYTTDPQIEREFCDLPRCGSEAQPRQEATTVSCFRGKGEGYRGTANTTTAGVPCQRWDAQIPHQHRFTPEKYACKDLRENFCRNPDGSEAPWCFTLRPGMRAAFCYQIRRCTDDVRPQDCYHGAGEQYRGTVSKTRKGVQCQRWSAETPHKPQFTFTSEPHAQLEENFCRNPDGDSHGPWCYTMDPRTPFDYCALRRCADDQPPSILDPPDQVQFEKCGKRVDRLDQRRSKLRVVGGHPGNSPWTVSLRNRQGQHFCGGSLVKEQWILTARQCFSSCHMPLTGYEVWLGTLFQNPQHGEPSLQRVPVAKMVCGPSGSQLVLLKLERSVTLNQRVALICLPPEWYVVPPGTKCEIAGWGETKGTGNDTVLNVALLNVISNQECNIKHRGRVRESEMCTEGLLAPVGACEGDYGGPLACFTHNCWVLEGIIIPNRVCARSRWPAVFTRVSVFVDWIHKVMRLG

SEQ ID NO: 5540 - protein, 648 aa, Homo sapiens
MGWLPLLLLLTQCLGVPGAPGHRATAPLQAVVPGPWQEDVADAEECAGRCGPLMDCRAFHYNVSSHGCQLLPWTQHSPHTRLRHSGRCDLFQEKGEWGYMPTLRNGLEENFCRNPDGDPGGPWCHTTDPAVRFQSCGIKSCRVAACVWCNGEEYRGAVDRTESGRECQRWDLQHPHQHPFEPGKFLDQGLDDNYCRNPDGSERPWCYTTDPQIEREFCDLPRCGSEAQPRQEATSVSCFRGKGEGYRGTANTTTAGVPCQRWDAQIPHQHRFTPEKYACKDLRENFCRNPDGSEAPWCFTLRPGMRVGFCYQIRRCTDDVRPQDCYHGAGEQYRGTVSKTRKGVQCQRGAWKWLRLPCHDFAPAPASVHVYLRTACTTGGELLPDPDGDSHGPWCYTMDPRTPFDYCALRRCDQVQFEKCGKRVDRLDQRCSKLRVAGGHPGNSPWTVSLRNWQGQHFCGGSLVKEQWILTARQCFSSCHMPLTGYEVWLGTLFQNPQHGEPGLQRVPVAKMLCGPSGSQLVLLKLERYVDNLGGWTKCEIAGRGETKGTGNDTVLNVALLNVISNQECNIKHRGHVRESEMCTEGLLAPVGACEGDYGGPLACFTHNCWVLKGIRIPNRVCARSRWPAVFTRVSVFVDWIHKVMRLG

SEQ ID NO: 5541 - protein, 1024 aa, Homo sapiens
MGEDDAALRAGSRGLSDPWADSVGVRPRTTERHIAVHKRLVLAFAVSLVALLAVTMLAVLLSLRFDECGASATPGADGGPSGFPERGGNGSLPGSARRNHHAGGDSWQPEAGGVASPGTTSAQPPSEEEREPWEPWTQLRLSGHLKPLHYNLMLTAFMENFTFSGEVNVEIACRNATRYVVLHASRVAVEKVQLAEDRAFGAVPVAGFFLYPQTQVLVVVLNRTLDAQRNYNLKIIYNALIENELLGFFRSSYVLHGERRFLGVTQFSPTHARKAFPCFDEPIYKATFKISIKHQATYLSLSNMPVETSVFEEDGWVTDHFSQTPLMSTYYLAWAICNFTYRETTTKSGVVVRLYARPDAIRRGSGDYALHITKRLIEFYEDYFKVPYSLPKLDLLAVPKHPYAAMENWGLSIFVEQRILLDPSVSSISYLLDVTMVIVHEICHQWFGDLVTPVWWEDVWLKEGFAHYFEFVGTDYLYPGWNMEKQRFLTDVLHEVMLLDGLASSHPVSQEVLQATDIDRVFDWIAYKKGAALIRMLANFMGHSVFQRGLQDYLTIHKYGNAARNDLWNTLSEALKRNGKYVNIQEVMDQWTLQMGYPVITILGNTTAENRIIITQQHFIYDISAKTKALKLQNNSYLWQIPLTIVVGNRSHVSSEAIIWVSNKSEHHRITYLDKGSWLLGNINQTGYFRVNYDLRNWRLLIDQLIRNHEVLSVSNRAGLIDDAFSLARAGYLPQNIPLEIIRYLSEEKDFLPWHAASRALYPLDKLLDRMENYNIFNEYILKQVATTYIKLGWPKNNFNGSLVQASYQHEELRREVIMLACSFGNKHCHQQASTLISDWISSNRNRIPLNVRDIVYCTGVSLLDEDVWEFIWMKFHSTTAVSEKKILLEALTCSDDRNLLNRLLNLSLNSEVVLDQDAIDVIIHVARNPHGRDLAWKFFRDKWKILNTRYGEALFMNSKLISGVTEFLNTEGELKELKNFMKNYDGVAAASFSRAVETVEANVRWKMLYQDELFQWLGKALRH

SEQ ID NO: 5542 - protein, 521 aa, Homo sapiens
GKPPGSALARGTGAMAQKMDCGAGLLGFQAEASVEDSALLMQTLMEAIQISEAPPTNQATAAASPQSSQPPTANEMADIQVSAAAARPKSAFKVQNATTKGPNGVYDFSQAHNAKDVPNTQPKAAFKSQNATPKGPNAAYDFSQAATTGELAANKSEMAFKAQNATTKVGPNATYNFSQSLNANDLANSRPKTPFKAWNDTTKAPTADTQTQNVNQAKMATSQADIETDPGISEPDGATAQTSADGSQAQNLESRTIIRGKRTRKINNLNVEENSSGDQRRAPLAAGTWRSAPVPVTTQNPPGAPPNVSGRRHWLGRTPQGWQNQTARQTQQHVRALQLGRTQPAWQNPVAWQNPVIWPNPVIWQNPVIWPNPIVWPGPVVWPNPLAWQNPPGWQTPPGWQTPPGWQGPPDWQGPPDWPLPPDWPLPPDWPLPTDWPLPPDWIPADWPIPPDWQNLRPSPNLRPSPNSRASQNPGAAQPRDVALLQERVRAVTPQSLFPSLALFFVILSSVIQPSFFVNIL

SEQ ID NO: 5543 - protein, 602 aa, Homo sapiens
MHSKVTIICIRFLFWFLLLCMLIGKSHTEDDIIIATKNGKVRGMNLTVFGGTVTAFLGIPYAQPPLGRLRFKKPQSLTKWSDIWNATKYANSCCQNIDQSFPGFHGSEMWNPNTDLSEDCLYLNVWIPAPKPKNATVLIWIYGGGFQTGTSSLHVYDGKFLARVERVIVVSMNYRVGALGFLALPGNPEAPGNMGLFDQQLALQWVQKNIAAFGGNPKSVTLFGESAGAASVSLHLLSPGSHSLFTRAILQSGSFNAPWAVTSLYEARNRTLNLAKLTGCSRENETEIIKCLRNKDPQEILLNEAFVVPYGTPLSVNFGPTVDGDFLTDMPDILLELGQFKKTQILVGVNKDEGTAFLVYGAPGFSKDNNSIITRKEFQEGLKIFFPGVSEFGKESILFHYTDWVDDQRPENYREALGDVVGDYNFICPALEFTKKFSEWGNNAFFYYFEHRSSKLPWPEWMGVMHGYEIEFVFGLPLERRDNYTKAEEILSRSIVKRWANFAKYGNPNETQNNSTSWPVFKSTEQKYLTLNTESTRIMTKLRAQQCRFWTSFFPKVLEMTGNIDEAEWEWKAGFHRWNNYMMDWKNQFNDYTSKKESCVGL

SEQ ID NO: 5544 - protein, 683 aa, Homo sapiens
MERAAPSRRVPLPLLLLGGLALLAAGVDADVLLEACCADGHRMATHQKDCSLPYATESKECRMVQEQCCHSQLEELHCATGISLANEQDRCATPHGDNASLEATFVKRCCHCCLLGRAAQAQGQSCEYSLMVGYQCGQVFRACCVKSQETGDLDVGGLQETDKIIEVEEEQEDPYLNDRCRGGGPCKQQCRDTGDEVVCSCFVGYQLLSDGVSCEDVNECITGSHSCRLGESCINTVGSFRCQRDSSCGTGYELTEDNSCKDIDECESGIHNCLPDFICQNTLGSFRCRPKLQCKSGFIQDALGNCIDINECLSISAPCPIGHTCINTEGSYTCQKNVPNCGRGYHLNEEGTRCVDVDECAPPAEPCGKGHRCVNSPGSFRCECKTGYYFDGISRMCVDVNECQRYPGRLCGHKCENTLGSYLCSCSVGFRLSVDGRSCEDINECSSSPCSQECANVYGSYQCYCRRGYQLSDVDGVTCEDIDECALPTGGHICSYRCINIPGSFQCSCPSSGYRLAPNGRNCQDIDECVTGIHNCSINETCFNIQGGFRCLAFECPENYRRSAATRCERLPCHENRECSKLPLRITYYHLSFPTNIQAPAVVFRMGPSSAVPGDSMQLAITGGNEEGFFTTRKVSPHSGVVALTKPVPEPRDLLLTVKMDLSRHGTVSSFVAKLFIFVSAEL

SEQ ID NO: 5545 - protein, 703 aa, Homo sapiens
MERAAPSRRVPLPLLLLGGLALLAAGVDADVLLEACCADGHRMATHQKDCSLPYATESKECRMVQEQCCHSQLEELHCATGISLANEQDRCATPHGDNASLEATFVKRCCHCCLLGRAAQAQGQSCEYSLMVGYQCGQVFRACCVKSQETGDLDVGGLQETDKIIEVEEEQEDPYLNDRCRGGGPCKQQCRDTGDEVVCSCFVGYQLLSDGVSCEDVNECITGSHSCRLGESCINTVGSFRCQRDSSCGTGYELTEDNSCKDIDECESGIHNCLPDFICQNTLGSFRCRPKLQCKSGFIQDALGNCIDINECLSISAPCPIGHTCINTEGSYTCQKNVPNCGRGYHLNEEGTRCVDVDECAPPAEPCGKGHRCVNSPGSFRCECKTGYYFDGISRMCVDVNECQRYPGRLCGHKCENTLGSYLCSCSVGFRLSVDGRSCEDINECSSSPCSQECANVYGSYQCYCRRGYQLSDVDGVTCEDIDECALPTGGHICSYRCINIPGSFQCSCPSSGYRLAPNGRNCQDIDECVTGIHNCSINETCFNIQGGFRCLAFECPENYRRSAATLQQEKTDTVRCIKSCRPNDVTCVFDPVHTISHTVISLPTFREFTRPEEIIFLRAITPPHPASQANIIFDITEGNLRDSFDIIKRYMDGMTVGVVRQVRPIVGPFHAVLKLEMNYVVGGVVSHRNVVNVRIFVSEYWF

SEQ ID NO: 5546 - protein, 566 aa, Homo sapiens
MERAAPSRRVPLPLLLLGGLALLAAGVDADVLLEACCADGHRMATHQKDCSLPYATESKECRMVQEQCCHSQLEELHCATGISLANEQDRCATPHGDNASLEATFVKRCCHCCLLGRAAQAQGQSCEYSLMVGYQCGQVFRACCVKSQETGDLDVGGLQETDKIIEVEEEQEDPYLNDRCRGGGPCKQQCRDTGDEVVCSCFVGYQLLSDGVSCEDVNECITGSHSCRLGESCINTVGSFRCQRDSSCGTGYELTEDNSCKDIDECESGIHNCLPDFICQNTLGSFRCRPKLQCKSGFIQDALGNCIDINECLSISAPCPIGHTCINTEGSYTCQKNVPNCGRGYHLNEEGTRCVDVDECAPPAEPCGKGHRCVNSPGSFRCECKTGYYFDGISRMCVDVNECQRYPGRLCGHKCENTLGSYLCSCSVGFRLSVDGRSCEDINECSSSPCSQECANVYGSYQCYCRRGYQLSDVDGVTCEDIDECALPTGGHICSYRCINIPGSFQCSCPSSGYRLAPNGRNCQDIDECVTGIHNCSINETCFNIQGGFRCLAFECPENYRRSAAT

SEQ ID NO: 5547 - protein, 703 aa, Homo sapiens
MERAAPSRRVPLPLLLLGGLALLAAGVDADVLLEACCADGHRMATHQKDCSLPYATESKECRMVQEQCCHSQLEELHCATGISLANEQDRCATPHGDNASLEATFVKRCCHCCLLGRAAQAQGQSCEYSLMVGYQCGQVFRACCVKSQETGDLDVGGLQETDKIIEVEEEQEDPYLNDRCRGGGPCKQQCRDTGDEVVCSCFVGYQLLSDGVSCEDVNECITGSHSCRLGESCINTVGSFRCQRDSSCGTGYELTEDNSCKDIDECESGIHNCLPDFICQNTLGSFRCRPKLQCKSGFIQDALGNCIDINECLSISAPCPIGHTCINTEGSYTCQKNVPNCGRGYHLNEEGTRCVDVDECAPPAEPCGKGHRCVNSPGSFRCECKTGYYFDGISRMCVDVNECQRYPGRLCGHKCENTLGSYLCSCSVGFRLSVDGRSCEDINECSSSPCSQECANVYGSYQCYCRRGYQLSDVDGVTCEDIDECALPTGGHICSYRCINIPGSFQCSCPSSGYRLAPNGRNCQDIDECVTGIHNCSINETCFNIQGGFRCLAFECPENYRRSAATQKSKKGRQNTPAGSSKEDCRVLPWKQGLEDTHLDASLPTFREFTRPEEIIFLRAITPPHPASQANIIFDITEGNLRDSFDIIKRYMDGMTVGVVRQVRPIVGPFHAVLKLEMNYVVGGVVSHRNVVNVRIFVSEYWF

SEQ ID NO: 5548 - protein, 535 aa, Homo sapiens
GPCKQQCRDTGDEVVCSCFVGYQLLSDGVSCEGERNHCFRLRAVHSPDVHMVDLSSDGSFLLVTPALPRSLLDVNECITGSHSCRLGESCINTVGSFRCQRDSSCGTGYELTEDNSCKDIDECESGIHNCLPDFICQNTLGSFRCRPKLQCKSGFIQDALGNCIDINECLSISAPCPIGHTCINTEGSYTCQKNVPNCGRGYHLNEEGTRCVDVDECAPPAEPCGKGHRCVNSPGSFRCECKTGYYFDGISRMCVDVNECQRYPGRLCGHKCENTLGSYLCSCSVGFRLSVDGRSCEDINECSSSPCSQECANVYGSYQCYCRRGYQLSDVDGVTCEDIDECALPTGGHICSYRCINIPGSFQCSCPSSGYRLAPNGRNCQDIDECVTGIHNCSINETCFNIQGGFRCLAFECPENYRRSAATRCERLPCHENRECSKLPLRITYYHLSFPTNIQAPAVVFRMGPSSAVPGDSMQLAITGGNEEGFFTTRKVSPHSGVVALTKPVPEPRDLLLTVKMDLSRHGTVSSFVAKLFIF

SEQ ID NO: 5549 - protein, 638 aa, Homo sapiens [sequence omitted]

SEQ ID NO: 5550 - protein, 449 aa, Homo sapiens
MRLLAKIICLMLWAICVAEDCNELPPRRNTEILTGSWSDQTYPEGTQAIYKCRPGYRSLGNVIMVCRKGEWVALNPLRKCQKRPCGHPGDTPFGTFTLTGGNVFEYGVKAVYTCNEGYQLLGEINYRECDTDGWTNDIPICEVVKCLPVTAPENGKIVSSAMEPDREYHFGQAVRFVCNSGYKIEGDEEMHCSDDGFWSKEKPKCVEISCKSPDVINGSPISQKIIYKENERFQYKCNMGYEYSERGDAVCTESGWRPLPSCEEKSCDNPYIPNGDYSPLRIKHRTGDEITYQCRNGFYPATRGNTAKCTSTGWIPAPRCTLKPCDYPDIKHGGLYHENMRRPYFPVAVGKYYSYYCDEHFETPSGSYWDHIHCTQDGWSPAVPCLRKCYFPYLENGYNQNHGRKFVQGKSIDVACHPGYALPKAQTTVTCMENGWSPTPRCIRVSFTL

SEQ ID NO: 5551 - protein, 603 aa, Homo sapiens [sequence omitted]

SEQ ID NO: 5552 - protein, 469 aa, Homo sapiens
MITEGAQAPRLLLPPLLLLLTLPATGSDPVLCFTQYEESSGKCKGLLGGGVSVEDCCLNTAFAYQKRSGGLCQPCRSPRWSLWSTWAPCSVTCSEGSQLRYRRCVGWNGQCSGKVAPGTLEWQLQACEDQQCCPEMGGWSGWGPWEPCSVTCSKGTRTRRRACNHPAPKCGGHCPGQAQESEACDTQQVCPTHGAWATWGPWTPCSASCHGGPHEPKETRSRKCSAPEPSQKPPGKPCPGLAYEQRRCTGLPPCPVAGGWGPWGPVSPCPVTCGLGQTMEQRTCNHPVPQHGGPFCAGDATRTHICNTAVPCPVDGEWDSWGEWSPCIRRNMKSISCQEIPGQQSRGRTCRGRKFDGHRCAGQQQDIRHCYSIQHCPLKGSWSEWSTWGLCMPPCGPNPTRARQRLCTPLLPKYPPTVSMVEGQGEKNVTFWGRPLPRCEELQGQKLVVEEKRPCLHVPACKDPEEEEL

SEQ ID NO: 5553 - protein, 322 aa, Homo sapiens
MARCFSLVLLLTSIWTTRLLVQGSLRAEELSIQVSCRIMGITLVSKKANQQLNFTEAKEACRLLGLSLAGKDQVETALKASFETCSYGWVGDGFVVISRISPNPKCGKNGVGVLIRKVPVSRQFAAYCYNSSDTWTNSCIPEIITTKDPIFNTQTATQTTEFIVSDSTYSVASPYSTIPAPTTTPPAPASTSIPRRKKLICVTEVFMETSTMSTETEPFVENKAAFKNEAAGFGGVPTALLVLALLFFGAAAGLGFCYVKRYVKAFPFTNKNQQKEMIETKVVKEEKANDSNPNEESKKTDKNPEESKSPSKTTVRCLEAEV

SEQ ID NO: 5554 - protein, 322 aa, Homo sapiens
MARCFSLVLLLTSIWTTRLLVQGSLRAEELSIQVSCRIMGITLVSKKANQQLNFTEAKEACRLLGLSLAGKDQVDTALKASFETCSYGWVGDGFVVISRISPNPKCGKNGVGVLIWKVPVSRQFGAYCYNSSDTWTNSRIPEIITTKDPIFNTQTATQTTEFIVSDSTYSVASPYSTIPAPTTTPPAPASTSIPRRKKLICVTEVFMETSTMSTETEPFVENKAAFKNEAAGFGGVPTALLVLALLFFGAAAGLGFCYVKRYVKAFPFTNKNQQKEMIETKVVKEEKANDSNPNEESKKTDKNPEESKSPSKTTVRCLEAEV

SEQ ID NO: 5555 - protein, 1079 aa, Homo sapiens [sequence omitted]

SEQ ID NO: 5556 - protein, 2491 aa, Homo sapiens
MPAILVASKMKSGLPKPVHSAAPILHVPPARAGPQPCYLKLGSKVEVSKTTYPSQIPLKSQVLQGLQEPAGEGLPLRKSGSVENGFDTQIYTDWANHYLAKSGHKRLIRDLQQDVTDGVLLAQIIQVVANEKIEDINGCPKNRSQMIENIDACLNFLAAKGINIQGLSAEEIRNGNLKAILGLFFSLSRYKQQQQQPQKQHLSSPLPPAVSQVAGAPSQCQAGTPQQQVPVTPQAPCQPHQPAPHQQSKAQAEMQSSASSKDSSQSKIIRFTLGQKKISRLPGPTARVSAAGSEAKTRGGSTTANNRRSQSFNNYDKSKPVTSPPPPPSSHEKEPLASSASSHPGMSDNAPASLESGSSSTPTNCSTSSAIPQPGAATKPWRSKSLSVKHSATVSMLSVKPPGPEAPRPTPEAMKPAPNNQKSMLEKLKLFNSKGGSKAGEGPGSRDTSCERLETLPSFEESEELEAASRMLTTVGPASSSPKIALKGIAQRTFSRALTNKKSSLKGNEKEKEKQQREKDKEKSKDLAKRASVTERLDLKEEPKEDPSGAAVPEMPKKSSKIASFIPKGGKLNSAKKEPMAPSHSGIPKPGMKSMPGKSPSAPAPSKEGERSRSGKLSSGLPQQKPQLDGRHSSSSSSLASSEGKGPGGTTLNHSISSQTVSGSVGTTQTTGSNTVSVQLPQPQQQYNHPNTATVAPFLYRSQTDTEGNVTAESSSTGVSVEPSHFTKTGQPALEELTGEDPEARRLRTVKNIADLRQNLEETMSSLRGTQVTHSTLETTFDTNVTTEMSGRSILSLTGRPTPLSWRLGQSSPRLQAGDAPSMGNGYPPRANASRFINTESGRYVYSAPLRRQLASRGSSVCHVDVSDKAGDEMDLEGISMDAPGYMSDGDVLSKNIRTDDITSGYMTDGGLGLYTRRLNRLPDGMAVVRETLQRNTSLGLGDADSWDDSSSVSSGISDTIDNLSTDDINTSSSISSYANTPASSRKNLDVQTDAEKHSQVERNSLWSGDDVKKSDGGSDSGIKMEPGSKWRRNPSDVSDESDKSTSGKKNPVISQTGSWRRGMTAQVGITMPRTKPSAPAGALKTPGTGKTDDAKVSEKGRLSPKASQVKRSPSDAGRSSGDESKKPLPSSSRTPTANANSFGFKKQSGSAAGLAMITASGVTVTSRSATLGKIPKSSALVSRSAGRKSSMDGAQNQDDGYLALSSRTNLQYRSLPRPSKSNSRNGAGNRSSTSSIDSNISSKSAGLPVPKLREPSKTALGSSLPGLVNQTDKEKGISSDNESVASCNSVKVNPAAQPVSSPAQTSLQPGAKYPDVASPTLRRLFGGKPTKQVPIATAENMKNSVVISNPHATMTQQGNLDSPSGSGVLSSGSSSPLYSKNVDLNQSPLASSPSSAHSAPSNSLTWGTNASSSSAVSKDGLGFQSVSSLHTSCESIDISLSSGGVPSHNSSTGLIASSKDDSLTPFVRTNSVKTTLSESPLSSPAASPKFCRSTLPRKQDSDPHLDRNTLPKKGLRYTPTSQLRTQEDAKEWLRSHSAGGLQDTAANSPFSSGSSVTSPSGTRFNFSQLASPTTVTQMSLSNPTMLRTHSLSNADGQYDPYTDSRFRNSSMSLDEKSRTMSRSGSFRDGFEEESWEKSSVDNFVSRLHSSLHFSLPLFHHARYELVHGSSLSLVSSTSSVYSTPEEKCQSEIRKLRRELDASQEKVSALTTQLTANAHLVAAFEQSLGNMTIRLQSLTMTAEQKDSELNELRKTIELLKKQNAAAQAAINGVINTPELNCKGNGTAQSADLRIRRQHSSDSVSSINSATSHSSVGSNIESDSKKKKRKNWVILYIQLRSSFKQAFGKKKSPKSASSHSDIEEMTDSSLPSSPKLPHNGSTGSTPLLRNSHSNSLISECMDSEAETVMQLRNELRDKEMKLTDIRLEALSSAHQLDQLREAMNRMQSEIEKLKAENDRLKSESQGSGCSRAPSQVSISASPRQSMGLSQHSLNLTESTSLDMLLDDTGECSARKEGGRHVKIVVSFQEEMKWKEDSRPHLFLIGCIGVSGKTKWDVLDGVVRRLFKEYIIHVDPVSQLGLNSDSVLGYSIGEIKRSNTSETPELLPCGYLVGENTTISVTVKGLAENSLDSLVFESLIPKPILQRYVSLLIEHRRIILSGPSGTGKTYLANRLSEYIVLREGRELTDGVIATFNVDHKSSKELRQYLSNLADQCNSENNAVDMPLVIILDNLHHVSSLGEIFNGLLNCKYHKCPYIIGTMNQATSSTPNLQLHHNFRWVLCANHTEPVKGFLGRFLRRKLMETEISGRVRNMELVKIIDWIPKVWHHLNRFLEAHSSSDVTIGPRLFLSCPIDVDGSRVWFTDLWNYSIIPYLLEAVREGLQLYGRRAPWEDPAKWVMDTYPWAASPQQHEWPPLLQLRPEDVGFDGYSMPREGSTSKQMPPSDAEGDPLMNMLMRLQEAANYSSPQSYDSDSNSNSHHDDILDSSLESTL

SEQ ID NO: 5557 - protein, 2429 aa, Homo sapiens
MPAILVASKMKSGLPKPVHSAAPILHVPPARAGPQPCYLKLGSKVEVSKTTYPSQIPLKSQVLQGLQEPAGEGLPLRKSGSVENGFDTQIYTDWANHYLAKSGHKRLIRDLQQDVTDGVLLAQIIQVVANEKIEDINGCPKNRSQMIENIDACLNFLAAKGINIQGLSAEEIRNGNLKAILGLFFSLSRYKQQQQQPQKQHLSSPLPPAVSQVAGAPSQCQAGTPQQQVPVTPQAPCQPHQPAPHQQSKAQAEMQSRLPGPTARVSAAGSEAKTRGGSTTANNRRSQSFNNYDKSKPVTSPPPPPSSHEKEPLASSASSHPGMSDNAPASLESGSSSTPTNCSTSSAIPQPGAATKPWRSKSLSVKHSATVSMLSVKPPGPEAPRPTPEAMKPAPNNQKSMLEKLKLFNSKGGSKAGEGPGSRDTSCERLETLPSFEESEELEAASRMLTTVGPASSSPKIALKGIAQRTFSRALTNKKSSLKGNEKEKEKQQREKDKEKSKDLAKRASVTERLDLKEEPKEDPSGAAVPEMPKKSSKIASFIPKGGKLNSAKKEPMAPSHSGIPKPGMKSMPGKSPSAPAPSKEGERSRSGKLSSGLPQQKPQLDGRHSSSSSSLASSEGKGPGGTTLNHSISSQTVSGSVGTTQTTGSNTVSVQLPQPQQQYNHPNTATVAPFLYRSQTDTEGNVTAESSSTGVSVEPSHFTKTGQPALEELTGEDPEARRLRTVKNIADLRQNLEETMSSLRGTQVTHSTLETTFDTNVTTEMSGRSILSLTGRPTPLSWRLGQSSPRLQAGDAPSMGNGYPPRANASRFINTESGRYVYSAPLRRQLASRGSSVCHVDVSDKAGDEMDLEGISMDAPGYMSDGDVLSKNIRTDDITSGYMTDGGLGLYTRRLNRLPDGMAVVRETLQRNTSLGLGDADSWDDSSSVSSGISDTIDNLSTDDINTSSSISSYANTPASSRKNLDVQTDAEKHSQVERNSLWSGDDVKKSDGGSDSGIKMEPGSKWRRNPSDVSDESDKSTSGKKNPVISQTGSWRRGMTAQVGITMPRTKASAPAGALKTPGTGKTDDAKVSEKGRLSPKASQVKRSPSDAGRSSGDESKKPLPSSSRTPTANANSFGFKKQSGSAAGLAMITASGVTVTSRSATLGKIPKSSALVSRSAGRKSSMDGAQNQDDGYLALSSRTNLQYRSLPRPSKSNSRNGAGNRSSTSSIDSNISSKSAGLPVPKLREPSKTALGSSLPGLVNQTDKEKGISSDNESVASCNSVKVNPAAQPVSSPAQTSLQPGAKYPDVASPTLRRLFGGKPTKQVPIATAENMKNSVVISNPHATMTQQGNLDSPSGSGVLSSGSSSPLYSKNVDLNQSPLASSPSSAHSAPSNSLTWGTNASSSSAVSKDGLGFQSVSSLHTSCESIDISLSSGGVPSHNSSTGLIASSKDDSLTPFVRTNSVKTTLSESPLSSPAASPKFCRSTLPRKQDSDPHLDRNTLPKKGLRYTPTSQLRTQEDAKEWLRSHSAGGLQDTAANSPFSSGSSVTSPSGTRFNFSQLASPTTVTQMSLSNPTMLRTHSLSNADGQYDPYTDSRFRNSSMSLDEKSRTMSRSGSFRDGFEEVHGSSLSLVSSTSSVYSTPEEKCQSEIRKLRRELDASQEKVSALTTQLTANAHLVAAFEQSLGNMTIRLQSLTMTAEQKDSELNELRKTIELLKKQNAAAQAAINGVINTPELNCKGNGTAQSADLRIRRQHSSDSVSSINSATSHSSVGSNIESDSKKKKRKNWLRSSFKQAFGKKKSPKSASSHSDIEEMTDSSLPSSPKLPHNGSTGSTPLLRNSHSNSLISECMDSEAETVMQLRNELRDKEMKLTDIRLEALSSAHQLDQLREAMNRMQSEIEKLKAENDRLKSESQGSGCSRAPSQVSISASPRQSMGLSQHSLNLTESTSLDMLLDDTGECSARKEGGRHVKIVVSFQEEMKWKEDSRPHLFLIGCIGVSGKTKWDVLDGVVRRLFKEYIIHVDPVSQLGLNSDSVLGYSIGEIKRSNTSETPELLPCGYLVGENTTISVTVKGLAENSLDSLVFESLIPKPILQRYVSLLIEHRRIILSGPSGTGKTYLANRLSEYIVLREGRELTDGVIATFNVDHKSSKELRQYLSNLADQCNSENNAVDMPLVIILDNLHHVSSLGEIFNGLLNCKYHKCPYIIGTMNQATSSTPNLQLHHNFRWVLCANHTEPVKGFLGRFLRRKLMETEISGRVRNMELVKIIDWIPKVWHHLNRFLEAHSSSDVTIGPRLFLSCPIDVDGSRVWFTDLWNYSIIPYLLEAVREGLQLYGRRAPWEDPAKWVMDTYPWAASPQQHEWPPLLQLRPEDVGFDGYSMPREGSTSKQMPPSDAEGDPLMNMLMRLQEAANYSSPQSYDSDSNSNSHHDDILDSSLESTL

SEQ ID NO: 5558 - protein, 761 aa, Homo sapiens
MLQTKDLIWTLFFLGTAVSLQVDIVPSQGEISVGESKFFLCQVAGDAKDKDISWFSPNGEKLTPNQQRISVVWNDDSSSTLTIYNANIDDAGIYKCVVTGEDGSESEATVNVKIFQKLMFKNAPTPQEFREGEDAVIVCDVVSSLPPTIIWKHKGRDVILKKDVRFIVLSNNYLQIRGIKKTDEGTYRCEGRILARGEINFKDIQVIVNVPPTIQARQNIVNATANLGQSVTLVCDAEGFPEPTMSWTKDGEQIEQEEDDEKYIFSDDSSQLTIKKVDKNDEAEYICIAENKAGEQDATIHLKVFAKPKITYVENQTAMELEEQVTLTCEASGDPIPSITWRTSTRNISSEEKTLDGHMVVRSHARVSSLTLKSIQYTDAGEYICTASNTIGQDSQSMYLEVQYAPKLQGPVAVYTWEGNQVNITCEVFAYPSATISWFRDGQLLPSSNYSNIKIYNTPSASYLEVTPDSENDFGNYNCTAVNRIGQESLEFILVQADTPSSPSIDQVEPYSSTAQVQFDEPEATGGVPILKYKAEWRAVGEEVWHSKWYDAKEASMEGIVTIVGLKPETTYAVRLAALNGKGLGEISAASEFKTQPVHSPPPPASASSSTPVPLSPPDTTWPLPALATTEPAKNIAQNHCCNMFQAGLHNALMKNLIKQDDGGSPIRHYLVRYRALSSEWKPEIRLPSGSDHVMLKSLDWNAEYEVYVVAENQQGKSKAAHFVFRTSAQPTAIPATLGGNSASYTFVSLLFSAVTLLLLC

SEQ ID NO: 5559 - protein, 604 aa, Homo sapiens
ARGEDDEKYIFSDDSSQLTIKKVDKNDEAEYICIAENKAGEQDATIHLKVFAKPKITYVENQTAMELEEQVTLTCEASGDPIPSITWRTSTRNISSEEKASWTRPEKQETLDGHMVVRSHARVSSLTLKSIQYTDAGEYICTASNTIGQDSQSMYLEVQYAPKLQGPVAVYTWEGNQVNITCEVFAYPSATISWFRDGQLLPSSNYSNIKIYNTPSASYLEVTPDSENDFGNYNCTAVNRIGQESLEFILVQADTPSSPSIDQVEPYSSTAQVQFDEPEATGGVPILKYKAEWRAVGEEVWHSKWYDAKEASMEGIVTIVGLKPETTYAVRLAALNGKGLGEISAASEFKTQPVQGEPSAPKLEGQMGEDGNSIKVNLIKQDDGGSPIRHYLVRYRALSSEWKPEIRLPSGSDHVMLKSLDWNADYEVYVVAENQQGKSKAAHFVFRTSAQPTAIPANGSPTSGLSTGAIVGILIVIFVLLLVVVDITCYFLNKCGLFMCIAVNLCGKAGPGAKGKDMEEGKAAFSKDESKEPIVEVRTEEERTPNHDGGKHTEPNETTPLTEPEKGPVEAKPECQETETKPAPAEVKTVPNDATQTKENESKA

SEQ ID NO: 5560 - protein, 848 aa, Homo sapiens
MLQTKDLIWTLFFLGTAVSLQVDIVPSQGEISVGESKFFLCQVAGDAKDKDISWFSPNGEKLTPNQQRISVVWNDDSSSTLTIYNANIDDAGIYKCVVTGEDGSESEATVNVKIFQKLMFKNAPTPQEFREGEDAVIVCDVVSSLPPTIIWKHKGRDVILKKDVRFIVLSNNYLQIRGIKKTDEGTYRCEGRILARGEINFKDIQVIVNVPPTIQARQNIVNATANLGQSVTLVCDAEGFPEPTMSWTKDGEQIEQEEDDEKYIFSDDSSQLTIKKVDKNDEAEYICIAENKAGEQDATIHLKVFAKPKITYVENQTAMELEEQVTLTCEASGDPIPSITWRTSTRNISSEEKTLDGHMVVRSHARVSSLTLKSIQYTDAGEYICTASNTIGQDSQSMYLEVQYAPKLQGPVAVYTWEGNQVNITCEVFAYPSATISWFRDGQLLPSSNYSNIKIYNTPSASYLEVTPDSENDFGNYNCTAVNRIGQESLEFILVQADTPSSPSIDQVEPYSSTAQVQFDEPEATGGVPILKYKAEWRAVGEEVWHSKWYDAKEASMEGIVTIVGLKPETTYAVRLAALNGKGLGEISAASEFKTQPVQGEPSAPKLEGQMGEDGNSIKVNLIKQDDGGSPIRHYLVRYRALSSEWKPEIRLPSGSDHVMLKSLDWNAEYEVYVVAENQQGKSKAAHFVFRTSAQPTAIPANGSPTSGLSTGAIVGILIVIFVLLLVVVDITCYFLNKCGLFMCIAVNLCGKAGPGAKGKDMEEGKAAFSKDESKEPIVEVRTEEERTPNHDGGKHTEPNETTPLTEPEKGPVEAKPECQETETKPAPAEVKTVPNDATQTKENESKA

SEQ ID NO: 5561 - protein, 761 aa, Homo sapiens
MLQTKDLIWTLFFLGTAVSLQVDIVPSQGEISVGESKFFLCQVAGDAKDKDISWFSPNGEKLTPNQQRISVVWNDDSSSTLTIYNANIDDAGIYKCVVTGEDGSESEATVNVKIFQKLMFKNAPTPQEFREGEDAVIVCDVVSSLPPTIIWKHKGRDVILKKDVRFIVLSNNYLQIRGIKKTDEGTYRCEGRILARGEINFKDIQVIVNVPPTIQARQNIVNATANLGQSVTLVCDAEGFPEPTMSWTKDGEQIEQEEDDEKYIFSDDSSQLTIKKVDKNDEAEYICIAENKAGEQDATIHLKVFAKPKITYVENQTAMELEEQVTLTCEASGDPIPSITWRTSTRNISSEEKTLDGHMVVRSHARVSSLTLKSIQYTDAGEYICTASNTIGQDSQSMYLEVQYAPKLQGPVAVYTWEGNQVNITCEVFAYPSATISWFRDGQLLPSSNYSNIKIYNTPSASYLEVTPDSENDFGNYNCTAVNRIGQESLEFILVQADTPSSPSIDQVEPYSSTAQVQFDEPEATGGVPILKYKAEWRAVGEEVWHSKWYDAKEASMEGIVTIVGLKPETTYAVRLAALNGKGLGEISAASEFKTQPVHSPPPPASASSSTPVPLSPPDTTWPLPALATTEPAKGEPSAPKLEGQMGEDGNSIKVNLIKQDDGGSPIRHYLVRYRALSSEWKPEIRLPSGSDHVMLKSLDWNAEYEVYVVAENQQGKSKAAHFVFRTSAQPTAIPATLGGNSASYTFVSLLFSAVTLLLLC

SEQ ID NO: 5562 - protein, 375 aa, Homo sapiens
MERASCLLLLLLPLVHVSATTPEPCELDDEDFRCVCNFSEPQPDWSEAFQCVSAVEVEIHAGGLNLEPFLKRVDADADPRQYADTVKALRVRRLTVGAAQVPAQLLVGALRVLAYSRLKELTLEDLKITGTMPPLPLEATGLALSSLRLRNVSWATGRSWLAELQQWLKPGLKVLSIAQAHSPAFSCEQVRAFPALTSLDLSDNPGLGERGLMAALCPHKFPAIQNLALRNTGMETPTGVCAALAAAGVQPHSLDLSHNSLRATVNPSAPRCMWSSALNSLNLSFAGLEQVPKGLPAKLRVLDLSCNRLNRAPQPDELPEVDNLTLDGNPFLVPGTALPHEGSMNSGVVPACARSTLSVGVSGTLVLLQGARGFA

SEQ ID NO: 5563 - protein, 529 aa, Homo sapiens
MSQDTEVDMKEVELNELEPEKQPMNAASGAAMSLAGAEKNGLVKIKVAEDEAEAAAAAKFTGLSKEELLKVAGSPGWVRTRWALLLLFWLGWLGMLAGAVVIIVRAPRCRELPAQKWWHTGALYRIGDLQAFQGHGAGNLAGLKGRLDYLSSLKVKGLVLGPIHKNQKDDVAQTDLLQIDPNFGSKEDFDSLLQSAKKKSIRVILDLTPNYRGENSWFSTQVDTVATKVKDALEFWLQAGVDGFQVRDIENLKDASSFLAEWQNITKGFSEDRLLIAGTNSSDLQQILSLLESNKDLLLTSSYLSDSGSTGEHTKSLVTQYLNATGNRWCSWSLSQARLLTSFLPAQLLRLYQLMLFTLPGTPVFSYGDEIGLDAAALPGQPMEAPVMLWDESSFPDIPGAVSANMTVKGQSEDPGSLLSLFRRLSDQRSKERSLLHGDFHAFSAGPGLFSYIRHWDQNERFLVVLNFGDVGLSAGLQASDLPASASLPAKADLLLSTQPGREEGSPLELERLKLEPHEGLLLRFPYAA

SEQ ID NO: 5564 - protein, 5405 aa, Homo sapiens
MGALWSWWILWAGATLLWGLTQEASVDLKNTGREEFLTAFLQNYQLAYSKAYPRLLISSLSESPASVSILSQADNTSKKVTVRPGESVMVNISAKAEMIGSKIFQHAVVIHSDYAISVQALNAKPDTAELTLLRPIQALGTEYFVLTPPGTSARNVKEFAVVAGAAGASVSVTLKGSVTFNGKFYPAGDVLRVTLQPYNVAQLQSSVDLSGSKVTASSPVAVLSGHSCAQKHTTCNHVVEQLLPTSAWGTHYVVPTLASQSRYDLAFVVASQATKLTYNHGGITGSRGLQAGDVVEFEVRPSWPLYLSANVGIQVLLFGTGAIRNEVTYDPYLVLIPDVAAYCPAYVVKSVPGCEGVALVVAQTKAISGLTIDGHAVGAKLTWEAVPGSEFSYAEVELGTADMIHTAEATTNLGLLTFGLAKAIGYATAADCGRTVLSPVEPSCEGMQCAAGQRCQVVGGKAGCVAESTAVCRAQGDPHYTTFDGRRYDMMGTCSYTMVELCSEDDTLPAFSVEAKNEHRGSRRVSYVGLVTVRAYSHSVSLTRGEVGFVLVDNQRSRLPVSLSEGRLRVYQSGPRAVVELVFGLVVTYDWDCQLALSLPARFQDQVCGLCGNYNGDPADDFLTPDGALAPDAVEFASSWKLDDGDYLCEDGCQNNCPACTPGQAQHYEGDRLCGMLTKLDGPFAVCHDTLDPRPFLEQCVYDLCVVGGERLSLCRGLSAYAQACLELGISVGDWRSPANCPLSCPANSRYELCGPACPTSCNGAAAPSNCSGRPCVEGCVCLPGFVASGGACVPASSCGCTFQGLQLAPGQEVWADELCQRRCTCNGATHQVTCRDKQSCPAGERCSVQNGLLGCYPDRFGTCQGSGDPHYVSFDGRRFDFMGTCTYLLVGSCGQNAALPAFRVLVENEHRGSQTVSYTRAVRVEARGVKVAVRREYPGQVLVDDVLQYLPFQAADGQVQVFRQGRDAVVRTDFGLTVTYDWNARVTAKVPSSYAEALCGLCGNFNGDPADDLALRGGGQAANALAFGNSWQEETRPGCGATEPGDCPKLDSLVAQQLQSKNECGILADPKGPFRECHSKLDPQGAVRDCVYDRCLLPGQSGPLCDALATYAAACQAAGATVHPWRSEELCPLSCPPHSHYEACSYGCPLSCGDLPVPGGCGSECHEGCVCDEGFALSGESCLPLASCGCVHQGTYHPPGQTFYPGPGCDSLCHCQEGGLVSCESSSCGPHEACQPSGGSLGCVAVGSSTCQASGDPHYTTFDGRRFDFMGTCVYVLAQTCGTRPGLHRFAVLQENVAWGNGRVSVTRVITVQVANFTLRLEQRQWKVTVNGVDMKLPVVLANGQIRASQHGSDVVIETDFGLRVAYDLVYYVRVTVPGNYYQQMCGLCGNYNGDPKDDFQKPNGSQAGNANEFGNSWEEVVPDSPCLPPTPCPPGSEDCIPSHKCPPELEKKYQKEEFCGLLSSPTGPLSSCHKLVDPQGPLKDCIFDLCLGGGNLSILCSNIHAYVSACQAAGGHVEPWRTETFCPMECPPNSHYELCADTCSLGCSALSAPPQCQDGCAEGCQCDSGFLYNGQACVPIQQCGCYHNGVYYEPEQTVLIDNCRQQCTCHAGKGMVCQEHSCKPGQVCQPSGGILSCVTKDPCHGVTCRPQETCKEQGGQGVCLPNYEATCWLWGDPHYHSFDGRKFDFQGTCNYVLATTGCPGVSTQGLTPFTVTTKNQNRGNPAVSYVRVVTVAALGTNISIHKDEIGKVRVNGVLTALPVSVADGRISVTQGASKALLVADFGLQVSYDWNWRVDVTLPSSYHGAVCGLCGNMDRNPNNDQVFPNGTLAPSIPIWGGSWRAPGWDPLCWDECRGSCPTCPEDRLEQYEGPGFCGPLAPGTGGPFTTCHAHVPPESFFKGCVLDVCMGGGDRDILCKALASYVAACQAAGVVIEDWRAQVGCEITCPENSHYEVCGPPCPASCPSPAPLTTPAVCEGPCVEGCQCDAGFVLSADRCVPLNNGCGCWANGTYHEAGSEFWADGTCSQWCRCGPGGGSLVCTPASCGLGEVCGLLPSGQHGCQPVSTAECQAWGDPHYVTLDGHRFNFQGTCEYLLSAPCHGPPLGAENFTVTVANEHRGSQAVSYTRSVTLQIYNHSLTLSARWPRKLQVDGVFVTLPFQLDSLLHAHLSGADVVVTTTSGLSLAFDGDSFVRLRVPAAYAGSLCGLCGNYNQDPADDLKAVGGKPAGWQVGGAQGCGECVSKPCPSPCTPEQQESFGGPDACGVISATDGPLAPCHGLVPPAQYFQGCLLDACQVQGHPGGLCPAVATYVAACQAAGAQLREWRRPDFCPFQCPAHSHYELCGDSCPGSCPSLSAPEGCESACREGCVCDAGFVLSGDTCVPVGQCGCLHDDRYYPLGQTFYPGPGCDSLCRCREGGEVSCEPSSCGPHETCRPSGGSLGCVAVGSTTCQASGDPHYTTFDGRRFDFMGTCVYVLAQTCGTRPGLHRFAVLQENVAWGNGRVSVTRVITVQVANFTLRLEQRQWKVTVNGVDMKLPVVLANGQIRASQHGSDVVIETDFGLRVAYDLVYYVRVTVPGNYYQLMCGLCGNYNGDPKDDFQKPNGSQAGNANEFGNSWEEVVPDSPCLPPPTCPPGSEGCIPSEECPPELEKKYQKEEFCGLLSSPTGPLSSCHKLVDPQGPLKDCIFDLCLGGGNLSILCSNIHAYVSACQAAGGHVEPWRNETFCPMECPQNSHYELCADTCSLGCSALSAPLQCPDGCAEGCQCDSGFLYNGQACVPIQQCGCYHNGAYYEPEQTVLIDNCRQQCTCHAGKVVVCQEHSCKPGQVCQPSGGILSCVTKDPCHGVTCRPQETCKEQGGQGVCLPNYEATCWLWGDPHYHSFDGRKFDFQGTCNYVLATTGCPGVSTQGLTPFTVTTKNQNRGNPAVSYVRVVTVAALGTNISIHKDEIGKVRVNGVLTALPVSVADGRISVAQGASKALLVADFGLQVSYDWNWRVDVTLPSSYHGAVCGLCGNMDRNPNNDQVFPNGTLAPSIPIWGGSWRAPGWDPLCWDECRGSCPTCPEDRLEQYEGPGFCGPLAPGTGGPFTTCHAHVPPESFFKGCVLDVCMGGGDHDILCKALASYVAACQAAGVVIEDWRAQVGCEITCPENSHYEVCGPPCPASCPSPAPLTTPAVCEGPCVEGCQCDAGFVLSADRCVPLNNGCGCWANGTYHEAGSEFWADGTCSQWCRCGPGGGSLVCTPASCGLGEVCGLLPSGQHGCQPVSTAECQAWGDPHYVTLDGHRFDFQGTCEYLLSAPCHGPPLGAENFTVTVANEHRGSQAVSYTRSVTLQIYNHSLTLSARWPRKLQVDGVFVTLPFQLDSLLHAHLSGADVVVTTTSGLSLAFDGDSFVRLRVPAAYAGSLCGLCGNYNQDPADDLKAVGGKPAGWQVGGAQGCGECVSKPCPSPCTPEQQESFGGPDACGVISATDGPLAPCHGLVPPAQYFQGCLLDACQVQGHPGGLCPAVATYVAACQAAGAQLREWRRPDFCPFQCPAHSHYELCGDSCPGSCPSLSAPEGCESACREGCVCDAGFVLSGDTCVPVGQCGCLHDDRYYPLGQTFYPGPGCDSLCRCREGGEVSCEPSSCGPHETCRPSGGSLGCVAVGSTTCQASGDPHYTTFDGRRFDFMGTCVYVLAQTCGTRPGLHRFAVLQENVAWGNGRVSVTRVITVQVANFTLRLEQRQWKVTVNGVDMKLPVVLANGQIRASQHGSDVVIETDFGLRVAYDLVYYVRVTVPGNYYQLMCGLCGNYNGDPKDDFQKPNGSQAGNANEFGNSWEEVVPDSPCLPPPTCPPGSEGCIPSEECPPELEKKYQKEEFCGLLSSPTGPLSSCHKLVDPQGPLKDCIFDLCLGGGNLSILCSNIHAYVSACQAAGGHVEPWRNETFCPMECPQNSHYELCADTCSLGCSALSAPLQCPDGCAEGCQCDSGFLYNGQACVPIQQCGCYHNGVYYEPEQTVLIDNCRQQCTCHVGKVVVCQEHSCKPGQVCQPSGGILSCVNKDPCHGVTCRPQETCKEQGGQGVCLPNYEATCWLWGDPHYHSFDGRKFDFQGTCNYVLATTGCPGVSTQGLTPFTVTTKNQNRGNPAVSYVRVVTVAALGTNISIHKDEIGKVRVNGVLTALPVSVADGRISVAQGASKALLVADFGLQVSYDWNWRVDVTLPSSYHGAVCGLCGNMDRNPNNDQVFPNGTLAPSIPIWGGSWRAPGWDPLCWDECRGSCPTCPEDRLEQYEGPGFCGPLASGTGGPFTTCHAHVPPESFFKGCVLDVCMGGGDHDILCKALASYVAACQAAGVVIEDWRAQVGCEITCPENSHYEVCGPPCPASCPSPAPLTTPAVCEGPCVEGCQCDAGFVLSADRCVPLNNGCGCWANGTYHEAGSEFWADGTCSQWCRCGPGGGSLVCTPASCGLGEVCGLLPSGQHSCQPVSTAECQAWGDPHYVTLDGHRFDFQGTCEYLLSAPCHGPPLGAENFTVTVANEHRGSQAVSYTRSVTLQIYNHSLTLSARWPRKLQVDGVFVALPFQLDSLLHAHLSGADVVVTTTSGLSLAFDGDSFVRLRVPAAYAASLCGLCGNYNQDPADDLKAVGGKPAGWQVGGAQGCGECVSKPCPSPCTPEQQESFGGPDACGVISATDGPLAPCHGLVPPAQYFQGCLLDACQVQGHPGGLCPAVATYVAACQAAGAQLGEWRRPDFCPLQCPAHSHYELCGDSCPVSCPSLSAPEGCESACREGCVCDAGFVLSGDTCVPVGQCGCLHDGRYYPLGEVFYPGPECERRCECGPGGHVTCQEGAACGPHEECRLEDGVQACHATGCGRCLANGGIHYITLDGRVYDLHGSCSYVLAQVCHPKPGDEDFSIVLEKNAAGHLQRLLVTVAGQVVSLAQGQQVTVDGEAVALPVAVGRVRVTAEGRNMVLQTTKGLRLLFDGDAHLLMSIPSPFRGRLCGLCGNFNGNWSDDFVLPNGSAASSVETFGAAWRVPGSSKGCGEGCGPQGCPVCLAEETAPYESNEACGQLRNPQGPFATCQAVLSPSEYFRQCVYDLCAQKGDKAFLCRSLAAYTAACQAAGVAVKPWRTDSFCPLHCPAHSHYSICTRTCQGSCAALSGLTGCTTRCFEGCECDDRFLLSQGVCIPVQDCGCTHNGRYLPVNSSLLTSDCSERCSCSSSSGLTCQAAGCPPGRVCEVKAEARNCWATRGLCVLSVGANLTTFDGARGATTSPGVYELSSRCPGLQNTIPWYRVVAEVQICHGKTEAVGQVHIFFQDGMVTLTPNKGVWVNGLRVDLPAEKLASVSVSRTPDGSLLVRQKAGVQVWLGANGKVAVIVSNDHAGKLCGACGNFDGDQTNDWHDSQEKPAMEKWRAQDFSPCYG

SEQ ID NO: 5565 - protein, 1202 aa, Homo sapiens
VDVTLPSSYHGAVCGLCGNMDRNPNNDQVFPNGTLAPSIPIWGGSWRAPGWDPLCWDECRGSCPTCPEDRLEQYEGPGFCGPLAPGTGGPFTTCHAHVPPESFFKGCVLDVCMGGGDRDILCKALASYVAACQAAGVVIEDWRAQVGCEITCPENSHYEVCGPPCPASCPSPAPLTTPAVCEGPCVEGCQCDAGFVLSADRCVPLNNGCGCWANGTYHEAGSEFWADGTCSQWCRCGPGGGSLVCTPASCGLGEVCGLLPSGQHGCQPVSTAECQAWGDPHYVTLDGHRFDFQGTCEYLLSAPCHGPPLGAENFTVTVANEHRGSQAVSYTRSVTLQIYNHSLTLSARWPRKLQVDGVFVALPFQLDSLLHAHLSGADVVVTTTSGLSLAFDGDSFVRLRVPAAYAASLCGLCGNYNQDPADDLKAVGGKPAGWQVGGAQGCGECVSKPCPSPCTPEQQESFGGPDACGVISATDGPLAPCHGLVPPAQYFQGCLLDACQVQGHPGGLCPAVATYVAACQAAGAQLGEWRRPDFCPLQCPAHSHYELCGDSCPVSCPSLSAPEGCESACREGCVCDAGFVLSGDTCVPVGQCGCLHDGRYYPLGEVFYPGPECERRCECGPGGHVTCQEGAACGPHEECRLEDGVQACHATGCGRCLANGGIHYITLDGRVYDLHGSCSYVLAQVCHPKPGDEDFSIVLEKNAAGDLQRLLVTVAGQVVSLAQGQQVTVDGEAVALPVAVGRVRVTAEGRNMVLQTTKGLRLLFDGDAHLLMSIPSPFRGRLCGLCGNFNGNWSDDFVLPNGSAASSVETFGAAWRAPGSSKGCGEGCGPQGCPVCLAEETAPYESNEACGQLRNPQGPFATCQAVLSPSEYFRQCVYDLCAQKGDKAFLCRSLAAYTAACQAAGVAVKPWRTDSFCPLHCPAHSHYSICTRTCQGSCAALSGLTGCTTRCFEGCECDDRFLLSQGVCIPVQDCGCTHNGRYLPVNSSLLTSDCSERCSCSSSSGLTCQAAGCPPGRVCEVKAEARNCWATRGLCVLSVGANLTTFDGARGATTSPGVYELSSRCPGLQNTIPWYRVVAEVQICHGKTEAVGQVHIFFQDGMVTLTPNKGVWVNGLRVDLPAEKLASVSVSRTPDGSLLVRQKAGVQVWLGANGKVAVIVSNDHAGKLCGACGNFDGDQTNDWHDSQEKPAMEKWRAQDFSP

SEQ ID NO: 5566 - protein, 493 aa, Homo sapiens
MLAATVLTLALLGNAHACSKGTSHEAGIVCRITKPALLVLNHETAKVIQTAFQRASYPDITGEKAMMLLGQVKYGLHNIQISHLSIASSQVELVEAKSIDVSIQNVSVVFKGTLKYGYTTAWWLGIDQSIDFEIDSAIDLQINTQLTCDSGRVRTDAPDCYLSFHKLLLHLQGEREPGWIKQLFTNFISFTLKLVLKGQICKEINVISNIMADFVQTRAASILSDGDIGVDISLTGDPVITASYLESHHKGHFIYKNVSEDLPLPTFSPTLLGDSRMLYFWFSERVFHSLAKVAFQDGRLMLSLMGDEFKAVLETWGFNTNQEIFQEVVGGFPSQAQVTVHCLKMPKISCQNKGVVVNSSVMVKFLFPRPDQQHSVAYTFEEDIVTTVQASYSKKKLFLSLLDFQITPKTVSNLTESSSESIQSFLQSMITAVGIPEVMSRLEVVFTALMNSKGVSLFDIINPEIITRDGFLLLQMDFGFPEHLLVDFLQSLS

SEQ ID NO: 5567 - protein, 967 aa, Homo sapiens
MAKGFYISKSLGILGILLGVAAVCTIIALSVVYSQEKNKNANSSPVASTTPSASATTNPASATTLDQSKAWNRYRLPNTLKPDSYQVTLRPYLTPNDRGLYVFKGSSTVRFTCKEATDVIIIHSKKLNYTLSQGHRVVLRGVGGSQPPDIDKTELVEPTEYLVVHLKGSLVKDSQYEMDSEFEGELADDLAGFYRSEYMEGNVRKVVATTQMQAADARKSFPCFDEPAMKAEFNITLIHPKDLTALSNMLPKGPSTPLPEDPNWNVTEFHTTPKMSTYLLAFIVSEFDYVEKQASNGVLIRIWARPSAIAAGHGDYALNVTGPILNFFAGHYDTPYPLPKSDQIGLPDFNAGAMENWGLVTYRENSLLFDPLSSSSSNKERVVTVIAHELAHQWFGNLVTIEWWNDLWLNEGFASYVEYLGADYAEPTWNLKDLMVLNDVYRVMAVDALASSHPLSTPASEINTPAQISELFDAISYSKGASVLRMLSSFLSEDVFKQGLASYLHTFAYQNTIYLNLWDHLQEAVNNRSIQLPTTVRDIMNRWTLQMGFPVITVDTSTGTLSQEHFLLDPDSNVTRPSEFNYVWIVPITSIRDGRQQQDYWLIDVRAQNDLFSTSGNEWVLLNLNVTGYYRVNYDEENWRKIQTQLQRDHSAIPVINRAQIINDAFNLASAHKVPVTLALNNTLFLIEERQYMPWEAALSSLSYFKLMFDRSEVYGPMKNYLKKQVTPLFIHFRNNTNNWREIPENLMDQYSEVNAISTACSNGVPECEEMVSGLFKQWMENPNNNPIHPNLRSTVYCNAIAQGGEEEWDFAWEQFRNATLVNEADKLRAALACSKELWILNRYLSYTLNPDLIRKQDATSTIISITNNVIGQGLVWDFVQSNWKKLFNDYGGGSFSFSNLIQAVTRRFSTEYELQQLEQFKKDNEETGFGSGTRALEQALEKTKANIKWVKENKEVVLQWFTENSK

SEQ ID NO: 5568 - protein, 198 aa, Homo sapiens
MPLGLLWLGLALLGALHAQAQDSTSDLIPAPPLSKVPLQQNFQDNQFQGKWYVVGLAGNAILREDKDPQKMYATIYELKEDKSYNVTSVLFRKKKCDYWIRTFVPGCQPGEFTLGNIKSYPGLTSYLVRVVSTNYNQHAMVFFKKVSQNREYFKITLYGRTKELTSELKENFIRFSKSLGLPENHIVFPVPIDQCIDG

SEQ ID NO: 5569 - protein, 567 aa, Homo sapiens [sequence omitted]

SEQ ID NO: 5570 - protein, 207 aa, Homo sapiens
MAPFEPLASGILLLLWLIAPSRACTCVPPHPQTAFCNSDLVIRAKFVGTPEVNQTTLYQRYEIKMTKMYKGFQALGDAADIRFVYTPAMESVCGYFHRSHNRSEEFLIAGKLQDGLLHITTCSFVAPWNSLSLAQRRGFTKTYTVGCEECTVFPCLSIPCKLQSGTHCLWTDQLLQGSEKGFQSRHLACLPREPGLCTWQSLRSQIA

SEQ ID NO: 5571 - protein, 1482 aa, Homo sapiens
MRKDRLLHLCLVLLLILLSASDSNSTEPQYMVLVPSLLHTEAPKKGCVLLSHLNETVTVSASLESGRENRSLFTDLVAEKDLFHCVSFTLPRISASSEVAFLSIQIKGPTQDFRKRNTVLVLNTQSLVFVQTDKPMYKPGQTVRFRVVSVDENFRPRNELIPLIYLENPRRNRIAQWQSLKLEAGINQLSFPLSSEPIQGSYRVVVQTESGGRIQHPFTVEEFVLPKFEVKVQVPKIISIMDEKVNITVCGEYTYGKPVPGLATVSLCRKLSRVLNCDKQEVCEEFSQQLNSNGCITQQVHTKMLQITNTGFEMKLRVEARIREEGTDLEVTANRISEITNIVSKLKFVKVDSHFRQGIPFFAQVLLVDGKGVPIPNKLFFISVNDANYYSNATTNEQGLAQFSINTTSISVNKLFVRVFTVHPNLCFHYSWVAEDHQGAQHTANRVFSLSGSYIHLEPVAGTLPCGHTETITAHYTLNRQAMGELSELSFHYLIMAKGVIVRSGTHTLPVESGDMKGSFALSFPVESDVAPIARMFIFAILPDGEVVGDSEKFEIENCLANKVDLSFSPAQSPPASHAHLQVAAAPQSLCALRAVDQSVLLMKPEAELSVSSVYNLLTVKDLTNFPDNVDQQEEEQGHCPRPFFIHNGAIYVPLSSNEADIYSFLKGMGLKVFTNSKIRKPKSCSVIPSVSAGAVGQGYYGAGLGVVERPYVPQLGTYNVIPLNNEQSSGPVPETVRSYFPETWIWELVAVNSSGVAEVGVTVPDTITEWKAGAFCLSEDAGLGISSTASLRAFQPFFVELTMPYSVIRGEVFTLKATVLNYLPKCIRVSVQLKASPAFLASQNTKGEESYCICGSERQTLSWTVTPKTLGNVNFSVSAEAMQSLELCGNEVVEVPEIKRKDTVIKTLLVEAEGIEQEKTFSSMTCASGANVSEQLSLKLPSNVVKESARASFSVLGDILGSAMQNIQNLLQMPYGCGEQNMVLFAPNIYVLNYLNETQQLTQEIKAKAVGYLITGYQRQLNYKHQDGSYSTFGERYGRNQGNTWLTAFVLKTFAQARSYIFIDEAHITQSLTWLSQMQKDNGCFRSSGSLLNNAIKGGVEDEATLSAYVTIALLEIPLPVTNPIVRNALFCLESAWNVAKEGTHGSHVYTKALLAYAFSLLGKQNQNREILNSLDKEAVKEDNLVHWERPQRPKAPVGHLYQTQAPSAEVEMTSYVLLAYLTAQPAPTSGDLTSATNIVKWIMKQQNAQGGFSSTQDTVVALHALSRYGAATFTRTEKTAQVTVQDSQTFSTNFQVDNNNLLLLQQISLPELPGEYVITVTGERCVYLQTSMKYNILPEKEDSPFALKVQTVPQTCDGHKAHTSFQISLTISYTGNRPASNMVIVDVKMVSGFIPLKPTVKMLERSSSVSRTEVSNNHVLIYVEQVTNQTLSFSFMVLQDIPVGDLKPAIVKVYDYYETDESVVAEYIAPCSTDTEHGNV

SEQ ID NO: 5572 - protein, 1182 aa, Homo sapiens
MGQQVGRVGEAPGLQQPQPRGIRGSSAARPSGRRRDPAGRTTETGFNIFTQHDHFASCVEDGFEGDKTGGSSPEALHRPYGCDVEPQALNEAIRWSSKENLLGATESDPNLFVALYDFVASGDNTLSITKGEKLRVLGYNQNGEWSEVRSKNGQGWVPSNYITPVNSLEKHSWYHGPVSRSAAEYLLSSLINGSFLVRESESSPGQLSISLRYEGRVYHYRINTTADGKVYVTAESRFSTLAELVHHHSTVADGLVTTLHYPAPKCNKPTVYGVSPIHDKWEMERTDITMKHKLGGGQYGEVYVGVWKKYSLTVAVKTLKEDTMEVEEFLKEAAVMKEIKHPNLVQLLGVCTLEPPFYIVTEYMPYGNLLDYLRECNREEVTAVVLLYMATQISSAMEYLEKKNFIHRDLAARNCLVGENHVVKVADFGLSRLMTGDTYTAHAGAKFPIKWTAPESLAYNTFSIKSDVWAFGVLLWEIATYGMSPYPGIDLSQVYDLLEKGYRMEQPEGCPPKVYELMRACWKWSPADRPSFAETHQAFETMFHDSSISEEVAEELGRAASSSSVVPYLPRLPILPSKTRTLKKQVENKENIEGAQDATENSASSLAPGFIRGAQASSGSPALPRKQRDKSPSSLLEDAKETCFTRDRKGGFFSSFMKKRNAPTPPKRSSSFREMENQPHKKYELTGNFSSVASLQHADGFSFTPAQQEANLVPPKCYGGSFAQRNLCNDDGGGGGGSGTAGGGWSGITGFFTPRLIKKTLGLRAGKPTASDDTSKPFPRSNSTSSMSSGLPEQDRMAMTLPRNCQRSKLQLERTVSTSSQPEENVDRANDMLPKKSEESAAPSRERPKAKLLPRGATALPLRTPSGDLAITEKDPPGVGVAGVAAAPKGKEKNGGARLGMAGVPEDGEQPGWPSPAKAAPVLPTTHNHKVPVLISPTLKHTPADVQLIGTDSQGNKFKLLSEHQVTSSGDKDRPRRVKPKCAPPPPPVMRLLQHPSICSDPTEEPTALTAGQSTSETQEGGKKAALGAVPISGKAGRPVMPPPQVPLPTSSISPAKMANGTAGTKVALRKTKQAAEKISADKISKEALLECADLLSSALTEPVPNSQLVDTGHQLLDYCSGYVDCIPQTRNKFAFREAVSKLELSLQELQVSSAAAGVPGTNPVLNNLLSCVQEISDVVQR

SEQ ID NO: 5573 - protein, 1146 aa, Homo sapiens
MVLGTVLLPPNTYGRDQDTSLCCLCTEASESALPDLTEALHRPYGCDVEPQALNEAIRWSSKENLLGATESDPNLFVALYDFVASGDNTLSITKGEKLRVLGYNQNGEWSEVRSKNGQGWVPSNYITPVNSLEKHSWYHGPVSRSAAEYLLSSLINGSFLVRESESSPGQLSISLRYEGRVYHYRINTTADGKVYVTAESRFSTLAELVHHHSTVADGLVTTLHYPAPKCNKPTVYGVSPIHDKWEMERTDITMKHKLGGGQYGEVYVGVWKKYSLTVAVKTLKEDTMEVEEFLKEAAVMKEIKHPNLVQLLGVCTLEPPFYIVTEYMPYGNLLDYLRECNREEVTAVVLLYMATQISSAMEYLEKKNFIHRDLAARNCLVGENHVVKVADFGLSRLMTGDTYTAHAGAKFPIKWTAPESLAYNTFSIKSDVWAFGVLLWEIATYGMSPYPGIDLSQVYDLLEKGYRMEQPEGCPPKVYELMRACWKWSPADRPSFAETHQAFETMFHDSSISEEVAEELGRAASSSSVVPYLPRLPILPSKTRTLKKQVENKENIEGAQDATENSASSLAPGFIRGAQASSGSPALPRKQRDKSPSSLLEDAKETCFTRDRKGGFFSSFMKKRNAPTPPKRSSSFREMENQPHKKYELTGNFSSVASLQHADGFSFTPAQQEANLVPPKCYGGSFAQRNLCNDDGGGGGGSGTAGGGWSGITGFFTPRLIKKTLGLRAGKPTASDDTSKPFPRSNSTSSMSSGLPEQDRMAMTLPRNCQRSKLQLERTVSTSSQPEENVDRANDMLPKKSEESAAPSRERPKAKLLPRGATALPLRTPSGDLAITEKDPPGVGVAGVAAAPKGKEKNGGARLGMAGVPEDGEQPGWPSPAKAAPVLPTTHNHKVPVLISPTLKHTPADVQLIGTDSQGNKFKLLSEHQVTSSGDKDRPRRVKPKCAPPPPPVMRLLQHPSICSDPTEEPTALTAGQSTSETQEGGKKAALGAVPISGKAGRPVMPPPQVPLPTSSISPAKMANGTAGTKVALRKTKQAAEKISADKISKEALLECADLLSSALTEPVPNSQLVDTGHQLLDYCSGYVDCIPQTRNKFAFREAVSKLELSLQELQVSSAAAGVPGTNPVLNNLLSCVQEISDVVQR

SEQ ID NO: 5574 - protein, 573 aa, Homo sapiens [sequence omitted]

SEQ ID NO: 5575 - protein, 1927 aa, Homo sapiens [sequence omitted]

SEQ ID NO: 5576 - protein, 410 aa, Homo sapiens
MVCFRLFPVPGSGLVLVCLVLGAVRSYALELNLTDSENATCLYAKWQMNFTVRYETTNKTYKTVTISDHGTVTYNGSICGDDQNGPKIAVQFGPGFSWIANFTKAASTYSIDSVSFSYNTGDNTTFPDAEDKGILTVDELLAIRIPLNDLFRCNSLSTLEKNDVVQHYWDVLVQAFVQNGTVSTNEFLCDKDKTSTVAPTIHTTVPSPTTTPTPKEKPEAGTYSVNNGNDTCLLATMGLQLNITQDKVASVININPNTTHSTGSCRSHTALLRLNSSTIKYLDFVFAVKNENRFYLKEVNISMYLVNGSVFSIANNNLSYWDAPLGSSYMCNKEQTVSVSGAFQINTFDLRVQPFNVTQGKYSTAQDCSADDDNFLVPIAVGAALAGVLILVLLAYFIGLKHHHAGYEQF

SEQ ID NO: 5577 - protein, 410 aa, Homo sapiens
MVCFRLFPVPGSGLVLVCLVLGAVRSYALELNLTDSENATCLYAKWQMNFTVRYETTNKTYKTVTISDHGTVTYNGSICGDDQNGPKIAVQFGPGFSWIANFTKAASTYSIDSVSFSYNTGDNTTFPDAEDKGILTVDELLAIRIPLNDLFRCNSLSTLEKNDVVQHYWDVLVQAFVQNGTVSTNEFLCDKDKTSTVAPTIHTTVPSPTTTPTPKEKPEAGTYSVNNGNDTCLLATMGLQLNITQDKVASVININPNTTHSTGSCRSHTALLRLNSSTIKYLDFVFAVKNENRFYLKEVNISMYLVNGSVFSIANNNLSYWDAPLGSSYMCNKEQTVSVSGAFQINTFDLRVQPFNVTQGKYSTAQECSLDDDTILIPIIVGAGLSGLIIVIVIAYVIGRRKSYAGYQTL

SEQ ID NO: 5578 - protein, 1399 aa, Homo sapiens
MSQNIPLLATGLKSPSSGGPLVEDAAWKHWPESNTEAHVENITFYQNQEDFSTVSSKEGVMVQTSGKSHAASDAPENLTLLAETADARGRSGSSSRTNFTILPVGYSLEIATALTSQSGNLASESLHLPSSSSEFDERIAAFQTKSGTASEMGTERAMGLSEEWTVHSQEATTSAWSPSFLPALEMGELTTPSRKRNSSGPDLSWLHFYRTAASSPLLDLSSSSESTEKLNNSTGLQSSSVSQTKTMHVATVFTDGGPRTLRSLTVSLGPVSKTEGFPKDSRIATTSSSVLLSPSAVESRRNSRVTGNPGDEEFIEPSTENEFGLTSLRWQNDSPTFGEHQLASSSEVQNGSPMSQTETVSRSVAPMRGGEITAHWLLTNSTTSADVTGSSASYPEGVNASVLTQFSDSTVQSGGSHTALGDRSYSESSSTSSSESLNSSAPRGERSTLEDSREPGQALGDSSANAEDRTSGVPSLGTHTLATVTGNGERTLRSVTLTNTSMSTTSGEAGSPAAAMHQETEGASLHVNVTDDMGLVSRSLAASSALGVAGISYGQVRGTAIEQRTSSDHTDHTYLSSTFTKGERALLSITDNSSSSDIVESSTSYIKISNSSHSEYSSFFHAQTERSNISSYDGEYAQPSTESPVLHTSNLPSYTPTINMPNTSVVLDTDAEFVSDSSSSSSSSSSSSSSGPPLPLPSVSQSHHLFSSILPSTRASVHLLKSTSDASTPWSSSPSPLPVSLTTSTSAPLSVSQTTLPQSSSTPVLPRARETPVTSFQTSTMTSFMTMLHSSQTADLKSQSTPHQEKVITESKSPSLVSLPTESTKAVTTNSPLPPSLTESSTEQTLPATSTNLAQMSPTFTTTILKTSQPLMTTPGTLSSTASLVTGPIAVQTTAGKQLSLTHPEILVPQISTEGGISTERNRVIVDATTGLIPLTSVPTSAKEMTTKLGVTAEYSPASRSLGTSPSPQTTVVSTAEDLAPKSATFAVQSSTQSPTTVSSSASVNSCAVNPCLHNGECVADNTSRGYHCRCPPSWQGDDCSVDVNECLSNPCPSTAMCNNTQGSFICKCPVGYQLEKGICNLVRTFVTEFKLKRTFLNTTVEKHSDLQEVENEITKTLNMCFSALPSYIRSTVHASRESNAVVISLQTTFSLASNVTLFDLADRMQKCVNSCKSSAEVCQLLGSQRRIFRAGSLCKRKSPECDKDTSICTDLDGVALCQCKSGYFQFNKMDHSCRACEDGYRLENETCMSCPFGLGGLNCGNPYQLITVVIAAAGGGLLLILGIALIVTCCRKNKNDISKLIFKSGDFQMSPYAEYPKNPRSQEWGREAIEMHENGSTKNLLQMTDVYYSPTSVRNPELERNGLYPAYTGLPGSRHSCIFPGQYNPSFISDESRRRDYF

SEQ ID NO: 5579 - protein, 302 aa, Homo sapiens
MRLGSPGLLFLLFSSLRADTQEKEVRAMVGSDVELSCACPEGSRFDLNDVYVYWQTSESKTVVTYHIPQNSSLENVDSRYRNRALMSPAGMLRGDFSLRLFNVTPQDEQKFHCLVLSQSLGFQEVLSVEVTLHVAANFSVPVVSAPHSPSQDELTFTCTSINGYPRPNVYWINKTDNSLLDQALQNDTVFLNMRGLYDVVSVLRIARTPSVNIGCCIENVLLQQNLTVGSQTGNDIGERDKITENPVSTGEKNAATWSILAVLCLLVVVAVAIGWVCRDRCLQHSYAGAWAVSPETELTGHV

SEQ ID NO: 5580 - protein, 309 aa, Homo sapiens
MRLGSPGLLFLLFSSLRADTQEKEVRAMVGSDVELSCACPEGSRFDLNDVYVYWQTSESKTVVTYHIPQNSSLENVDSRYRNRALMSPAGMLRGDFSLRLFNVTPQDEQKFHCLVLSQSLGFQEVLSVEVTLHVAANFSVPVVSAPHSPSQDELTFTCTSINGYPRPNVYWINKTDNSLLDQALQNDTVFLNMRGLYDVVSVLRIARTPSVNIGCCIENVLLQQNLTVGSQTGNDIGERDKITENPVSTGEKNAATWSILAVLCLLVVVAVAIGWVCRDRCLQHSYAGAWAVSPETELTESWNLLLLLS

SEQ ID NO: 5581 - protein, 540 aa, Homo sapiens
MGTTARAALVLTYLAVASAASEGGFTATGQRQLRPEHFQEVGYAAPPSPPLSRSLPMDHPDSSQHGPPFEGQSQVQPPPSQEATPLQQEKLLPAQLPAEKEVGPPLPQEAVPLQKELPSLQHPNEQKEGTPAPFGDQSHPEPESWNAAQHCQQDRSQGGWGHRLDGFPPGRPSPDNLNQICLPNRQHVVYGPWNLPQSSYSHLTRQGETLNFLEIGYSRCCHCRSHTNRLECAKLVWEEAMSRFCEAEFSVKTRPHWCCTRQGEARFSCFQEEAPQPHYQLRACPSHQPDISSGLELPFPPGVPTLDNIKNICHLRRFRSVPRNLPATDPLQRELLALIQLEREFQRCCRQGNNHTCTWKAWEDTLDKYCDREYAVKTHHHLCCRHPPSPTRDECFARRAPYPNYDRDILTIDISRVTPNLMGHLCGNQRVLTKHKHIPGLIHNMTARCCDLPFPEQACCAEEEKLTFINDLCGPRRNIWRDPALCCYLSPGDEQVNCFNINYLRNVALVSGDTENAKGQGEQGSTGGTNISSTSEPKEE

SEQ ID NO: 5582 - protein, 415 aa, Homo sapiens
MGTTARAALVLTYLAVASAASEGGFTATGQRQLRPEHFQEVGYAAPPSPPLSRSLPMDHPDSSQHGPPFEGQSQVQPPPSQEATPLQQEKLLPAQLPAEKEVGPPLPQEAVPLQKELPSLQHPNEQKEGTPAPFGDQSHPEPESWNAAQHCQQDRSQGGWGHRLDGFPPGRPSPDNLNQICLPNRQHVVYGPWNLPQSSYSHLTRQGETLNFLEIGYSRCCHCRSHTNRLECAKLVWEDTLDKYCDREYAVKTHHHLCCRHPPSPTRDECFARRAPYPNYDRDILTIDISRVTPNLMGHLCGNQRVLTKHKHIPGLIHNMTARCCDLPFPEQACCAEEEKLTFINDLCGPRRNIWRDPALCCYLSPGDEQVNCFNINYLRNVALVSGDTENAKGQGEQGSTGGTNISSTSEPKEE

SEQ ID NO: 5583 - protein, 4548 aa, Homo sapiens
MEHKEVVLLLLLFLKSAAPEQSHVVQDCYHGDGQSYRGTYSTTVTGRTCQAWSSMTPHQHNRTTENYPNAGLIMNYCRNPDAVAAPYCYTRDPGVRWEYCNLTQCSDAEGTAVAPPTVTPVPSLEAPSEQAPTEQRPGVQECYHGNGQSYRGTYSTTVTGRTCQAWSSMTPHSHSRTPEYYPNAGLIMNYCRNPDAVAAPYCYTRDPGVRWEYCNLTQCSDAEGTAVAPPTVTPVPSLEAPSEQAPTEQRPGVQECYHGNGQSYRGTYSTTVTGRTCQAWSSMTPHSHSRTPEYYPNAGLIMNYCRNPDAVAAPYCYTRDPGVRWEYCNLTQCSDAEGTAVAPPTVTPVPSLEAPSEQAPTEQRPGVQECYHGNGQSYRGTYSTTVTGRTCQAWSSMTPHSHSRTPEYYPNAGLIMNYCRNPDAVAAPYCYTRDPGVRWEYCNLTQCSDAEGTAVAPPTVTPVPSLEAPSEQAPTEQRPGVQECYHGNGQSYRGTYSTTVTGRTCQAWSSMTPHSHSRTPEYYPNAGLIMNYCRNPDAVAAPYCYTRDPGVRWEYCNLTQCSDAEGTAVAPPTVTPVPSLEAPSEQAPTEQRPGVQECYHGNGQSYRGTYSTTVTGRTCQAWSSMTPHSHSRTPEYYPNAGLIMNYCRNPDAVAAPYCYTRDPGVRWEYCNLTQCSDAEGTAVAPPTVTPVPSLEAPSEQAPTEQRPGVQECYHGNGQSYRGTYSTTVTGRTCQAWSSMTPHSHSRTPEYYPNAGLIMNYCRNPDAVAAPYCYTRDPGVRWEYCNLTQCSDAEGTAVAPPTVTPVPSLEAPSEQAPTEQRPGVQECYHGNGQSYRGTYSTTVTGRTCQAWSSMTPHSHSRTPEYYPNAGLIMNYCRNPDAVAAPYCYTRDPGVRWEYCNLTQCSDAEGTAVAPPTVTPVPSLEAPSEQAPTEQRPGVQECYHGNGQSYRGTYSTTVTGRTCQAWSSMTPHSHSRTPEYYPNAGLIMNYCRNPDAVAAPYCYTRDPGVRWEYCNLTQCSDAEGTAVAPPTVTPVPSLEAPSEQAPTEQRPGVQECYHGNGQSYRGTYSTTVTGRTCQAWSSMTPHSHSRTPEYYPNAGLIMNYCRNPDAVAAPYCYTRDPGVRWEYCNLTQCSDAEGTAVAPPTVTPVPSLEAPSEQAPTEQRPGVQECYHGNGQSYRGTYSTTVTGRTCQAWSSMTPHSHSRTPEYYPNAGLIMNYCRNPDAVAAPYCYTRDPGVRWEYCNLTQCSDAEGTAVAPPTVTPVPSLEAPSEQAPTEQRPGVQECYHGNGQSYRGTYSTTVTGRTCQAWSSMTPHSHSRTPEYYPNAGLIMNYCRNPDAVAAPYCYTRDPGVRWEYCNLTQCSDAEGTAVAPPTVTPVPSLEAPSEQAPTEQRPGVQECYHGNGQSYRGTYSTTVTGRTCQAWSSMTPHSHSRTPEYYPNAGLIMNYCRNPDAVAAPYCYTRDPGVRWEYCNLTQCSDAEGTAVAPPTVTPVPSLEAPSEQAPTEQRPGVQECYHGNGQSYRGTYSTTVTGRTCQAWSSMTPHSHSRTPEYYPNAGLIMNYCRNPDAVAAPYCYTRDPGVRWEYCNLTQCSDAEGTAVAPPTVTPVPSLEAPSEQAPTEQRPGVQECYHGNGQSYRGTYSTTVTGRTCQAWSSMTPHSHSRTPEYYPNAGLIMNYCRNPDAVAAPYCYTRDPGVRWEYCNLTQCSDAEGTAVAPPTVTPVPSLEAPSEQAPTEQRPGVQECYHGNGQSYRGTYSTTVTGRTCQAWSSMTPHSHSRTPEYYPNAGLIMNYCRNPDAVAAPYCYTRDPGVRWEYCNLTQCSDAEGTAVAPPTVTPVPSLEAPSEQAPTEQRPGVQECYHGNGQSYRGTYSTTVTGRTCQAWSSMTPHSHSRTPEYYPNAGLIMNYCRNPDAVAAPYCYTRDPGVRWEYCNLTQCSDAEGTAVAPPTVTPVPSLEAPSEQAPTEQRPGVQECYHGNGQSYRGTYSTTVTGRTCQAWSSMTPHSHSRTPEYYPNAGLIMNYCRNPDAVAAPYCYTRDPGVRWEYCNLTQCSDAEGTAVAPPTVTPVPSLEAPSEQAPTEQRPGVQECYHGNGQSYRGTYSTTVTGRTCQAWSSMTPHSHSRTPEYYPNAGLIMNYCRNPDAVAAPYCYTRDPGVRWEYCNLTQCSDAEGTAVAPPTVTPVPSLEAPSEQAPTEQRPGVQECYHGNGQSYRGTYSTTVTGRTCQAWSSMTPHSHSRTPEYYPNAGLIMNYCRNPDAVAAPYCYTRDPGVRWEYCNLTQCSDAEGTAVAPPTVTPVPSLEAPSEQAPTEQRPGVQECYHGNGQSYRGTYSTTVTGRTCQAWSSMTPHSHSRTPEYYPNAGLIMNYCRNPDAVAAPYCYTRDPGVRWEYCNLTQCSDAEGTAVAPPTVTPVPSLEAPSEQAPTEQRPGVQECYHGNGQSYRGTYSTTVTGRTCQAWSSMTPHSHSRTPEYYPNAGLIMNYCRNPDAVAAPYCYTRDPGVRWEYCNLTQCSDAEGTAVAPPTVTPVPSLEAPSEQAPTEQRPGVQECYHGNGQSYRGTYSTTVTGRTCQAWSSMTPHSHSRTPEYYPNAGLIMNYCRNPDAVAAPYCYTRDPGVRWEYCNLTQCSDAEGTAVAPPTVTPVPSLEAPSEQAPTEQRPGVQECYHGNGQSYRGTYSTTVTGRTCQAWSSMTPHSHSRTPEYYPNAGLIMNYCRNPDAVAAPYCYTRDPGVRWEYCNLTQCSDAEGTAVAPPTVTPVPSLEAPSEQAPTEQRPGVQECYHGNGQSYRGTYSTTVTGRTCQAWSSMTPHSHSRTPEYYPNAGLIMNYCRNPDAVAAPYCYTRDPGVRWEYCNLTQCSDAEGTAVAPPTVTPVPSLEAPSEQAPTEQRPGVQECYHGNGQSYRGTYSTTVTGRTCQAWSSMTPHSHSRTPEYYPNAGLIMNYCRNPDAVAAPYCYTRDPGVRWEYCNLTQCSDAEGTAVAPPTVTPVPSLEAPSEQAPTEQRPGVQECYHGNGQSYRGTYSTTVTGRTCQAWSSMTPHSHSRTPEYYPNAGLIMNYCRNPDAVAAPYCYTRDPGVRWEYCNLTQCSDAEGTAVAPPTVTPVPSLEAPSEQAPTEQRPGVQECYHGNGQSYRGTYSTTVTGRTCQAWSSMTPHSHSRTPEYYPNAGLIMNYCRNPDAVAAPYCYTRDPGVRWEYCNLTQCSDAEGTAVAPPTVTPVPSLEAPSEQAPTEQRPGVQECYHGNGQSYRGTYSTTVTGRTCQAWSSMTPHSHSRTPEYYPNAGLIMNYCRNPDAVAAPYCYTRDPGVRWEYCNLTQCSDAEGTAVAPPTVTPVPSLEAPSEQAPTEQRPGVQECYHGNGQSYRGTYSTTVTGRTCQAWSSMTPHSHSRTPEYYPNAGLIMNYCRNPDPVAAPYCYTRDPSVRWEYCNLTQCSDAEGTAVAPPTITPIPSLEAPSEQAPTEQRPGVQECYHGNGQSYQGTYFITVTGRTCQAWSSMTPHSHSRTPAYYPNAGLIKNYCRNPDPVAAPWCYTTDPSVRWEYCNLTRCSDAEWTAFVPPNVILAPSLEAFFEQALTEETPGVQDCYYHYGQSYRGTYSTTVTGRTCQAWSSMTPHQHSRTPENYPNAGLTRNYCRNPDAEIRPWCYTMDPSVRWEYCNLTQCLVTESSVLATLTVVPDPSTEASSEEAPTEQSPGVQDCYHGDGQSYRGSFSTTVTGRTCQSWSSMTPHWHQRTTEYYPNGGLTRNYCRNPDAEISPWCYTMDPNVRWEYCNLTQCPVTESSVLATSTAVSEQAPTEQSPTVQDCYHGDGQSYRGSFSTTVTGRTCQSWSSMTPHWHQRTTEYYPNGGLTRNYCRNPDAEIRPWCYTMDPSVRWEYCNLTQCPVMESTLLTTPTVVPVPSTELPSEEAPTENSTGVQDCYRGDGQSYRGTLSTTITGRTCQSWSSMTPHWHRRIPLYYPNAGLTRNYCRNPDAEIRPWCYTMDPSVRWEYCNLTRCPVTESSVLTTPTVAPVPSTEAPSEQAPPEKSPVVQDCYHGDGRSYRGISSTTVTGRTCQSWSSMIPHWHQRTPENYPNAGLTENYCRNPDSGKQPWCYTTDPCVRWEYCNLTQCSETESGVLETPTVVPVPSMEAHSEAAPTEQTPVVRQCYHGNGQSYRGTFSTTVTGRTCQSWSSMTPHRHQRTPENYPNDGLTMNYCRNPDADTGPWCFTMDPSIRWEYCNLTRCSDTEGTVVAPPTVIQVPSLGPPSEQDCMFGNGKGYRGKKATTVTGTPCQEWAAQEPHRHSTFIPGTNKWAGLEKNYCRNPDGDINGPWCYTMNPRKLFDYCDIPLCASSSFDCGKPQVEPKKCPGSIVGGCVAHPHSWPWQVSLRTRFGKHFCGGTLISPEWVLTAAHCLKKSSRPSSYKVILGAHQEVNLESHVQEIEVSRLFLEPTQADIALLKLSRPAVITDKVMPACLPSPDYMVTARTECYITGWGETQGTFGTGLLKEAQLLVIENEVCNHYKYICAEHLARGTDSCQGDSGGPLVCFEKDKYILQGVTSWGLGCARPNKPGVYARVSRFVTWIEGMMRNN

SEQ ID NO: 5584 - protein, 93 aa, Homo sapiens
GLTRNYCRNPDAEIRPWCYTMDPSVRWEYCNLTRCPVTESTPPEKSPVVQDCYHGDGRSYRGISSTTVTGRTCQSWSSMIPHWHQRTPENYPN

SEQ ID NO: 5585 - protein, 89 aa, Homo sapiens
ISSGLIKNYCRNPDPVAAPWCYTTDPSVRWEYCNLTRCSDAEWTAFDCYYHYGQSYRGTYSTTVTGRTCQAWSSMTPHQHSRTPENYPN

SEQ ID NO: 5586 - protein, 398 aa, Homo sapiens
VQECYHGNGQSYRGTYSTTVTGRTCQAWSSMTPHSHSRTPEYYPNAGLTENYCRNPDSGKQPWCYTTDPCVRWEYCNLTQCSETESAPTEQTPVVRQCYHGNGQSYRGTFSTTVTGRTCQSWSSMTPHRHQRTPENYPNDGLTMNYCRNPDADTGPWCFTMDPSIRWEYCNLTRCSDTEGTVVAPPTVIQVPSLGPPSEQGPSVQECYHSNGQSYRGTYFTTVTGRTCQAWSSMTPHQHSRTPEKYPNDGLISNYCRNPDCSAGPWCYTTDPKVRWEYCNLTGCSDKNRAVAAPLTIIPVPRREDTSKQAPTEQTPVVRQCYHGNGQSYQGTFSTTVTGRTCQSWSSMTPHRHQRTPENYPNDGLTMNYCRNPDADTGPWCFTTDPSVRWEYCNLTRC

SEQ ID NO: 5587 - protein, 113 aa, Homo sapiens
PTEQSPTVQDCYHGDGQSYRGSFSTTVTGRTCQSWSSMTPHWHQRTTEYYPNGGLTRNYCRNPDAEIRPWCYTMDPSVRWEYCNLTRCPVTESSVLTTPTVAPVPSTEAPSEQ

SEQ ID NO: 5588 - protein, 132 aa, Homo sapiens
MEHKEVVLLLLLFLKSAPTETGPSVQECYHSNGQSYRGTYFTTVTGRTCQAWSSMTPHQHSRTPEKYPNDGLISNYCRNPDCSAGPWCYTTDPNVRWEYCNLTRCSDDEGTVFVPLTVIPVPSLEDSFIQVA

SEQ ID NO: 5589 - protein, 560 aa, Homo sapiens
MLRGTLLCAVLGLLRAQPFPCPPACKCVFRDAAQCSGGDVARISALGLPTNLTHILLFGMGRGVLQSQSFSGMTVLQRLMISDSHISAVAPGTFSDLIKLKTLRLSRNKITHLPGALLDKMVLLEQLFLDHNALRGIDQNMFQKLVNLQELALNQNQLDFLPASLFTNLENLKLLDLSGNNLTHLPKGLLGAQAKLERLLLHSNRLVSLDSGLLNSLGALTELQFHRNHIRSIAPGAFDRLPNLSSLTLSRNHLAFLPSALFLHSHNLTLLTLFENPLAELPGVLFGEMGGLQELWLNRTQLRTLPAAAFRNLSRLRYLGVTLSPRLSALPQGAFQGLGELQVLALHSNGLTALPDGLLRGLGKLRQVSLRRNRLRALPRALFRNLSSLESVQLDHNQLETLPGDVFGALPRLTEVLLGHNSWRCDCGLGPFLGWLRQHLGLVGGEEPPRCAGPGAHAGLPLWALPGGDAECPGPRGPPPRPAADSSSEAPVHPALAPNSSEPWVWAQPVTTGKGQDHSPFWGFYFLLLAVQAMITVIIVFAMIKIGQLFRKLIRERALG

SEQ ID NO: 5590 - protein, 444 aa, Homo sapiens
MKVVPSLLLSVLLAQVWLVPGLAPSPQSPETPAPQNQTSRVVQAPKEEEEDEQEASEEKASEEEKAWLMASRQQLAKETSNFGFSLLRKISMRHDGNMVFSPFGMSLAMTGLMLGATGPTETQIKRGLHLQALKPTKPGLLPSLFKGLRETLSRNLELGLTQGSFAFIHKDFDVKETFFNLSKRYFDTECVPMNFRNASQAKRLMNHYINKETRGKIPKLFDEINPETKLILVDYILFKGKWLTPFDPVFTEVDTFHLDKYKTIKVPMMYGAGKFASTFDKNFRCHVLKLPYQGNATMLVVLMEKMGDHLALEDYLTTDLVETWLRNMKTRNMEVFFPKFKLDQKYEMHELLRQMGIRRIFSPFADLSELSATGRNLQVSRVLQRTVIEVDERGTEAVAGILSEITAYSMPPVIKVDRPFHFMIYEETSGMLLFLGRVVNPTLL

SEQ ID NO: 5591 - protein, 513 aa, Homo sapiens
MTTQLPAYVAILLFYVSRASCQDTFIAAVYEHAAILPNATLTPVSREEALALMNRNLDILEGAITSAADQGAHIIVTPEDAIYGWNFNRDSLYPYLEDIPDPEVNWIPCNNRNRFGQTPVQERLSCLAKNNSIYVVANIGDKKPCDTSDPQCPPDGRYQYNTDVVFDSQGKLVARYHKQNLFMGENQFNVPKEPEIVTFNTTFGSFGIFTCFDILFHDPAVTLVKDFHVDTIVFPTAWMNVLPHLSAVEFHSAWAMGMRVNFLASNIHYPSKKMTGSGIYAPNSSRAFHYDMKTEEGKLLLSQLDSHPSHSAVVNWTSYASSIEALSSGNKEFKGTVFFDEFTFVKLTGVAGNYTVCQKDLCCHLSYKMSENIPNEVYALGAFDGLHTVEGRYYLQICTLLKCKTTNLNTCGDSAETASTRFEMFSLSGTFGTQYVFPEVLLSENQLAPGEFQVSTDGRLFSLKPTSGPVLTVTLFGRLYEKDWASNASSGLTAQARIIMLIVIAPIVCSLSW

SEQ ID NO: 5592 - protein, 331 aa, Homo sapiens
MLLLINVILTLWVSCANGQEVKPCDFPEIQHGGLYYKSLRRLYFPAAAGQSYSYYCDQNFVTPSGSYWDYIHCTQDGWLPTVPCLRTCSKSDIEIENGFISESSSIYILNKEIQYKCKPGYATADGNSSGSITCLQNGWSAQPICIKFCDMPVFENSRAKSNGMRFKLHDTLDYECYDGYEISYGNTTGSIVCGEDGWSHFPTCYNSSEKCGPPPPISNGDTTSFLLKVYVPQSRVEYQCQSYYELQGSNYVTCSNGEWSEPPRCIHPCIITEENMNKNNIQLKGKSDIKYYAKTGDTIEFMCKLGYNANTSVLSFQAVCREGIVEYPRCE

SEQ ID NO: 5593 - protein, 1997 aa, Homo sapiens
MALLIHLKTVSELRGRGDRIAKVTFRGQSFYSRVLENCEDVADFDETFRWPVASSIDRNEMLEIQVFNYSKVFSNKLIGTFRMVLQKVVEESHVEVTDTLIDDNNAIIKTSLCVEVRYQATDGTVGSWDDGDFLGDESLQEEEKDSQETDGLLPGSRPSSRPPGEKSFRRAGRSVFSAMKLGKNRSHKEEPQRPDEPAVLEMEDLDHLAIRLGDGLDPDSVSLASVTALTTNVSNKRSKPDIKMEPSAGRPMDYQVSITVIEARQLVGLNMDPVVCVEVGDDKKYTSMKESTNCPYYNEYFVFDFHVSPDVMFDKIIKISVIHSKNLLRSGTLVGSFKMDVGTVYSQPEHQFHHKWAILSDPDDISSGLKGYVKCDVAVVGKGDNIKTPHKANETDEDDIEGNLLLPEGVPPERQWARFYVKIYRAEGLPRMNTSLMANVKKAFIGENKDLVDPYVQVFFAGQKGKTSVQKSSYEPLWNEQVVFTDLFPPLCKRMKVQIRDSDKVNDVAIGTHFIDLRKISNDGDKGFLPTLGPAWVNMYGSTRNYTLLDEHQDLNEGLGEGVSFRARLLLGLAVEIVDTSNPELTSSTEVQVEQATPISESCAGKMEEFFLFGAFLEASMIDRRNGDKPITFEVTIGNYGNEVDGLSRPQRPRPRKEPGDEEEVDLIQNASDDEAGDAGDLASVSSTPPMRPQVTDRNYFHLPYLERKPCIYIKSWWPDQRRRLYNANIMDHIADKLEEGLNDIQEMIKTEKSYPERRLRGVLEELSCGCCRFLSLADKDQGHSSRTRLDRERLKSCMRELENMGQQARMLRAQVKRHTVRDKLRLCQNFLQKLRFLADEPQHSIPDIFIWMMSNNKRVAYARVPSKDLLFSIVEEETGKDCAKVKTLFLKLPGKRGFGSAGWTVQAKVELYLWLGLSKQRKEFLCGLPCGFQEVKAAQGLGLHAFPPVSLVYTKKQAFQLRAHMYQARSLFAADSSGLSDPFARVFFINQSQCTEVLNETLCPTWDQMLVFDNLELYGEAHELRDDPPIIVIEIYDQDSMGKADFMGRTFAKPLVKMADEAYCPPRFPPQLEYYQIYRGNATAGDPLAAFELLQIGPAGKADLPPINGPVDVDRGPIMPVPMGIRPVLSKYRVEVLFWGLRDLKRVNLAQVDRPRVDIECAGKGVQSSLIHNYKKNPNFNTLVKWFEVDLPENELLHPPLNIRVVDCRAFGRYTLVGSHAVSSLRRFIYRPPDRSAPSWNTTVRLLRRCRVLCNGGSSSHSTGEVVVTMEPEVPIKKLETMVKLDATSEAVVKVDVAEEEKEKKKKKKGTAEEPEEEEPDESMLDWWSKYFASIDTMKEQLRQQEPSGIDLEEKEEVDNTEGLKGSMKGKEKARAAKEEKKKKTQSSGSGQGSEAPEKKKPKIDELKVYPKELESEFDNFEDWLHTFNLLRGKTGDDEDGSTEEERIVGRFKGSLCVYKVPLPEDVSREAGYDSTYGMFQGIPSNDPINVLVRVYVVRATDLHPADINGKADPYIAIRLGKTDIRDKENYISKQLNPVFGKSFDIEASFPMESMLTVAVYDWDLVGTDDLIGETKIDLENRFYSKHRATCGIAQTYSTHGYNIWRDPMKPSQILTRLCKDGKVDGPHFGPPGRVKVANRVFTGPSEIEDENGQRKPTDEHVALLALRHWEDIPRAGCRLVPEHVETRPLLNPDKPGIEQGRLELWVDMFPMDMPAPGTPLDISPRKPKKYELRVIIWNTDEVVLEDDDFFTGEKSSDIFVRGWLKGQQEDKQDTDVHYHSLTGEGNFNWRYLFPFDYLAAEEKIVISKKESMFSWDETEYKIPARLTLQIWDADHFSADDFLGAIELDLNRFPRGAKTAKQCTMEMATGEVDVPLVSIFKQKRVKGWWPLLARNENDEFELTGKVEAELHLLTAEEAEKNPVGLARNEPDPLEKPNRPDTSFIWFLNPLKSARYFLWHTYRWLLLKLLLLLLLLLLLALFLYSVPGYLVKKILGA

SEQ ID NO: 5594 - protein, 673 aa, Homo sapiens
MCSRVPLLLPLLLLLALGPGVQGCPSGCQCSQPQTVFCTARQGTTVPRDVPPDTVGLYVFENGITMLDAGSFAGLPGLQLLDLSQNQIASLPSGVFQPLANLSNLDLTANRLHEITNETFRGLRRLERLYLGKNRIRHIQPGAFDTLDRLLELKLQDNELRALPPLRLPRLLLLDLSHNSLLALEPGILDTANVEALRLAGLGLQQLDEGLFSRLRNLHDLDVSDNQLERVPPVIRGLRGLTRLRLAGNTRIAQLRPEDLAGLAALQELDVSNLSLQALPGDLSGLFPRLRLLAAARNPFNCVCPLSWFGPWVRESHVTLASPEETRCHFPPKNAGRLLLELDYADFGCPATTTTATVPTTRPVVREPTALSSSLAPTWLSPTAPATEAPSPPSTAPPTVGPVPQPQDCPPSTCLNGGTCHLGTRHHLACLCPEGFTGLYCESQMGQGTRPSPTPVTPRPPRSLTLGIEPVSPTSLRVGLQRYLQGSSVQLRSLRLTYRNLSGPDKRLVTLRLPASLAEYTVTQLRPNATYSVCVMPLGPGRVPEGEEACGEAHTPPAVHSNHAPVTQAREGNLPLLIAPALAAVLLAALAAVGAAYCVRRGRAMAAAAQDKGQVGPGAGPLELEGVKVPLEPGPKATEGGGEALPSGSECEVPLMGFPGPGLQSPLHAKPYI

SEQ ID NO: 5595 - protein, 728 aa, Homo sapiens
MRWLLLYYALCFSLSKASAHTVELNNMFGQIQSPGYPDSYPSDSEVTWNITVPDGFRIKLYFMHFNLESSYLCEYDYVKVETEDQVLATFCGRETTDTEQTPGQEVVLSPGSFMSITFRSDFSNEERFTGFDAHYMAVDVDECKEREDEELSCDHYCHNYIGGYYCSCRFGYILHTDNRTCRVECSDNLFTQRTGVITSPDFPNPYPKSSECLYTIELEEGFMVNLQFEDIFDIEDHPEVPCPYDYIKIKVGPKVLGPFCGEKAPEPISTQSHSVLILFHSDNSGENRGWRLSYRAAGNECPELQPPVHGKIEPSQAKYFFKDQVLVSCDTGYKVLKDNVEMDTFQIECLKDGTWSNKIPTCKIVDCRAPGELEHGLITFSTRNNLTTYKSEIKYSCQEPYYKMLNNNTGIYTCSAQGVWMNKVLGRSLPTCLPECGQPSRSLPSLVKRIIGGRNAEPGLFPWQALIVVEDTSRVPNDKWFGSGALLSASWILTAAHVLRSQRRDTTVIPVSKEHVTVYLGLHDVRDKSGAVNSSAARVVLHPDFNIQNYNHDIALVQLQEPVPLGPHVMPVCLPRLEPEGPAPHMLGLVAGWGISNPNVTVDEIISSGTRTLSDVLQYVKLPVVPHAECKTSYESRSGNYSVTENMFCAGYYEGGKDTCLGDSGGAFVIFDDLSQRWVVQGLVSWGGPEECGSKQVYGVYTKVSNYVDWVWEQMGLPQSVVEPQVER

SEQ ID NO: 5596 - protein, 809 aa, Homo sapiens
SQPHRIKEGREGADLFGRKTDFVVRFLGVQEQVKGEREERGKARGREGERGSVAGRGRRDLNGECQPIPETHRDLRTKIRHHGHHTGHELTGKSSWEDQGRAAGSTQGRKMRWLLLYYALCFSLSKASAHTVELNNMFGQIQSPGYPDSYPSDSEVTWNITVPDGFRIKLYFMHFNLESSYLCEYDYVKVETEDQVLATFCGRETTDTEQTPGQEVVLSPGSFMSITFRSDFSNEERFTGFDAHYMAVDVDECKEREDEELSCDHYCHNYIGGYYCSCRFGYILHTDNRTCRVECSDNLFTQRTGVITSPDFPNPYPKSSECLYTIELEEGFMVNLQFEDIFDIEDHPEVPCPYDYIKIKVGPKVLGPFCGEKAPEPISTQSHSVLILFHSDNSGENRGWRLSYRAAGNECPELQPPVHGKIEPSQAKYFFKDQVLVSCDTGYKVLKDNVEMDTFQIECLKDGTWSNKIPTCKIVDCRAPGELEHGLITFSTRNNLTTYKSEIKYSCQEPYYKMLNNNTGIYTCSAQGVWMNKVLGRSLPTCLPVCGLPKFSRKLMARIFNGRPAQKGTTPWIAMLSHLNGQPFCGGSLLGSSWIVTAAHCLHQSLDPEDPTLRDSDLLSPSDFKIILGKHWRLRSDENEQHLGVKHTTLHPQYDPNTFENDVALVELLESPVLNAFVMPICLPEGPQQEGAMVIVSGWGKQFLQRFPETLMEIEIPIVDHSTCQKAYAPLKKKVTRDMICAGEKEGGKDACAGDSGGPMVTLNRERGQWYLVGTVSWGDDCGKKDRYGVYSYIHHNKDWIQRVTGVRN

SEQ ID NO: 5597 - protein, 465 aa, Homo sapiens
MKPTGTDPRILSIAAEVAKSPEQNVPVILLKLKEIINITPLGSSELKKIKQDIYCYDLIQYCLLVLSQDYSRIQGGWTTISQLTQILSHCCVGLEPGEDAEEFYNELLPSAAENFLVLGRQLQTCFINAAKAEEKDELLHFFQIVTDSLFWLLGGHVELIQNVLQSDHFLHLLQADNVQIGSAVMMMLQNILQINRSKRSKMLLEINRQKEEEDLKLQLQLQRQRAMRLSRELQLSMLEIVHPGQVEKHYREMEEKSALIIQKHWRGYRERKNFHQQRQSLIEYKAAVTLQRAALKFLAKYRKKKKLFAPWRGLQELTDARRVELKKRVDDYVRRHLGSPMSDVVSRELHAQAQERLQHYFMGRALEERAQQHREALIAQISTNVEQLMKAPSLKEAEGKEPELFLSRSRPVAAKAKQAHLTTLKHIQAPWWKKLGEESGDEIDVPKDELSIELENLFIGGTKPP

SEQ ID NO: 5598 - protein, 5703 aa, Homo sapiens
MGAPSACRTLVLALAAMLVVPQAETQGPVEPSWGNAGHTMDGGAPTSSPTRRVSFVPPVTVFPSLSPLNPAHNGRVCSTWGDFHYKTFDGDVFRFPGLCNYVFSEHCRAAYEDFNVQLRRGLVGSRPVVTRVVIKAQGLVLEASNGSVLINGQREELPYSRTGLLVEQSGDYIKVSIRLVLTFLWNGEDSALLELDPKYANQTCGLCGDFNGLPAFNEFYAHNARLTPLQFGNLQKLDGPTEQCPDPLPLPAGNCTDEEGICHRTLLGPAFAECHALVDSTAYLAACAQDLCRCPTCPCATFVEYSRQCAHAGGQPRNWRCPELCPRTCPLNMQHQECGSPCTDTCSNPQRAQLCEDHCVDGCFCPPGSTVLDDITHSGCLPLGQCPCTHGGRTYSPGTSFNTTCSSCTCSGGLWQCQDLPCPGTCSVQGGAHISTYDEKLYDLHGDCSYVLSKKCADSSFTVLAELRKCGLTDNENCLKAVTLSLDGGDTAIRVQADGGVFLNSIYTQLPLSAANITLFTPSSFFIVVQTGLGLQLLVQLVPLMQVFVRLDPAHQGQMCGLCGNFNQNQADDFTALSGVVEATGAAFANTWKAQAACANARNSFEDPCSLSVENENYARHWCSRLTDPNSAFSRCHSIINPKPFHSNCMFDTCNCERSEDCLCAALSSYVHACAAKGVQLSDWRDGVCTKYMQNCPKSQRYAYVVDACQPTCRGLSEADVTCSVSFVPVDGCTCPAGTFLNDAGACVPAQECPCYAHGTVLAPGEVVHDEGAVCSCTGGKLSCLGASLQKSTGCAAPMVYLDCSNSSAGTPGAECLRSCHTLDVGCFSTHCVSGCVCPPGLVSDGSGGCIAEEDCPCVHNEATYKPGETIRVDCNTCTCRNRRWECSHRLCLGTCVAYGDGHFITFDGDRYSFEGSCEYILAQDYCGDNTTHGTFRIVTENIPCGTTGTTCSKAIKLFVESYELILQEGTFKAVARGPGGDPPYKIRYMGIFLVIETHGMAVSWDRKTSVFIRLHQDYKGRVCGLCGNFDDNAINDFATRSRSVVGDALEFGNSWKLSPSCPDALAPKDPCTANPFRKSWAQKQCSILHGPTFAACRSQVDSTKYYEACVNDACACDSGGDCECFCTAVAAYAQACHDAGLCVSWRTPDTCPLFCDFYNPHGGCEWHYQPCGAPCLKTCRNPSGHCLVDLPGLEGCYPKCPPSQPFFNEDQMKCVAQCGCYDKDGNYYDVGARVPTAENCQSCNCTPSGIQCAHSLEACTCTYEDRTYSYQDVIYNTTDGLGACLIAICGSNGTIIRKAVACPGTPATTPFTFTTAWVPHSTTSPALPVSTVCVREVCRWSSWYNGHRPEPGLGGGDFETFENLRQRGYQVCPVLADIECRAAQLPDMPLEELGQQVDCDRMRGLMCANSQQSPPLCHDYELRVLCCEYVPCGPSPAPGTSPQPSLSASTEPAVPTPTQTTATEKTTLWVTPSIRSTAALTSQTGSSSGPVTVTPSAPGTTTCQPRCQWTEWFDEDYPKSEQLGGDVESYDKIRAAGGHLCQQPKDIECQAESFPNWTLAQVGQKVHCDVHFGLVCRNWEQEGVFKMCYNYRIRVLCCSDDHCRGRATTPPPTTELETATTTTTQALFSTPQPTSSPGLTRAPPASTTAVPTLSEGLTSPRYTSTLGTATTGGPRQSAGSTEPTVPGVATSTLPTRSALPGTTGSLGTWRPSQPPTLAPTTMATSRARPTGTASTASKEPLTTSLAPTLTSELSTSQAETSTPRTETTMSPLTNTTTSQGTTRCQPKCEWTEWFDVDFPTSGVASGDMETFENIRAAGGKMCWAPKSIECRAENYPEVSIDQVGQVLTCSLETGLTCKNEDQTGRFNMCFNYNVRVLCCDDYSHCPSTLATSSTATPSSTPGTTWILTKPTTTATTTASTGSTATASSTQATAGTPHVSTTATTPTVTSSKATPFSSPGTATALPALRSTATTPTATSFTAIPSSSLGTTWTRLSQTTTPMATMSTATPSSTPETVHTSTVLTTTATTTGATGSVATPSSTPGTAHTTKVLTTTTTGFTATPSSSPGRARTLPVWISTTTTPTTRGSTVTPSSIPGTTHTPTVLTTTTTTVATGSMATPSSSTQTSGTPPSLTTTATTITATGSTTNPSSTPGTTPIPPVLTTTATTPAATSSTVTPSSALGTTHTPPVPNTTATTHGRSLSPSSPHTVCTAWTSATSGILGTTHITEPSTGTSHTPAATTGTTQHSTPALSSPHPSSRTTESPPSPGTTTPGHTTATSRTTATATPSKTRTSTLLPSQPTSAPITTVVTMGCEPQCAWSEWLDYSYPMPGPSGGDFDTYSNIRAAGGAVCEQPLGLECRAQAQPGVPLRELGQVVECSLDFGLVCRNREQVGKFKMCFNYEIRVFCCNYGHCPSTPATSSTATPSSTPGTTWILTELTTTATTTESTGSTATPTSTLRTAPPPKVLTTTATTPTVTSSKATPSSSPGTATALPALRSTATTPTATSVTPIPSSSLGTTWTRLSQTTTPTATMSTATPSSTPETAHTSTVLTATATTTGATGSVATPSSTPGTAHTTKVPTTTTTGFTATPSSSPGTALTPPVWISTTTTPTTRGSTVTPSSIPGTTHTATVLTTTTTTVATGSMATPSSSTQTSGTPPSLTTTATTITATGSTTNPSSTPGTRPIPPVLTTTATTPAATSSTVTPSSALGTTHTPPVPNTTATTHGRSLSPSSPHTVRTAWTSATSGTLGTTHITEPSTGTSHTPAATTGTTQHSTPALSSPHPSSRTTESPPSPGTTTPGHTTATSRTTATATPSKTRTSTLLPSSPTSAPITTVVTMGCEPQCAWSEWLDYSYPMPGPSGGDFDTYSNIRAAGGAVCEQPLGLECRAQAQPGVPLRELGQVVECSLDFGLVCRNREQVGKFKMCFNYEIRVFCCNYGHCPSTPATSSTATPSSTPGTTWILTEQTTAATTTATTGSTAIPSSTPGTAPPPKVLTSQATTPTATSSKATSSSSPRTATTLPVLTSTATKSTATSFTPIPSSTLGTTGTSQNRPPHPMATMSTIHPSSTPETTHTSTVLTTKATTTRATSSMSTPSSTPGTTWILTELTTAATTTAALPHGTPSSTPGTTWILTEPSTTATVTVPTGSTATASSTRATAGTLKVLTSTATTPTVISSRATPSSSPGTATALPALRSTATTPTATSVTAIPSSSLGTAWTRLSQTTTPTATMSTATPSSTPETVHTSTVLTTTATTTRTGSVATPSSTPGTAHTTKVPTTTTTGFTATPSSSPGTALTPPVWISTTTTPTTRGSTVTPSSIPGTTHTATVLTTTTTTVATGSMATPSSSTQTSGTPPSLTTTATTITATGSTTNPSSTPGTTPIPPVLTTTATTPAATSSTVTPSSALGTTHTPPVPNTTATTHGRSLPPSSPHTVPTAWTSATSGILGTTHITEPSTGTSHTPAATTGTTQPSTPALSSPHPSSRTTESPPSPGTTTPGHTRGTSRTTATATPSKTRTSTLLPSSPTSAPITTVVTTGCEPQCAWSEWLDYSYPMPGPSGGDFDTYSNIRAAGGAVCEQPLGLECRAQAQPGVPLRELGQVVECSLDFGLVCRNREQVGKFKMCFNYEIRVFCCNYGHCPSTPATSSTATPSSTPGTTWILTKLTTTATTTESTGSTATPSSTQGPPAGTPHVSTTATTPTVTSSKATPFSSPGTATALPALRSTATTPTATSFTAIPSSSLGTTWTRLSQTTTPMATMSTATPSSTPETVHTSTVLTTTATTTGATGSVATPSSTPGTAHTTKVPTTTTTGFTVTPSSSPGTARTPPVWISTTTTPTTSGSTVTPSSIPGTTHTPTVLTTTTQPVATGSMATPSSSTQTSGTPPSLITTATTITATGSTTNPSSTPGTTPIPPELTTTATTPAATSSTVTPSSALGTTHTPPVPNTTATTHGRSLSPSSPHTVRTAWTSATSGTLGTTHITEPSTGTSHTPAATTGTTTTSTPALSSPHPSSRTTESPPSPGTTTPGHTTATSRTTATATPSKTRTSTLLPSQPTSAPITTVVTTGCEPQCAWSEWLDYSYPMPGPSGGDFDTYSNIRAAGGAVCEQPLGLECRAQAQPGVPLGELGQVVECSLDFGLVCRNREQVGKFKMCFNYEIRVFCCNYGHCPSTPATSSTAMPSSTPGTTWILTELTTTATTTASTGSTATPSSTPGTAPPPKVLTSPATTPTATSSKATSSSSPRTATTLPVLTSTATKSTATSVTPIPSSTLGTTGTLPEQTTTPVATMSTIHPSSTPETTHTSTVLTTKATTRATSSTSTPSSTPGTTWILTELTTAATTTAGTGPTATPSSTPGTTWILTELTTTATTTASTGSTATLSSTPGTTWILTEPSTTATVTVPTGSTATASSTQATAGTPHVSTTATTPTVTSSKATPSSSPGTATALPALRSTATTPTATSFTAIPSSSLGTTWTRLSQTTTPTATMSTATPSSTPETVHTSTVLTTTATTTGATGSVATPSSTPGTAHTTKVPTTTTTGFTATPSSSPGTALTPPVWISTTTTPTTTTPTTSGSTVTPSSIPGTTHTARVLTTTTTTVATGSMATPSSSTQTSGTPPSLTTTATTITATGSTTNPSSTPGTTPIPPVLTSMATTPAATSSKATSSSSPRTATTLPVLTSTATKSTATSFTPIPSSTLWTTWTVPAQTTTPMSTMSTIHTSSTPETTHTSTVLTTTATMTRATNSTATPSSTLGTTRILTELTTTATTTAATGSTATLSSTPGTTWILTEPSTIATVMVPTGSTATTSSTLGTAHTPKVVTAMATMPTATASTVPSSSTVGTTRTPAVLPSSLPTFSVSTVSSSVLTTLRPTGFPSSHFSTPCFCRAFGQFFSPGEVIYNKTDRAGCHFYAVCNQHCDIDRFQGACPTSPPPVSSAPLSSPSPAPGCDNAIPLRQVNETWTLENCTVARCVGDNRVVLLDPKPVANVTCVNKHLPIKVSDPSQPCDFHYECECICSMWGGSHYSTFDGTSYTFRGNCTYVLMREIHARFGNLSLYLDNHYCTASATAAAARCPRALSIHYKSMDIVLTVTMVHGKEEGLILFDQIPVSSGFSKNGVLVSVLGTTTMRVDIPALGVTVTFNGQVFQARLPYSLFHNNTEGQCGTCTNNQRDDCLQRDGTTAASCKDMAKTWLVPDSRKDGCWAPTGTPPTASPAAPVSSTPTPTPCPPQPLCDLMLSQVFAECHNLVPPGPFFNACISDHCRGRLEVPCQSLEAYAELCRARGVCSDWRGATGGLCDLTCPPTKVYKPCGPIQPATCNSRNQSPQLEGMAEGCFCPEDQILFNAHMGICVQACPCVGPDGFPKFPGERWVSNCQSCVCDEGSVSVQCKPLPCDAQGQPPPCNRPGFVTVTRPRAENPCCPETVCVCNTTTCPQSLPVCPPGQESICTQEEGDCCPTFRCRPQLCSYNGTFYGVGATFPGALPCHMCTCLSGDTQDPTVQCQEDACNNTTCPQGFEYKRVAGQCCGECVQTACLTPDGQPVQLNETWVNSHVDNCTVYLCEAEGGVHLLTPQPASCPDVSSCRGSLRKTGCCYSCEEDSCQVRINTTILWHQGCETEVNITFCEGSCPGASKYSAEAQAMQHQCTCCQERRVHEETVPLHCPNGSAILHTYTHVDECGCTPFCVPAPMAPPHTRGFPAQEATAV

SEQ ID NO: 5599 - protein, 442 aa, Homo sapiens
MASVVLPSGSQCAAAAAAAAPPGLRLRLLLLLFSAAALIPTGDGQNLFTKDVTVIEGEVATISCQVNKSDDSVIQLLNPNRQTIYFRDFRPLKDSRFQLLNFSSSELKVSLTNVSISDEGRYFCQLYTDPPQESYTTITVLVPPRNLMIDIQRDTAVEGEEIEVNCTAMASKPATTIRWFKGNTELKGKSEVEEWSDMYTVTSQLMLKVHKEDDGVPVICQVEHPAVTGNLQTQRYLEVQYKPQVHIQMTYPLQGLTREGDALELTCEAIGKPQPVMVTWVRVDDEMPQHAVLSGPNLFINNLNKTDNGTYRCEASNIVGKAHSDYMLYVYDPPTTIPPPTTTTTTTTTTTTTILTIITDSRAGEEGSIRAVDHAVIGGVVAVVVFAMLCLLIILGRYFARHKGTYFTHEAKGADDAADADTAIINAEGGQNNSEEKKEYFI

SEQ ID NO: 5600 - protein, 443 aa, Homo sapiens
MASVVLPSGSQCAAAAAAAAPPGLRLRLLLLLFSAAALIPTGDGQNLFTKDVTVIEGEVATISCQVNKSDDSVIQLLNPNRQTIYFRDFRPLKDSRFQLLNFSSSELKVSLTNVSISDEGRYFCQLYTDPPQESYTTITVLVPPRNLMIDIQKDTAVEGEEIEVNCTAMASKPATTIRWFKGNTELKGKSEVEEWSDMYTVTSQLMLKVHKEDDGVPVICQVEHPAVTGNLQTQRYLEVQYKPQVHIQMTYPLQGLTREGDALELTCEAIGKPQPVMVTWVRVDDEMPQHAVLSGPNLFINNLNKTDNGTYRCEASNIVGKAHSDYMLYVYDTTATTEPAVHGLTQLPNSAEELDSEDLSDSRAGEEGSIRAVDHAVIGGVVAVVVFAMLCLLIILGRYFARHKGTYFTHEAKGADDAADADTAIINAEGGQNNSEEKKEYFI

SEQ ID NO: 5601 - protein, 2813 aa, Homo sapiens
MIPARFAGVLLALALILPGTLCAEGTRGRSSTARCSLFGSDFVNTFDGSMYSFAGYCSYLLAGGCQKRSFSIIGDFQNGKRVSLSVYLGEFFDIHLFVNGTVTQGDQRVSMPYASKGLYLETEAGYYKLSGEAYGFVARIDGSGNFQVLLSDRYFNKTCGLCGNFNIFAEDDFMTQEGTLTSDPYDFANSWALSSGEQWCERASPPSSSCNISSGEMQKGLWEQCQLLKSTSVFARCHPLVDPEPFVALCEKTLCECAGGLECACPALLEYARTCAQEGMVLYGWTDHSACSPVCPAGMEYRQCVSPCARTCQSLHINEMCQERCVDGCSCPEGQLLDEGLCVESTECPCVHSGKRYPPGTSLSRDCNTCICRNSQWICSNEECPGECLVTGQSHFKSFDNRYFTFSGICQYLLARDCQDHSFSIVIETVQCADDRDAVCTRSVTVRLPGLHNSLVKLKHGAGVAMDGQDIQLPLLKGDLRIQHTVTASVRLSYGEDLQMDWDGRGRLLVKLSPVYAGKTCGLCGNYNGNQGDDFLTPSGLAEPRVEDFGNAWKLHGDCQDLQKQHSDPCALNPRMTRFSEEACAVLTSPTFEACHRAVSPLPYLRNCRYDVCSCSDGRECLCGALASYAAACAGRGVRVAWREPGRCELNCPKGQVYLQCGTPCNLTCRSLSYPDEECNEACLEGCFCPPGLYMDERGDCVPKAQCPCYYDGEIFQPEDIFSDHHTMCYCEDGFMHCTMSGVPGSLLPDAVLSSPLSHRSKRSLSCRPPMVKLVCPADNLRAEGLECTKTCQNYDLECMSMGCVSGCLCPPGMVRHENRCVALERCPCFHQGKEYAPGETVKIGCNTCVCRDRKWNCTDHVCDATCSTIGMAHYLTFDGLKYLFPGECQYVLVQDYCGSNPGTFRILVGNKGCSHPSVKCKKRVTILVEGGEIELFDGEVNVKRPMKDETHFEVVESGRYIILLLGKALSVVWDRHLSISVVLKQTYQEKVCGLCGNFDGIQNNDLTSSNLQVEEDPVDFGNSWKVSSQCADTRKVPLDSSPATCHNNIMKQTMVDSSCRILTSDVFQDCNKLVDPEPYLDVCIYDTCSCESIGDCACFCDTIAAYAHVCAQHGKVVTWRTATLCPQSCEERNLRENGYECEWRYNSCAPACQVTCQHPEPLACPVQCVEGCHAHCPPGKILDELLQTCVDPEDCPVCEVAGRRFASGKKVTLNPSDPEHCQICHCDVVNLTCEACQEPGGLVVPPTDAPVSPTTLYVEDISEPPLHDFYCSRLLDLVFLLDGSSRLSEAEFEVLKAFVVDMMERLRISQKWVRVAVVEYHDGSHAYIGLKDRKRPSELRRIASQVKYAGSQVASTSEVLKYTLFQIFSKIDRPEASRIALLLMASQEPQRMSRNFVRYVQGLKKKKVIVIPVGIGPHANLKQIRLIEKQAPENKAFVLSSVDELEQQRDEIVSYLCDLAPEAPPPTLPPHMAQVTVGPGLLGVSTLGPKRNSMVLDVAFVLEGSDKIGEADFNRSKEFMEEVIQRMDVGQDSIHVTVLQYSYMVTVEYPFSEAQSKGDILQRVREIRYQGGNRTNTGLALRYLSDHSFLVSQGDREQAPNLVYMVTGNPASDEIKRLPGDIQVVPIGVGPNANVQELERIGWPNAPILIQDFETLPREAPDLVLQRCCSGEGLQIPTLSPAPDCSQPLDVILLLDGSSSFPASYFDEMKSFAKAFISKANIGPRLTQVSVLQYGSITTIDVPWNVVPEKAHLLSLVDVMQREGGPSQIGDALGFAVRYLTSEMHGARPGASKAVVILVTDVSVDSVDAAADAARSNRVTVFPIGIGDRYDAAQLRILAGPAGDSNVVKLQRIEDLPTMVTLGNSFLHKLCSGFVRICMDEDGNEKRPGDVWTLPDQCHTVTCQPDGQTLLKSHRVNCDRGLRPSCPNSQSPVKVEETCGCRWTCPCVCTGSSTRHIVTFDGQNFKLTGSCSYVLFQNKEQDLEVILHNGACSPGARQGCMKSIEVKHSALSVELHSDMEVTVNGRLVSVPYVGGNMEVNVYGAIMHEVRFNHLGHIFTFTPQNNEFQLQLSPKTFASKTYGLCGICDENGANDFMLRDGTVTTDWKTLVQEWTVQRPGQTCQPILEEQCLVPDSSHCQVLLLPLFAECHKVLAPATFYAICQQDSCHQEQVCEVIASYAHLCRTNGVCVDWRTPDFCAMSCPPSLVYNHCEHGCPRHCDGNVSSCGDHPSEGCFCPPDKVMLEGSCVPEEACTQCIGEDGVQHQFLEAWVPDHQPCQICTCLSGRKVNCTTQPCPTAKAPTCGLCEVARLRQNADQCCPEYECVCDPVSCDLPPVPHCERGLQPTLTNPGECRPNFTCACRKEECKRVSPPSCPPHRLPTLRKTQCCDEYECACNCVNSTVSCPLGYLASTATNDCGCTTTTCLPDKVCVHRSTIYPVGQFWEEGCDVCTCTDMEDAVMGLRVAQCSQKPCEDSCRSGFTYVLHEGECCGRCLPSACEVVTGSPRGDSQSSWKSVGSQWASPENPCLINECVRVKEEVFIQQRNVSCPQLEVPVCPSGFQLSCKTSACCPSCRCERMEACMLNGTVIGPGKTVMIDVCTTCRCMVQVGVISGFKLECRKTTCNPCPLGYKEENNTGECCGRCLPTACTIQLRGGQIMTLKRDETLQDGCDTHFCKVNERGEYFWEKRVTGCPPFDEHKCLAEGGKIMKIPGTCCDTCEEPECNDITARLQYVKVGSCKSEVEVDIHYCQGKCASKAMYSIDINDVQDQCSCCSPTRTEPMQVALHCTNGSVVYHEVLNAMECKCSPRKCSK

SEQ ID NO: 5602 - protein, 923 aa, Homo sapiens
MERGLPLLCAVLALVLAPAGAFRNDKCGDTIKIESPGYLTSPGYPHSYHPSEKCEWLIQAPDPYQRIMINFNPHFDLEDRDCKYDYVEVFDGENENGHFRGKFCGKIAPPPVVSSGPFLFIKFVSDYETHGAGFSIRYEIFKRGPECSQNYTTPSGVIKSPGFPEKYPNSLECTYIVFAPKMSEIILEFESFDLEPDSNPPGGMFCRYDRLEIWDGFPDVGPHIGRYCGQKTPGRIRSSSGILSMVFYTDSAIAKEGFSANYSVLQSSVSEDFKCMEALGMESGEIHSDQITASSQYSTNWSAERSRLNYPENGWTPGEDSYREWIQVDLGLLRFVTAVGTQGAISKETKKKYYVKTYKIDVSSNGEDWITIKEGNKPVLFQGNTNPTDVVVAVFPKPLITRFVRIKPATWETGISMRFEVYGCKITDYPCSGMLGMVSGLISDSQITSSNQGDRNWMPENIRLVTSRSGWALPPAPHSYINEWLQIDLGEEKIVRGIIIQGGKHRENKVFMRKFKIGYSNNGSDWKMIMDDSKRKAKSFEGNNNYDTPELRTFPALSTRFIRIYPERATHGGLGLRMELLGCEVEAPTAGPTTPNGNLVDECDDDQANCHSGTGDDFQLTGGTTVLATEKPTVIDSTIQSEFPTYGFNCEFGWGSHKTFCHWEHDNHVQLKWSVLTSKTGPIQDHTGDGNFIYSQADENQKGKVARLVSPVVYSQNSAHCMTFWYHMSGSHVGTLRVKLRYQKPEEYDQLVWMAIGHQGDHWKEGRVLLHKSLKLYQVIFEGEIGKGNLGGIAVDDISINNHISQEDCAKPADLDKKNPEIKIDETGSTPGYEGEGEGDKNISRKPGNVLKTLEPILITIIAMSALGVLLGAVCGVVLYCACWHNGMSERNLSALENYNFELVDGVKLKKDKLNTQSTYSEA

SEQ ID NO: 5603 - protein, 609 aa, Homo sapiens
MERGLPLLCAVLALVLAPAGAFRNDKCGDTIKIESPGYLTSPGYPHSYHPSEKCEWLIQAPDPYQRIMINFNPHFDLEDRDCKYDYVEVFDGENENGHFRGKFCGKIAPPPVVSSGPFLFIKFVSDYETHGAGFSIRYEIFKRGPECSQNYTTPSGVIKSPGFPEKYPNSLECTYIVFAPKMSEIILEFESFDLEPDSNPPGGMFCRYDRLEIWDGFPDVGPHIGRYCGQKTPGRIRSSSGILSMVFYTDSAIAKEGFSANYSVLQSSVSEDFKCMEALGMESGEIHSDQITASSQYSTNWSAERSRLNYPENGWTPGEDSYREWIQVDLGLLRFVTAVGTQGAISKETKKKYYVKTYKIDVSSNGEDWITIKEGNKPVLFQGNTNPTDVVVAVFPKPLITRFVRIKPATWETGISMRFEVYGCKITDYPCSGMLGMVSGLISDSQITSSNQGDRNWMPENIRLVTSRSGWALPPAPHSYINEWLQIDLGEEKIVRGIIIQGGKHRENKVFMRKFKIGYSNNGSDWKMIMDDSKRKAKSFEGNNNYDTPELRTFPALSTRFIRIYPERATHGGLGLRMELLGCEVEGGTTVLATEKPTVIDSTIQSGIK

SEQ ID NO: 5604 - protein, 538 aa, Homo sapiens
MVAEVSPKLAASPMKKPFGFRGKMGKWCCCCFPCCRGSGKNNMGAWRDHDDSAFTEPRYHVRREDLGKLHRAAWWGEVPRADLIVMLRGPGINKRDKKKRKKRFGRTALHLACANGNSEVVSLLLDRQCQLHVFDSKKRTALIKAVQCQEDECALMLLQHGTDPNLPDMYGNTALHYAVYNEDKLMAKTLLLYGADIESKNKGGLTPLLLAVHGQKQRMVKFLIKKKANLNALDRFGRTALILAVRCGSASIVSLLLQQNIDVFSQDVFGQTAEDYAVSSHHSIICQLLSDYKENQMPNNSSGNSNPAITVLNIKLPLKVEEEMQKHGSNNVGLSENLTDGAAAGNGDGGLVPQRKSRKHENQQFPNTEIEEYHSEEQNDTRKQLSKEQNARILQDEILTTKQKQIEVAEKKMNFEISLSHKEEKELLHENSMMQEEIAMLRIELDTIKHQNQLREKKYLEYIKSVKEKNDNLLKAIQLNEEALTKAVVQYSGQLSILTTENKMLSFELQNVRHNNETLEMEIQSCHFRLATALHDCD

SEQ ID NO: 5605 - protein, 120 aa, Homo sapiens
QVTLRESGPALVKPTQTLTLTCTFSGFSLSSTGMCVGWIRQPPGKGLEWLARIDWDDDKYYNTSLETRLTISKDTSRNQVVLTMDPVDTATYYCARITVIPAPAGYMDVWGRGTPVTVSS

SEQ ID NO: 5606 - protein, 739 aa, Homo sapiens
MFLLLALLTELGRLQAHEGSEGIFLHVTVPRKIKSNDSEVSERKMIYIITIDGQPYTLHLGKQSFLPQNFLVYTYNETGSLHSVSPYFMMHCHYQGYAAEFPNSFVTLSICSGLRGFLQFENISYGIEPVESSARFEHIIYQMKNNDPNVSILAVNYSHIWQKDQPYKVPLNSQIKNLSKLLPQYLEIYIIVEKALYDYMGSEMMAVTQKIVQVIGLVNTMFTQFKLTVILSSLELWSNENQISTSGDADDILQRFLAWKRDYLILRPHDIAYLLVYRKHPKYVGATFPGTVCNKSYDAGIAMYPDAIGLEGFSVIIAQLLGLNVGLTYDDITQCFCLRATCIMNHEAVSASGRKIFSNCSMHDYRYFVSKFETKCLQKLSNLQPLHQNQPVCGNGILESNEECDCGNKNECQFKKCCDYNTCKLKGSVKCGSGPCCTSKCELSIAGTPCRKSIDPECDFTEYCNGTSSNCVPDTYALNGRLCKLGTAYCYNGQCQTTDNQCAKIFGKGAQGAPFACFKEVNSLHERSENCGFKNSQPLPCERKDVLCGKLACVQPHKNANKSDAQSTVYSYIQDHVCVSIATGSSMRSDGTDNAYVADGTMCGPEMYCVNKTCRKVHLMGYNCNATTKCKGKGICNNFGNCQCFPGHRPPDCKFQFGSPGGSIDDGNFQKSGDFYTEKGYNTHWNNWFILSFCIFLPFFIVFTTVIFKRNEISKSCNRENAEYNRNSSVVSESDDVGH

SEQ ID NO: 5607 - protein, 2976 aa, Homo sapiens
MRKHRHLPLVAVFCLFLSGFPTTHAQQQQADVKNGAAADIIFLVDSSWTIGEEHFQLVREFLYDVVKSLAVGENDFHFALVQFNGNPHTEFLLNTYRTKQEVLSHISNMSYIGGTNQTGKGLEYIMQSHLTKAAGSRAGDGVPQVIVVLTDGHSKDGLALPSAELKSADVNVFAIGVEDADEGALKEIASEPLNMHMFNLENFTSLHDIVGNLVSCVHSSVSPERAGDTETLKDITAQDSADIIFLIDGSNNTGSVNFAVILDFLVNLLEKLPIGTQQIRVGVVQFSDEPRTMFSLDTYSTKAQVLGAVKALGFAGGELANIGLALDFVVENHFTRAGGSRVEEGVPQVLVLISAGPSSDEIRYGVVALKQASVFSFGLGAQAASRAELQHIATDDNLVFTVPEFRSFGDLQEKLLPYIVGVAQRHIVLKPPTIVTQVIEVNKRDIVFLVDGSSALGLANFNAIRDFIAKVIQRLEIGQDLIQVAVAQYADTVRPEFYFNTHPTKREVITAVRKMKPLDGSALYTGSALDFVRNNLFTSSAGYRAAEGIPKLLVLITGGKSLDEISQPAQELKRSSIMAFAIGNKGADQAELEEIAFDSSLVFIPAEFRAAPLQGMLPGLLAPLRTLSGTPEESKRDILFLFDGSANLVGQFPVVRDFLYKIIDELNVKPEGTRIAVAQYSDDVKVESRFDEHQSKPEILNLVKRMKIKTGKALNLGYALDYAQRYIFVKSAGSRIEDGVLQFLVLLVAGRSSDRVDGPASNLKQSGVVPFIFQAKNADPAELEQIVLSPAFILAAESLPKIGDLHPQIVNLLKSVHNGAPAPVSGEKDVVFLLDGSEGVRSGFPLLKEFVQRVVESLDVGQDRVRVAVVQYSDRTRPEFYLNSYMNKQDVVNAVRQLTLLGGPTPNTGAALEFVLRNILVSSAGSRITEGVPQLLIVLTADRSGDDVRNPSVVVKRGGAVPIGIGIGNADITEMQTISFIPDFAVAIPTFRQLGTVQQVISERVTQLTREELSRLQPVLQPLPSPGVGGKRDVVFLIDGSQSAGPEFQYVRTLIERLVDYLDVGFDTTRVAVIQFSDDPKAEFLLNAHSSKDEVQNAVQRLRPKGGRQINVGNALEYVSRNIFKRPLGSRIEEGVPQFLVLISSGKSDDEVVVPAVELKQFGVAPFTIARNADQEELVKISLSPEYVFSVSTFRELPSLEQKLLTPITTLTSEQIQKLLASTRYPPPAVESDAADIVFLIDSSEGVRPDGFAHIRDFVSRIVRRLNIGPSKVRVGVVQFSNDVFPEFYLKTYRSQAPVLDAIRRLRLRGGSPLNTGKALEFVARNLFVKSAGSRIEDGVPQHLVLVLGGKSQDDVSRFAQVIRSSGIVSLGVGDRNIDRTELQTITNDPRLVFTVREFRELPNIEERIMNSFGPSAATPAPPGVDTPPPSRPEKKKADIVFLLDGSINFRRDSFQEVLRFVSEIVDTVYEDGDSIQVGLVQYNSDPTDEFFLKDFSTKRQIIDAINKVVYKGGRHANTKVGLEHLRVNHFVPEAGSRLDQRVPQIAFVITGGKSVEDAQDVSLALTQRGVKVFAVGVRNIDSEEVGKIASNSATAFRVGNVQELSELSEQVLETLHDAMHETLCPGVTDAAKACNLDVILGFDGSRDQNVFVAQKGFESKVDAILNRISQMHRVSCSGGRSPTVRVSVVANTPSGPVEAFDFDEYQPEMLEKFRNMRSQHPYVLTEDTLKVYLNKFRQSSPDSVKVVIHFTDGADGDLADLHRASENLRQEGVRALILVGLERVVNLERLMHLEFGRGFMYDRPLRLNLLDLDYELAEQLDNIAEKACCGVPCKCSGQRGDRGPIGSIGPKGIPGEDGYRGYPGDEGGPGERGPPGVNGTQGFQGCPGQRGVKGSRGFPGEKGEVGEIGLDGLDGEDGDKGLPGSSGEKGNPGRRGDKGPRGEKGERGDVGIRGDPGNPGQDSQERGPKGETGDLGPMGVPGRDGVPGGPGETGKNGGFGRRGPPGAKGNKGGPGQPGFEGEQGTRGAQGPAGPAGPPGLIGEQGISGPRGSGGARGAPGERGRTGPLGRKGEPGEPGPKGGIGNPGPRGETGDDGRDGVGSEGRRGKKGERGFPGYPGPKGNPGEPGLNGTTGPKGIRGRRGNSGPPGIVGQKGRPGYPGPAGPRGNRGDSIDQCALIQSIKDKCPCCYGPLECPVFPTELAFALDTSEGVNQDTFGRMRDVVLSIVNVLTIAESNCPTGARVAVVTYNNEVTTEIRFADSKRKSVLLDKIKNLQVALTSKQQSLETAMSFVARNTFKRVRNGFLMRKVAVFFSNTPTRASPQLREAVLKLSDAGITPLFLTRQEDRQLINALQINNTAVGHALVLPAGRDLTDFLENVLTCHVCLDICNIDPSCGFGSWRPSFRDRRAAGSDVDIDMAFILDSAETTTLFQFNEMKKYIAYLVRQLDMSPDPKASQHFARVAVVQHAPSESVDNASMPPVKVEFSLTDYGSKEKLVDFLSRGMTQLQGTRALGSAIEYTIENVFESAPNPRDLKIVVLMLTGEVPEQQLEEAQRVILQAKCKGYFFVVLGIGRKVNIKEVYTFASEPNDVFFKLVDKSTELNEEPLMRFGRLLPSFVSSENAFYLSPDIRKQCDWFQGDQPTKNLVKFGHKQVNVPNNVTSSPTSNPVTTTKPVTTTKPVTTTTKPVTTTTKPVTIINQPSVKPAAAKPAPAKPVAAKPVATKTATVRPPVAVKPATAAKPVAAKPAAVRPPAAAAKPVATKPEVPRPQAAKPAATKPATTKPVVKMLREVQVFEITENSAKLHWERPEPPGPYFYDLTVTSAHDQSLVLKQNLTVTDRVIGGLLAGQTYHVAVVCYLRSQVRATYHGSFSTKKSQPPPPQPARSASSSTINLMVSTEPLALTETDICKLPKDEGTCRDFILKWYYDPNTKSCARFWYGGCGGNENKFGSQKECEKVCAPVLAKPGVISVMGT

SEQ ID NO: 5608 - protein, 3176 aa, Homo sapiens
MRKHRHLPLVAVFCLFLSGFPTTHAQQQQADVKNGAAADIIFLVDSSWTIGEEHFQLVREFLYDVVKSLAVGENDFHFALVQFNGNPHTEFLLNTYRTKQEVLSHISNMSYIGGTNQTGKGLEYIMQSHLTKAAGSRAGDGVPQVIVVLTDGHSKDGLALPSAELKSADVNVFAIGVEDADEGALKEIASEPLNMHMFNLENFTSLHDIVGNLVSCVHSSVSPERAGDTETLKDITAQDSADIIFLIDGSNNTGSVNFAVILDFLVNLLEKLPIGTQQIRVGVVQFSDEPRTMFSLDTYSTKAQVLGAVKALGFAGGELANIGLALDFVVENHFTRAGGSRVEEGVPQVLVLISAGPSSDEIRYGVVALKQASVFSFGLGAQAASRAELQHIATDDNLVFTVPEFRSFGDLQEKLLPYIVGVAQRHIVLKPPTIVTQVIEVNKRDIVFLVDGSSALGLANFNAIRDFIAKVIQRLEIGQDLIQVAVAQYADTVRPEFYFNTHPTKREVITAVRKMKPLDGSALYTGSALDFVRNNLFTSSAGYRAAEGIPKLLVLITGGKSLDEISQPAQELKRSSIMAFAIGNKGADQAELEEIAFDSSLVFIPAEFRAAPLQGMLPGLLAPLRTLSGTPEVHSNKRDIIFLLDGSANVGKTNFPYVRDFVMNLVNSLDIGNDNIRVGLVQFSDTPVTEFSLNTYQTKSDILGHLRQLQLQGGSGLNTGSALSYVYANHFTEAGGSRIREHVPQLLLLLTAGQSEDSYLQAANALTRAGILTFCVGASQANKAELEQIAFNPSLVYLMDDFSSLPALPQQLIQPLTTYVSGGVEEVPLAQPESKRDILFLFDGSANLVGQFPVVRDFLYKIIDELNVKPEGTRIAVAQYSDDVKVESRFDEHQSKPEILNLVKRMKIKTGKALNLGYALDYAQRYIFVKSAGSRIEDGVLQFLVLLVAGRSSDRVDGPASNLKQSGVVPFIFQAKNADPAELEQIVLSPAFILAAESLPKIGDLHPQIVNLLKSVHNGAPAPVSGEKDVVFLLDGSEGVRSGFPLLKEFVQRVVESLDVGQDRVRVAVVQYSDRTRPEFYLNSYMNKQDVVNAVRQLTLLGGPTPNTGAALEFVLRNILVSSAGSRITEGVPQLLIVLTADRSGDDVRNPSVVVKRGGAVPIGIGIGNADITEMQTISFIPDFAVAIPTFRQLGTVQQVISERVTQLTREELSRLQPVLQPLPSPGVGGKRDVVFLIDGSQSAGPEFQYVRTLIERLVDYLDVGFDTTRVAVIQFSDDPKAEFLLNAHSSKDEVQNAVQRLRPKGGRQINVGNALEYVSRNIFKRPLGSRIEEGVPQFLVLISSGKSDDEVVVPAVELKQFGVAPFTIARNADQEELVKISLSPEYVFSVSTFRELPSLEQKLLTPITTLTSEQIQKLLASTRYPPPAVESDAADIVFLIDSSEGVRPDGFAHIRDFVSRIVRRLNIGPSKVRVGVVQFSNDVFPEFYLKTYRSQAPVLDAIRRLRLRGGSPLNTGKALEFVARNLFVKSAGSRIEDGVPQHLVLVLGGKSQDDVSRFAQVIRSSGIVSLGVGDRNIDRTELQTITNDPRLVFTVREFRELPNIEERIMNSFGPSAATPAPPGVDTPPPSRPEKKKADIVFLLDGSINFRRDSFQEVLRFVSEIVDTVYEDGDSIQVGLVQYNSDPTDEFFLKDFSTKRQIIDAINKVVYKGGRHANTKVGLEHLRVNHFVPEAGSRLDQRVPQIAFVITGGKSVEDAQDVSLALTQRGVKVFAVGVRNIDSEEVGKIASNSATAFRVGNVQELSELSEQVLETLHDAMHETLCPGVTDAAKACNLDVILGFDGSRDQNVFVAQKGFESKVDAILNRISQMHRVSCSGGRSPTVRVSVVANTPSGPVEAFDFDEYQPEMLEKFRNMRSQHPYVLTEDTLKVYLNKFRQSSPDSVKVVIHFTDGADGDLADLHRASENLRQEGVRALILVGLERVVNLERLMHLEFGRGFMYDRPLRLNLLDLDYELAEQLDNIAEKACCGVPCKCSGQRGDRGPIGSIGPKGIPGEDGYRGYPGDEGGPGERGPPGVNGTQGFQGCPGQRGVKGSRGFPGEKGEVGEIGLDGLDGEDGDKGLPGSSGEKGNPGRRGDKGPRGEKGERGDVGIRGDPGNPGQDSQERGPKGETGDLGPMGVPGRDGVPGGPGETGKNGGFGRRGPPGAKGNKGGPGQPGFEGEQGTRGAQGPAGPAGPPGLIGEQGISGPRGSGGARGAPGERGRTGPLGRKGEPGEPGPKGGIGNPGPRGETGDDGRDGVGSEGRRGKKGERGFPGYPGPKGNPGEPGLNGTTGPKGIRGRRGNSGPPGIVGQKGRPGYPGPAGPRGNRGDSIDQCALIQSIKDKCPCCYGPLECPVFPTELAFALDTSEGVNQDTFGRMRDVVLSIVNVLTIAESNCPTGARVAVVTYNNEVTTEIRFADSKRKSVLLDKIKNLQVALTSKQQSLETAMSFVARNTFKRVRNGFLMRKVAVFFSNTPTRASPQLREAVLKLSDAGITPLFLTRQEDRQLINALQINNTAVGHALVLPAGRDLTDFLENVLTCHVCLDICNIDPSCGFGSWRPSFRDRRAAGSDVDIDMAFILDSAETTTLFQFNEMKKYIAYLVRQLDMSPDPKASQHFARVAVVQHAPSESVDNASMPPVKVEFSLTDYGSKEKLVDFLSRGMTQLQGTRALGSAIEYTIENVFESAPNPRDLKIVVLMLTGEVPEQQLEEAQRVILQAKCKGYFFVVLGIGRKVNIKEVYTFASEPNDVFFKLVDKSTELNEEPLMRFGRLLPSFVSSENAFYLSPDIRKQCDWFQGDQPTKNLVKFGHKQVNVPNNVTSSPTSNPVTTTKPVTTTKPVTTTTKPVTTTTKPVTIINQPSVKPAAAKPAPAKPVAAKPVATKTATVRPPVAVKPATAAKPVAAKPAAVRPPAAAAKPVATKPEVPRPQAAKPAATKPATTKPVVKMLREVQVFEITENSAKLHWERPEPPGPYFYDLTVTSAHDQSLVLKQNLTVTDRVIGGLLAGQTYHVAVVCYLRSQVRATYHGSFSTKKSQPPPPQPARSASSSTINLMVSTEPLALTETDICKLPKDEGTCRDFILKWYYDPNTKSCARFWYGGCGGNENKFGSQKECEKVCAPVLAKPGVISVMGT

SEQ ID NO: 5609 - protein, 2971 aa, Homo sapiens
MRKHRHLPLVAVFCLFLSGFPTTHAQQQQADAQDSADIIFLIDGSNNTGSVNFAVILDFLVNLLEKLPIGTQQIRVGVVQFSDEPRTMFSLDTYSTKAQVLGAVKALGFAGGELANIGLALDFVVENHFTRAGGSRVEEGVPQVLVLISAGPSSDEIRYGVVALKQASVFSFGLGAQAASRAELQHIATDDNLVFTVPEFRSFGDLQEKLLPYIVGVAQRHIVLKPPTIVTQVIEVNKRDIVFLVDGSSALGLANFNAIRDFIAKVIQRLEIGQDLIQVAVAQYADTVRPEFYFNTHPTKREVITAVRKMKPLDGSALYTGSALDFVRNNLFTSSAGYRAAEGIPKLLVLITGGKSLDEISQPAQELKRSSIMAFAIGNKGADQAELEEIAFDSSLVFIPAEFRAAPLQGMLPGLLAPLRTLSGTPEVHSNKRDIIFLLDGSANVGKTNFPYVRDFVMNLVNSLDIGNDNIRVGLVQFSDTPVTEFSLNTYQTKSDILGHLRQLQLQGGSGLNTGSALSYVYANHFTEAGGSRIREHVPQLLLLLTAGQSEDSYLQAANALTRAGILTFCVGASQANKAELEQIAFNPSLVYLMDDFSSLPALPQQLIQPLTTYVSGGVEEVPLAQPESKRDILFLFDGSANLVGQFPVVRDFLYKIIDELNVKPEGTRIAVAQYSDDVKVESRFDEHQSKPEILNLVKRMKIKTGKALNLGYALDYAQRYIFVKSAGSRIEDGVLQFLVLLVAGRSSDRVDGPASNLKQSGVVPFIFQAKNADPAELEQIVLSPAFILAAESLPKIGDLHPQIVNLLKSVHNGAPAPVSGEKDVVFLLDGSEGVRSGFPLLKEFVQRVVESLDVGQDRVRVAVVQYSDRTRPEFYLNSYMNKQDVVNAVRQLTLLGGPTPNTGAALEFVLRNILVSSAGSRITEGVPQLLIVLTADRSGDDVRNPSVVVKRGGAVPIGIGIGNADITEMQTISFIPDFAVAIPTFRQLGTVQQVISERVTQLTREELSRLQPVLQPLPSPGVGGKRDVVFLIDGSQSAGPEFQYVRTLIERLVDYLDVGFDTTRVAVIQFSDDPKAEFLLNAHSSKDEVQNAVQRLRPKGGRQINVGNALEYVSRNIFKRPLGSRIEEGVPQFLVLISSGKSDDEVVVPAVELKQFGVAPFTIARNADQEELVKISLSPEYVFSVSTFRELPSLEQKLLTPITTLTSEQIQKLLASTRYPPPAVESDAADIVFLIDSSEGVRPDGFAHIRDFVSRIVRRLNIGPSKVRVGVVQFSNDVFPEFYLKTYRSQAPVLDAIRRLRLRGGSPLNTGKALEFVARNLFVKSAGSRIEDGVPQHLVLVLGGKSQDDVSRFAQVIRSSGIVSLGVGDRNIDRTELQTITNDPRLVFTVREFRELPNIEERIMNSFGPSAATPAPPGVDTPPPSRPEKKKADIVFLLDGSINFRRDSFQEVLRFVSEIVDTVYEDGDSIQVGLVQYNSDPTDEFFLKDFSTKRQIIDAINKVVYKGGRHANTKVGLEHLRVNHFVPEAGSRLDQRVPQIAFVITGGKSVEDAQDVSLALTQRGVKVFAVGVRNIDSEEVGKIASNSATAFRVGNVQELSELSEQVLETLHDAMHETLCPGVTDAAKACNLDVILGFDGSRDQNVFVAQKGFESKVDAILNRISQMHRVSCSGGRSPTVRVSVVANTPSGPVEAFDFDEYQPEMLEKFRNMRSQHPYVLTEDTLKVYLNKFRQSSPDSVKVVIHFTDGADGDLADLHRASENLRQEGVRALILVGLERVVNLERLMHLEFGRGFMYDRPLRLNLLDLDYELAEQLDNIAEKACCGVPCKCSGQRGDRGPIGSIGPKGIPGEDGYRGYPGDEGGPGERGPPGVNGTQGFQGCPGQRGVKGSRGFPGEKGEVGEIGLDGLDGEDGDKGLPGSSGEKGNPGRRGDKGPRGEKGERGDVGIRGDPGNPGQDSQERGPKGETGDLGPMGVPGRDGVPGGPGETGKNGGFGRRGPPGAKGNKGGPGQPGFEGEQGTRGAQGPAGPAGPPGLIGEQGISGPRGSGGARGAPGERGRTGPLGRKGEPGEPGPKGGIGNPGPRGETGDDGRDGVGSEGRRGKKGERGFPGYPGPKGNPGEPGLNGTTGPKGIRGRRGNSGPPGIVGQKGRPGYPGPAGPRGNRGDSIDQCALIQSIKDKCPCCYGPLECPVFPTELAFALDTSEGVNQDTFGRMRDVVLSIVNVLTIAESNCPTGARVAVVTYNNEVTTEIRFADSKRKSVLLDKIKNLQVALTSKQQSLETAMSFVARNTFKRVRNGFLMRKVAVFFSNTPTRASPQLREAVLKLSDAGITPLFLTRQEDRQLINALQINNTAVGHALVLPAGRDLTDFLENVLTCHVCLDICNIDPSCGFGSWRPSFRDRRAAGSDVDIDMAFILDSAETTTLFQFNEMKKYIAYLVRQLDMSPDPKASQHFARVAVVQHAPSESVDNASMPPVKVEFSLTDYGSKEKLVDFLSRGMTQLQGTRALGSAIEYTIENVFESAPNPRDLKIVVLMLTGEVPEQQLEEAQRVILQAKCKGYFFVVLGIGRKVNIKEVYTFASEPNDVFFKLVDKSTELNEEPLMRFGRLLPSFVSSENAFYLSPDIRKQCDWFQGDQPTKNLVKFGHKQVNVPNNVTSSPTSNPVTTTKPVTTTKPVTTTTKPVTTTTKPVTIINQPSVKPAAAKPAPAKPVAAKPVATKTATVRPPVAVKPATAAKPVAAKPAAVRPPAAAAKPVATKPEVPRPQAAKPAATKPATTKPVVKMLREVQVFEITENSAKLHWERPEPPGPYFYDLTVTSAHDQSLVLKQNLTVTDRVIGGLLAGQTYHVAVVCYLRSQVRATYHGSFSTKKSQPPPPQPARSASSSTINLMVSTEPLALTETDICKLPKDEGTCRDFILKWYYDPNTKSCARFWYGGCGGNENKFGSQKECEKVCAPVLAKPGVISVMGT

SEQ ID NO: 5610 - protein, 2975 aa, Homo sapiens
MRKHRHLPLVAVFCLFLSGFPTTHAQQQQADVKNGAAADIIFLVDSSWTIGEEHFQLVREFLYDVVKSLAVGENDFHFALVQFNGNPHTEFLLNTYRTKQEVLSHISNMSYIGGTNQTGKGLEYIMQSHLTKAAGSRAGDGVPQVIVVLTDGHSKDGLALPSAELKSADVNVFAIGVEDADEGALKEIASEPLNMHMFNLENFTSLHDIVGNLVSCVHSSVSPERAGDTETLKDITVIEVNKRDIVFLVDGSSALGLANFNAIRDFIAKVIQRLEIGQDLIQVAVAQYADTVRPEFYFNTHPTKREVITAVRKMKPLDGSALYTGSALDFVRNNLFTSSAGYRAAEGIPKLLVLITGGKSLDEISQPAQELKRSSIMAFAIGNKGADQAELEEIAFDSSLVFIPAEFRAAPLQGMLPGLLAPLRTLSGTPEVHSNKRDIIFLLDGSANVGKTNFPYVRDFVMNLVNSLDIGNDNIRVGLVQFSDTPVTEFSLNTYQTKSDILGHLRQLQLQGGSGLNTGSALSYVYANHFTEAGGSRIREHVPQLLLLLTAGQSEDSYLQAANALTRAGILTFCVGASQANKAELEQIAFNPSLVYLMDDFSSLPALPQQLIQPLTTYVSGGVEEVPLAQPESKRDILFLFDGSANLVGQFPVVRDFLYKIIDELNVKPEGTRIAVAQYSDDVKVESRFDEHQSKPEILNLVKRMKIKTGKALNLGYALDYAQRYIFVKSAGSRIEDGVLQFLVLLVAGRSSDRVDGPASNLKQSGVVPFIFQAKNADPAELEQIVLSPAFILAAESLPKIGDLHPQIVNLLKSVHNGAPAPVSGEKDVVFLLDGSEGVRSGFPLLKEFVQRVVESLDVGQDRVRVAVVQYSDRTRPEFYLNSYMNKQDVVNAVRQLTLLGGPTPNTGAALEFVLRNILVSSAGSRITEGVPQLLIVLTADRSGDDVRNPSVVVKRGGAVPIGIGIGNADITEMQTISFIPDFAVAIPTFRQLGTVQQVISERVTQLTREELSRLQPVLQPLPSPGVGGKRDVVFLIDGSQSAGPEFQYVRTLIERLVDYLDVGFDTTRVAVIQFSDDPKAEFLLNAHSSKDEVQNAVQRLRPKGGRQINVGNALEYVSRNIFKRPLGSRIEEGVPQFLVLISSGKSDDEVVVPAVELKQFGVAPFTIARNADQEELVKISLSPEYVFSVSTFRELPSLEQKLLTPITTLTSEQIQKLLASTRYPPPAVESDAADIVFLIDSSEGVRPDGFAHIRDFVSRIVRRLNIGPSKVRVGVVQFSNDVFPEFYLKTYRSQAPVLDAIRRLRLRGGSPLNTGKALEFVARNLFVKSAGSRIEDGVPQHLVLVLGGKSQDDVSRFAQVIRSSGIVSLGVGDRNIDRTELQTITNDPRLVFTVREFRELPNIEERIMNSFGPSAATPAPPGVDTPPPSRPEKKKADIVFLLDGSINFRRDSFQEVLRFVSEIVDTVYEDGDSIQVGLVQYNSDPTDEFFLKDFSTKRQIIDAINKVVYKGGRHANTKVGLEHLRVNHFVPEAGSRLDQRVPQIAFVITGGKSVEDAQDVSLALTQRGVKVFAVGVRNIDSEEVGKIASNSATAFRVGNVQELSELSEQVLETLHDAMHETLCPGVTDAAKACNLDVILGFDGSRDQNVFVAQKGFESKVDAILNRISQMHRVSCSGGRSPTVRVSVVANTPSGPVEAFDFDEYQPEMLEKFRNMRSQHPYVLTEDTLKVYLNKFRQSSPDSVKVVIHFTDGADGDLADLHRASENLRQEGVRALILVGLERVVNLERLMHLEFGRGFMYDRPLRLNLLDLDYELAEQLDNIAEKACCGVPCKCSGQRGDRGPIGSIGPKGIPGEDGYRGYPGDEGGPGERGPPGVNGTQGFQGCPGQRGVKGSRGFPGEKGEVGEIGLDGLDGEDGDKGLPGSSGEKGNPGRRGDKGPRGEKGERGDVGIRGDPGNPGQDSQERGPKGETGDLGPMGVPGRDGVPGGPGETGKNGGFGRRGPPGAKGNKGGPGQPGFEGEQGTRGAQGPAGPAGPPGLIGEQGISGPRGSGGARGAPGERGRTGPLGRKGEPGEPGPKGGIGNPGPRGETGDDGRDGVGSEGRRGKKGERGFPGYPGPKGNPGEPGLNGTTGPKGIRGRRGNSGPPGIVGQKGRPGYPGPAGPRGNRGDSIDQCALIQSIKDKCPCCYGPLECPVFPTELAFALDTSEGVNQDTFGRMRDVVLSIVNVLTIAESNCPTGARVAVVTYNNEVTTEIRFADSKRKSVLLDKIKNLQVALTSKQQSLETAMSFVARNTFKRVRNGFLMRKVAVFFSNTPTRASPQLREAVLKLSDAGITPLFLTRQEDRQLINALQINNTAVGHALVLPAGRDLTDFLENVLTCHVCLDICNIDPSCGFGSWRPSFRDRRAAGSDVDIDMAFILDSAETTTLFQFNEMKKYIAYLVRQLDMSPDPKASQHFARVAVVQHAPSESVDNASMPPVKVEFSLTDYGSKEKLVDFLSRGMTQLQGTRALGSAIEYTIENVFESAPNPRDLKIVVLMLTGEVPEQQLEEAQRVILQAKCKGYFFVVLGIGRKVNIKEVYTFASEPNDVFFKLVDKSTELNEEPLMRFGRLLPSFVSSENAFYLSPDIRKQCDWFQGDQPTKNLVKFGHKQVNVPNNVTSSPTSNPVTTTKPVTTTKPVTTTTKPVTTTTKPVTIINQPSVKPAAAKPAPAKPVAAKPVATKTATVRPPVAVKPATAAKPVAAKPAAVRPPAAAAKPVATKPEVPRPQAAKPAATKPATTKPVVKMLREVQVFEITENSAKLHWERPEPPGPYFYDLTVTSAHDQSLVLKQNLTVTDRVIGGLLAGQTYHVAVVCYLRSQVRATYHGSFSTKKSQPPPPQPARSASSSTINLMVSTEPLALTETDICKLPKDEGTCRDFILKWYYDPNTKSCARFWYGGCGGNENKFGSQKECEKVCAPVLAKPGVISVMGT

SEQ ID NO: 5611 - protein, 3009 aa, Homo sapiens
MRKHRHLPLVAVFCLFLSGFPTTHAQQQQADVKNGAAADIIFLVDSSWTIGEEHFQLVREFLYDVVKSLAVGENDFHFALVQFNGNPHTEFLLNTYRTKQEVLSHISNMSYIGGTNQTGKGLEYIMQSHLTKAAGSRAGDGVPQVIVVLTDGHSKDGLALPSAELKSADVNVFAIGVEDADEGALKEIASEPLNMHMFNLENFTSLHDIVGNLVSCVHSSVSPERAGDTETLKDITAQDSADIIFLIDGSNNTGSVNFAVILDFLVNLLEKLPIGTQQIRVGVVQFSDEPRTMFSLDTYSTKAQVLGAVKALGFAGGELANIGLALDFVVENHFTRAGGSRVEEGVPQVLVLISAGPSSDEIRYGVVALKQASVFSFGLGAQAASRAELQHIATDDNLVFTVPEFRSFGDLQEKLLPYIVGVAQRHIVLKPPTIVTQVIEVNKRDIVFLVDGSSALGLANFNAIRDFIAKVIQRLEIGQDLIQVAVAQYADTVRPEFYFNTHPTKREVITAVRKMKPLDGSALYTGSALDFVRNNLFTSSAGYRAAEGIPKLLVLITGGKSLDEISQPAQELKRSSIMAFAIGNKGADQAELEEIAFDSSLVFIPAEFRAAPLQGMLPGLLAPLRTLSGTPEVHSNKRDIIFLLDGSANVGKTNFPYVRDFVMNLVNSLDIGNDNIRVGLVQFSDTPVTEFSLNTYQTKSDILGHLRQLQLQGGSGLNTGSALSYVYANHFTEAGGSRIREHVPQLLLLLTAGQSEDSYLQAANALTRAGILTFCVGASQANKAELEQIAFNPSLVYLMDDFSSLPALPQQLIQPLTTYVSGGVEEVPLAQPESKRDILFLFDGSANLVGQFPVVRDFLYKIIDELNVKPEGTRIAVAQYSDDVKVESRFDEHQSKPEILNLVKRMKIKTGKALNLGYALDYAQRYIFVKSAGSRIEDGVLQFLVLLVAGRSSDRVDGPASNLKQSGVVPFIFQAKNADPAELEQIVLSPAFILAAESLPKIGDLHPQIVNLLKSVHNGAPAPVSGEKDVVFLLDGSEGVRSGFPLLKEFVQRVVESLDVGQDRVRVAVVQYSDRTRPEFYLNSYMNKQDVVNAVRQLTLLGGPTPNTGAALEFVLRNILVSSAGSRITEGVPQLLIVLTADRSGDDVRNPSVVVKRGGAVPIGIGIGNADITEMQTISFIPDFAVAIPTFRQLGTVQQVISERVTQLTREELSRLQPVLQPLPSPGVGGKRDVVFLIDGSQSAGPEFQYVRTLIERLVDYLDVGFDTTRVAVIQFSDDPKAEFLLNAHSSKDEVQNAVQRLRPKGGRQINVGNALEYVSRNIFKRPLGSRIEEGVPQFLVLISSGKSDDEVVVPAVELKQFGVAPFTIARNADQEELVKISLSPEYVFSVSTFRELPSLEQKLLTPITTLTSEQIQKLLASTRYPPPVREFRELPNIEERIMNSFGPSAATPAPPGVDTPPPSRPEKKKADIVFLLDGSINFRRDSFQEVLRFVSEIVDTVYEDGDSIQVGLVQYNSDPTDEFFLKDFSTKRQIIDAINKVVYKGGRHANTKVGLEHLRVNHFVPEAGSRLDQRVPQIAFVITGGKSVEDAQDVSLALTQRGVKVFAVGVRNIDSEEVGKIASNSATAFRVGNVQELSELSEQVLETLHDAMHETLCPGVTDAAKACNLDVILGFDGSRDQNVFVAQKGFESKVDAILNRISQMHRVSCSGGRSPTVRVSVVANTPSGPVEAFDFDEYQPEMLEKFRNMRSQHPYVLTEDTLKVYLNKFRQSSPDSVKVVIHFTDGADGDLADLHRASENLRQEGVRALILVGLERVVNLERLMHLEFGRGFMYDRPLRLNLLDLDYELAEQLDNIAEKACCGVPCKCSGQRGDRGPIGSIGPKGIPGEDGYRGYPGDEGGPGERGPPGVNGTQGFQGCPGQRGVKGSRGFPGEKGEVGEIGLDGLDGEDGDKGLPGSSGEKGNPGRRGDKGPRGEKGERGDVGIRGDPGNPGQDSQERGPKGETGDLGPMGVPGRDGVPGGPGETGKNGGFGRRGPPGAKGNKGGPGQPGFEGEQGTRGAQGPAGPAGPPGLIGEQGISGPRGSGGARGAPGERGRTGPLGRKGEPGEPGPKGGIGNPGPRGETGDDGRDGVGSEGRRGKKGERGFPGYPGPKGNPGEPGLNGTTGPKGIRGRRGNSGPPGIVGQKGRPGYPGPAGPRGNRGDSIDQCALIQSIKDKCPCCYGPLECPVFPTELAFALDTSEGVNQDTFGRMRDVVLSIVNVLTIAESNCPTGARVAVVTYNNEVTTEIRFADSKRKSVLLDKIKNLQVALTSKQQSLETAMSFVARNTFKRVRNGFLMRKVAVFFSNTPTRASPQLREAVLKLSDAGITPLFLTRQEDRQLINALQINNTAVGHALVLPAGRDLTDFLENVLTCHVCLDICNIDPSCGFGSWRPSFRDRRAAGSDVDIDMAFILDSAETTTLFQFNEMKKYIAYLVRQLDMSPDPKASQHFARVAVVQHAPSESVDNASMPPVKVEFSLTDYGSKEKLVDFLSRGMTQLQGTRALGSAIEYTIENVFESAPNPRDLKIVVLMLTGEVPEQQLEEAQRVILQAKCKGYFFVVLGIGRKVNIKEVYTFASEPNDVFFKLVDKSTELNEEPLMRFGRLLPSFVSSENAFYLSPDIRKQCDWFQGDQPTKNLVKFGHKQVNVPNNVTSSPTSNPVTTTKPVTTTKPVTTTTKPVTTTTKPVTIINQPSVKPAAAKPAPAKPVAAKPVATKTATVRPPVAVKPATAAKPVAAKPAAVRPPAAAAKPVATKPEVPRPQAAKPAATKPATTKPVVKMLREVQVFEITENSAKLHWERPEPPGPYFYDLTVTSAHDQSLVLKQNLTVTDRVIGGLLAGQTYHVAVVCYLRSQVRATYHGSFSTKKSQPPPPQPARSASSSTINLMVSTEPLALTETDICKLPKDEGTCRDFILKWYYDPNTKSCARFWYGGCGGNENKFGSQKECEKVCAPVLAKPGVISVMGT

SEQ ID NO: 5612 - protein, 569 aa, Homo sapiens
MLLLFSVILISWVSTVGGEGTLCDFPKIHHGFLYDEEDYNPFSQVPTGEVFYYSCEYNFVSPSKSFWTRITCTEEGWSPTPKCLRMCSFPFVKNGHSESSGLIHLEGDTVQIICNTGYSLQNNEKNISCVERGWSTPPICSFTKGECHVPILEANVDAQPKKESYKVGDVLKFSCRKNLIRVGSDSVQCYQFGWSPNFPTCKGQVRSCGPPPQLSNGEVKEIRKEEYGHNEVVEYDCNPNFIINGPKKIQCVDGEWTTLPTCVEQVKTCGYIPELEYGYVQPSVPPYQHGVSVEVNCRNEYAMIGNNMITCINGIWTELPMCVATHQLKRCKIAGVNIKTLLKLSGKEFNHNSRIRYRCSDIFRYRHSVCINGKWNPEVDCTEKREQFCPPPPQIPNAQNMTTTVNYQDGEKVAVLCKENYLLPEAKEIVCKDGRWQSLPRCVESTAYCGPPPSINNGDTTSFPLSVYPPGSTVTYRCQSFYKLQGSVTVTCRNKQWSEPPRCLDPCVVSEENMNKNNIQLKWRNDGKLYAKTGDAVEFQCKFPHKAMISSPPFRAICQEGKFEYPICE

SEQ ID NO: 5613 - protein, 1581 aa, Homo sapiens
AANPREADGMASSAREHLLFVRRRNPQMRYTLSPENLQSLAAQSSMPENMTLQRANSDTDLVTSESRSSLTASMYEYTLGQAQNLIIFWDIKEEVDPSDWIGLYHIDENSPANFWDSKNRGVTGTQKGQIVWRIEPGPYFMEPEIKICFKYYHGISGALRATTPCITVKNPAVMMGAEGMEGGASGNLHSRKLVSFTLSDLRAVGLKKGMFFNPDPYLKMSIQPGKKSSFPTCAHHGQERRSTIISNTTNPIWHREKYSFFALLTDVLEIEIKDKFAKSRPIIKRFLGKLTIPVQRLLERQAIGDQMLSYNLGRRLPADHVSGYLQFKVEVTSSVHEDASPEAVGTILGVNSVNGDLGSPSDDEDMPGSHHDSQVCSNGPVSEDSAADGTPKHSFRTSSTLEIDTEELTSTSSRTSPPRGRQDSLNDYLDAIEHNGHSRPGTATCSERSMGASPKLRSSFPTDTRLNAMLHIDSDEEDHEFQQDLGYPSSLEEEGGLIMFSRASRADDGSLTSQTKLEDNPVENEEASTHEAASFEDKPENLPELAESSLPAGPAPEEGEGGPEPQPSADQGSAELCGSQEVDQPTSGADTGTSDASGGSRRAVSETESLDQGSEPSQVSSETEPSDPARTESVSEASTRPEGESDLECADSSCNESVTTQLSSVDTRCSSLESARFPETPAFSSQEEEDGACAAEPTSSGPAEGSQESVCTAGSLPVVQVPSGEDEGPGAESATVPDQEELGEVWQRRGSLEGAAAAAESPPQEEGSAGEAQGTCEGATAQEEGATGGSQANGHQPLRSLPSVRQDVSRYQRVDEALPPNWEARIDSHGRIFYVDHVNRTTTWQRPTAPPAPQVLQRSNSIQQMEQLNRRYQSIRRTMTNERPEENTNAIDGAGEEADFHQASADFRRENILPHSTSRSRITLLLQSPPVKFLISPEFFTVLHSNPSAYRMFTNNTCLKHMITKVRRDTHHFERYQHNRDLVGFLNMFANKQLELPRGWEMKHDHQGKAFFVDHNSRTTTFIDPRLPLQSSRPTSALVHRQHLTRQRSHSAGEVGEDSRHAGPPVLPRPSSTFNTVSRPQYQDMVPVAYNDKIVAFLRQPNIFEILQERQPDLTRNHSLREKIQFIRTEGTPGLVRLSSDADLVMLLSLFEEEIMSYVPPHALLHPSYCQSPRGSPVSSPQNSPGTQRANARAPAPYKRDFEAKLRNFYRKLETKGYGQGPGKLKLIIRRDHLLEDAFNQIMGYSRKDLQRNKLYVTFVGEEGLDYSGPSREFFFLVSRELFNPYYGLFEYSANDTYTVQISPMSAFVDNHHEWFRFSGRILGLALIHQYLLDAFFTRPFYKALLRILCDLSDLEYLDEEFHQSLQWMKDNDIHDILDLTFTVNEEVFGQITERELKPGGANIPVTEKNKKEYIERMVKWRIERGVVQQTESLVRGFYEVVDARLVSVFDARELELVIAGTAEIDLSDWRNNTEYRGGYHDNHIVIRWFWAAVERFNNEQRLRLLQFVTGTSSIPYEGFASLRGSNGPRRFCVEKWGKITALPRAHTCFNRLDLPPYPSFSMLYEKLLTAVEETSTFGLE

SEQ ID NO: 5614 - protein, 575 aa, Homo sapiens [sequence omitted]

SEQ ID NO: 5615 - protein, 1427 aa, Homo sapiens [sequence omitted]

SEQ ID NO: 5616 - protein, 1371 aa, Homo sapiens
MHQRHPRARCPPLCVAGILACGFLLGCWGPSHFQQSCLQALEPQAVSSYLSPGAPLKGRPPSPGFQRQRQRQRRAAGGILHLELLVAVGPDVFQAHQEDTERYVLTNLNIGAELLRDPSLGAQFRVHLVKMVILTEPEGAPNITANLTSSLLSVCGWSQTINPEDDTDPGHADLVLYITRFDLELPDGNRQVRGVTQLGGACSPTWSCLITEDTGFDLGVTIAHEIGHSFGLEHDGAPGSGCGPSGHVMASDGAAPRAGLAWSPCSRRQLLSLLSAGRARCVWDPPRPQPGSAGHPPDAQPGLYYSANEQCRVAFGPKAVACTFAREHLDMCQALSCHTDPLDQSSCSRLLVPLLDGTECGVEKWCSKGRCRSLVELTPIAAVHGRWSSWGPRSPCSRSCGGGVVTRRRQCNNPRPAFGGRACVGADLQAEMCNTQACEKTQLEFMSQQCARTDGQPLRSSPGGASFYHWGAAVPHSQGDALCRHMCRAIGESFIMKRGDSFLDGTRCMPSGPREDGTLSLCVSGSCRTFGCDGRMDSQQVWDRCQVCGGDNSTCSPRKGSFTAGRAREYVTFLTVTPNLTSVYIANHRPLFTHLAVRIGGRYVVAGKMSISPNTTYPSLLEDGRVEYRVALTEDRLPRLEEIRIWGPLQEDADIQVYRRYGEEYGNLTRPDITFTYFQPKPRQAWVWAAVRGPCSVSCGAGLRWVNYSCLDQARKELVETVQCQGSQQPPAWPEACVLEPCPPYWAVGDFGPCSASCGGGLRERPVRCVEAQGSLLKTLPPARCRAGAQQPAVALETCNPQPCPARWEVSEPSSCTSAGGAGLALENETCVPGADGLEAPVTEGPGSVDEKLPAPEPCVGMSCPPGWGHLDATSAGEKAPSPWGSIRTGAQAAHVWTPVAGSCSVSCGRGLMELRFLCMDSALRVPVQEELCGLASKPGSRREVCQAVPCPARWQYKLAACSVSCGRGVVRRILYCARAHGEDDGEEILLDTQCQGLPRPEPQEACSLEPCPPRWKVMSLGPCSASCGLGTARRSVACVQLDQGQDVEVDEAACAALVRPEASVPCLIADCTYRWHVGTWMECSVSCGDGIQRRRDTCLGPQAQAPVPADFCQHLPKPVTVRGCWAGPCVGQGACGRQHLEPTGTIDMRGPGQADCAVAIGRPLGEVVTLRVLESSLNCSAGDMLLLWGRLTWRKMCRKLLDMTFSSKTNTLVVRQRCGRPGGGVLLRYGSQLAPETFYRECDMQLFGPWGEIVSPSLSPATSNAGGCRLFINVAPHARIAIHALATNMGAGTEGANASYILIRDTHSLRTTAFHGQQVLYWESESSQAEMEFSEGFLKAQASLRGQYWTLQSWVPEMQDPQSWKGKEGT

SEQ ID NO: 5617 - protein, 1340 aa, Homo sapiens
MHQRHPRARCPPLCVAGILACGFLLGCWGPSHFQQSCLQALEPQAVSSYLSPGAPLKGRPPSPGFQRQRQRQRRAAGGILHLELLVAVGPDVFQAHQEDTERYVLTNLNIGAELLRDPSLGAQFRVHLVKMVILTEPEGAPNITANLTSSLLSVCGWSQTINPEDDTDPGHADLVLYITRFDLELPDGNRQVRGVTQLGGACSPTWSCLITEDTGFDLGVTIAHEIGHSFGLEHDGAPGSGCGPSGHVMASDGAAPRAGLAWSPCSRRQLLSLLSANEQCRVAFGPKAVACTFAREHLDMCQALSCHTDPLDQSSCSRLLVPLLDGTECGVEKWCSKGRCRSLVELTPIAAVHGRWSSWGPRSPCSRSCGGGVVTRRRQCNNPRPAFGGRACVGADLQAEMCNTQACEKTQLEFMSQQCARTDGQPLRSSPGGASFYHWGAAVPHSQGDALCRHMCRAIGESFIMKRGDSFLDGTRCMPSGPREDGTLSLCVSGSCRTFGCDGRMDSQQVWDRCQVCGGDNSTCSPRKGSFTAGRAREYVTFLTVTPNLTSVYIANHRPLFTHLAVRIGGRYVVAGKMSISPNTTYPSLLEDGRVEYRVALTEDRLPRLEEIRIWGPLQEDADIQVYRRYGEEYGNLTRPDITFTYFQPKPRQAWVWAAVRGPCSVSCGAGLRWVNYSCLDQARKELVETVQCQGSQQPPAWPEACVLEPCPPYWAVGDFGPCSASCGGGLRERPVRCVEAQGSLLKTLPPARCRAGAQQPAVALETCNPQPCPARWEVSEPSSCTSAGGAGLALENETCVPGADGLEAPVTEGPGSVDEKLPAPEPCVGMSCPPGWGHLDATSAGEKAPSPWGSIRTGAQAAHVWTPAAGSCSVSCGRGLMELRFLCMDSALRVPVQEELCGLASKPGSRREVCQAVPCPARWQYKLAACSVSCGRGVVRRILYCARAHGEDDGEEILLDTQCQGLPRPEPQEACSLEPCPPRWKVMSLGPCSASCGLGTARRSVACVQLDQGQDVEVDEAACAALVRPEASVPCLIADCTYRWHVGTWMECSVSCGDGIQRRRDTCLGPQAQAPVPADFCQHLPKPVTVRGCWAGPCVGQGACGRQHLEPTGTIDMRGPGQADCAVAIGRPLGEVVTLRVLESSLNCSAGDMLLLWGRLTWRKMCRKLLDMTFSSKTNTLVVRQRCGRPGGGVLLRYGSQLAPETFYRECDMQLFGPWGEIVSPSLSPATSNAGGCRLFINVAPHARIAIHALATNMGAGTEGANASYILIRDTHSLRTTAFHGQQVLYWESESSQAEMEFSEGFLKAQASLRGQYWTLQSWVPEMQDPQSWKGKEGT

SEQ ID NO: 5618 - protein, 784 aa, Homo sapiens
MQRLMMLLATSGACLGLLAVAAVAAAGANPAQRDTHSLLPTHRRQKRDWIWNQMHIDEEKNTSLPHHVGKIKSSVSRKNAKYLLKGEYVGKVFRVDAETGDVFAIERLDRENISEYHLTAVIVDKDTGENLETPSSFTIKVHDVNDNWPVFTHRLFNASVPESSAVGTSVISVTAVDADDPTVGDHASVMYQILKGKEYFAIDNSGRIITITKSLDREKQARYEIVVEARDAQGLRGDSGTATVLVTLQDINDNFPFFTQTKYTFVVPEDTRVGTSVGSLFVEDPDEPQNRMTKYSILRGDYQDAFTIETNPAHNEGIIKPMKPLDYEYIQQYSFIVEATDPTIDLRYMSPPAGNRAQVIINITDVDEPPIFQQPFYHFQLKENQKKPLIGTVLAMDPDAARHSIGYSIRRTSDKGQFFRVTKKGDIYNEKELDREVYPWYNLTVEAKELDSTGTPTGKESIVQVHIEVLDENDNAPEFAKPYQPKVCENAVHGQLVLQISAIDKDITPRNVKFKFTLNTENNFTLTDNHDNTANITVKYGQFDREHTKVHFLPVVISDNGMPSRTGTSTLTVAVCKCNEQGEFTFCEDMAAQVGVSIQAVVAILLCILTITVITLLIFLRRRLRKQARAHGKSVPEIHEQLVTYDEEGGGEMDTTSYDVSVLNSVRRGGAKPPRPALDARPSLYAQVQKPPRHAPGAHGGPGEMAAMIEVKKDEADHDGDGPPYDTLHIYGYEGSESIAESLSSLGTDSSDSDVDYDFLNDWGPRFKMLAELYGSDPREELLY

SEQ ID NO: 5619 - protein, 420 aa, Homo sapiens
MPFSVSWGVLLLAGLCCLVPSSLVEDPQGDAAQKTDTSHHDQGDWEDLACQKISYNVTDLAFDLYKSWLIYHNQHVLVTPTSVAMAFRMLSLGTKADTRTEILEGLNVNLTETPEAKIHECFQQVLQALSRPDTRLQLTTGSSLFVNKSMKLVDTFLEDTKKLYHSEASSINFRDTEEAKEQINNYVEKRTGRKVVDLVKHLKKDTSLALVDYISFHGKWKDKFKAERIMVEGFHVDDKTIIRVPMINHLGRFDIHRDRELSSWVLAQHYVGNATAFFILPDPKKMWQLEEKLTYSHLENIQRAFDIRSINLHFPKLSISGTYKLKRVPRNLGITKIFSNEADLSGVSQEAPLKLSKAVHVAVLTIDEKGTEATGAPHLEEKAWSKYQTVMFNRPFLVIIKEYITNFPLFIGKVVNPTQK

SEQ ID NO: 5620 - protein, 120 aa, Homo sapiens
MGTNFPFWVSQLTFFKLSITGTYDLKSVLGQLGITKVFSNGADLSGVTEEAPLKLSKAVHKAVLTIDEKGTEAAGAMFLEAIPMSIPPEVKFNKPFVFLMIEQNTKSPLFMGKVVNPTQK

SEQ ID NO: 5621 - protein, 1170 aa, Homo sapiens [sequence omitted]

SEQ ID NO: 5622 - protein, 275 aa, Homo sapiens
MSSFGYRTLTVALFTLICCPGSDEKVFEVHVRPKKLAVEPKGSLEVNCSTTCNQPEVGGLETSLNKILLDEQAQWKHYLVSNISHDTVLQCHFTCSGKQESMNSNVSVYQPPRQVILTLQPTLVAVGKSFTIECRVPTVEPLDSLTLFLFRGNETLHYETFGKAAPAPQEATATFNSTADREDGHRNFSCLAVLDLMSRGGNIFHKHSAPKMLEIYEPVSDSQMVIIVTVVSVLLSLFVTSVLLCFIFGQHLRQQRMGTYGVRAAWRRLPQAFRP

SEQ ID NO: 5623 - protein, 1337 aa, Homo sapiens
MKPAAREARLPPRSPGLRWALPLLLLLLRLGQILCAGGTPSPIPDPSVATVATGENGITQISSTAESFHKQNGTGTPQVETNTSEDGESSGANDSLRTPEQGSNGTDGASQKTPSSTGPSPVFDIKAVSISPTNVILTWKSNDTAASEYKYVVKHKMENEKTITVVHQPWCNITGLRPATSYVFSITPGIGNETWGDPRVIKVITEPIPVSDLRVALTGVRKAALSWSNGNGTASCRVLLESIGSHEELTQDSRLQVNISGLKPGVQYNINPYLLQSNKTKGDPLGTEGGLDASNTERSRAGSPTAPVHDESLVGPVDPSSGQQSRDTEVLLVGLEPGTRYNATVYSQAANGTEGQPQAIEFRTNAIQVFDVTAVNISATSLTLIWKVSDNESSSNYTYKIHVAGETDSSNLNVSEPRAVIPGLRSSTFYNITVCPVLGDIEGTPGFLQVHTPPVPVSDFRVTVVSTTEIGLAWSSHDAESFQMHITQEGAGNSRVEITTNQSIIIGGLFPGTKYCFEIVPKGPNGTEGASRTVCNRTVPSAVFDIHVVYVTTTEMWLDWKSPDGASEYVYHLVIESKHGSNHTSTYDKAITLQGLIPGTLYNITISPEVDHVWGDPNSTAQYTRPSNVSNIDVSTNTTAATLSWQNFDDASPTYSYCLLIEKAGNSSNATQVVTDIGITDATVTELIPGSSYTVEIFAQVGDGIKSLEPGRKSFCTDPASMASFDCEVVPKEPALVLKWTCPPGANAGFELEVSSGAWNNATHLESCSSENGTEYRTEVTYLNFSTSYNISITTVSCGKMAAPTRNTCTTGITDPPPPDGSPNITSVSHNSVKVKFSGFEASHGPIKAYAVILTTGEAGHPSADVLKYTYDDFKKGASDTYVTYLIRTEEKGRSQSLSEVLKYEIDVGNESTTLGYYNGKLEPLGSYRACVAGFTNITFHPQNKGLIDGAESYVSFSRYSDAVSLPQDPGVICGAVFGCIFGALVIVTVGGFIFWRKKRKDAKNNEVSFSQIKPKKSKLIRVENFEAYFKKQQADSNCGFAEEYEDLKLVGISQPKYAAELAENRGKNRYNNVLPYDISRVKLSVQTHSTDDYINANYMPGYHSKKDFIATQGPLPNTLKDFWRMVWEKNVYAIIMLTKCVEQGRTKCEEYWPSKQAQDYGDITVAMTSEIVLPEWTIRDFTVKNIQTSESHPLRQFHFTSWPDHGVPDTTDLLINFRYLVRDYMKQSPPESPILVHCSAGVGRTGTFIAIDRLIYQIENENTVDVYGIVYDLRMHRPLMVQTEDQYVFLNQCVLDIVRSQKDSKVDLIYQNTTAMTIYENLAPVTTFGKTNGYIA

SEQ ID NO: 5624 - protein, 1014 aa, Homo sapiens
SSLRLWDGKLLSSDVTHYVIPDWKVVQDYLEILEFPELKGIIFMQTACQAVQHQRGRRQYNKLRNLLKDARHDCILFANEFQQCCYLPRERGESMEKWQTRSIYNAAVWYYHHCQDRMPIVMVTEDEEAIQQYGSETEGVFVITFKNYLDNFWPDLKAAHELCDSILQSRRERENESQESHGKEYPEHLPLEVLEAGIKSGRYIQGILNVNKHRAQIEAFVRLQGASSKDSDLVSDILIHGMKARNRSIHGDVVVVELLPKNEWKGRTVALCENDCDDKASGESPSEPMPTGRVVGILQKNWRDYVVTFPSKEEVQSQGKNAQKILVTPWDYRIPKIRISTQQAETLQDFRVVVRIDSWESTSVYPNGHFVRVLGRIGDLEGEIATILVENSISVIPFSEAQMCEMPVNTPESPWKVSPEEEQKRKDLRKSHLVFSIDPKGCEDVDDTLSVRTLNNGNLELGVHIADVTHFVAPNSYIDIEARTRATTYYLADRRYDMLPSVLSADLCSLLGGVDRYAVSIMWELDKASYEIKKVWYGRTIIRSAYKLFYEAAQELLDGNLSVVDDIPEFKDLDEKSRQAKLEELVWAIGKLTDIARHVRAKRDGCGALELEGVEVCVQLDDKKNIHDLIPKQPLEVHETVAECMILANHWVAKKIWESFPHQALLRQHPPPHQEFFSELRECAKAKGFFIDTRSNKTLADSLDNANDPHDPIVNRLLRSMATQAMSNALYFSTGSCAEEEFHHYGLALDKYTHFTSPIRRYSDIVVHRLLMAAISKDKKMEIKGNLFSNKDLEELCRHINNRNQAAQHSQKQSTELFQCMYFKDKDPATEERCISDGVIYSIRTNGVLLFIPRFGIKGAAYLKNKDGLVISCGPDSCSEWKPGSLQRFQNKITSTTTDGESVTFHLFDHVTVRISIQASRCHSDTIRLEIISNKPYKIPNTELIHQSSPLLKSELVKEVTKSVEEAQLAQEVKVNIIQEEYQEYRQTKGRSLYTLLEEIRDLALLDVSNNYGI

SEQ ID NO: 5625 - protein, 315 aa, Homo sapiens
TRPPERAMDALKSAGRALIRSPSLAKQSWGGGGRHRKLPENWTDTRETLLEGMLFSLKYLGMTLVEQPKGEELSAAAIKRIVATAKASGKKLQKVTLKVSPRGIILTDNLTNQLIENVSIYRISYCTADKMHDKVFAYIAQSQHNQSLECHAFLCTKRKMAQAVTLTVAQAFKVAFEFWQVSKEEKEKRDKASQEGGDVLGARQDCTPPLKSLVATGNLLDLEETAKAPLSTVSANTTNMDEVPRPQALSGSSVVWELDDGLDEAFSRLAQSRTNPQVLDTGLTAQDMHYAQCLSPVDWDKPDSSGTEQDDLFSF

SEQ ID NO: 5626 - protein, 221 aa, Homo sapiens
MLFSLKYLGMTLVEQPKGEELSAAAIKRIVATAKASGKKLQKVTLKVSPRGIILTDNLTNQLIENVSIYRISYCTADKMHDKVFAYIAQSQHNQSLECHAFLCTKRKMAQAVTLTVAQAFKVAFEFWQVSKEEKEKRDKASQEGGDVLGARQDCTPPLKSLVATGNLLDLEETAKAPLSTVSANTTNMDEVPRPQALSGSSVVWVSGCVASRSVILSLTSG

SEQ ID NO: 5627 - protein, 696 aa, Homo sapiens
PTQSTRRIATVSIAAAVAPLTLFLYRGDGGLSSRRRADAAAGALCGEVAVKPPINPFTEFMEKAVNDGSHSEELFCHLKTISEKEDLPRCTSESHLSCLKQDILNEKTELEATLKEAELVTHSVELLLPLFKDTIEKINFENANLSALNLKISEQKEILIKELDTFKSVKLALEHLLRKRDYKQTGDNLSSMLLENLTDNESENTNLKKKVFEKEAHIQELSCLFQSEKANTLKANRFSQSVKVVHERLQIQIHKREAENDKLKEYVKSLETKIAKWNLQSRMNKNEAIVMKEASRQKTVALKKASKVYKQRLDHFTGAIEKLTSQIRDQEAKLSETISASNAWKSHYEKIVIEKTELEVQIETMKKQIINLLEDLKKMEDHGKNSCEEILRKVHSIEHENETLNLENTKLKLRFPCRITESKNMNILIVLDMLCYISSEKTTLAALKDEVVSVENELSELQEVEKKQKTLIEMYKTQVQKLQEAAEIVKSRCENLLHKNNQITKTKNKNVEKMRGQMESHLKELERVCDSLTAAERRLHECQESLQCCKGKCADQEHTIRELQGQVDGNHNLLTKLSLEEENCLIQLKCENLQQKLEQMDAENKELEKKLANQEECLKHSNLKFKEKSAEYTALARQLEAALEEGRQKVAEEIEKMSSRESALQIKILDLETELRKKNEEQNQLVCKMNSDPETP

SEQ ID NO: 5628 - protein, 115 aa, Homo sapiens
MGSQVHLLSFLLLWISDTRAETTLTQSPAFMSATPGDKVNISCKASQDIDDDMNWYQQKPGEAAIFIIQEATTLVPGIPPRFSGSGYGTDFTLTINNIESEDAAYYFCLQHDNFP

SEQ ID NO: 5629 - protein, 532 aa, Homo sapiens
MAPSSPRPALPALLVLLGALFPGPGNAQTSVSPSKVILPRGGSVLVTCSTSCDQPKLLGIETPLPKKELLLPGNNRKVYELSNVQEDSQPMCYSNCPDGQSTAKTFLTVYWTPERVELAPLPSWQPVGKNLTLRCQVEGGAPRANLTVVLLRGEKELKREPAVGEPAEVTTTVLVRRDHHGANFSCRTELDLRPQGLELFENTSAPYQLQTFVLPATPPQLVSPRVLEVDTQGTVVCSLDGLFPVSEAQVHLALGDQRLNPTVTYGNDSFSAKASVSVTAEDEGTQRLTCAVILGNQSQETLQTVTIYSFPAPNVILTKPEVSEGTEVTVKCEAHPRAKVTLNGVPAQPLGPRAQLLLKATPEDNGRSFSCSATLEVAGQLIHKNQTRELRVLYGPRLDERDCPGNWTWPENSQQTPMCQAWGNPLPELKCLKDGTFPLPIGESVTVTRDLEGTYLCRARSTQGEVTREVTVNVLSPRYEIVIITVVAAAVIMGTAGLSTYLYNRQRKIKKYRLQQAQKGTPMKPNTQATPP

SEQ ID NO: 5630 - protein, 361 aa, Homo sapiens
MAGGRHRRVVGTLHLLLLVAALPWASRGVSPSASAWPEEKNYHQPAILNSSALRQIAEGTSISEMWQNDLQPLLIERYPGSPGSYAARQHIMQRIQRLQADWVLEIDTFLSQTPYGYRSFSNIISTLNPTAKRHLVLACHYDSKYFSHWNNRVFVGATDSAVPCAMMLELARALDKKLLSLKTVSDSKPDLSLQLIFFDGEEAFLHWSPQDSLYGSRHLAAKMASTPHPPGARGTSQLHGMDLLVLLDLIGAPNPTFPNFFPNSARWFERLQAIEHELHELGLLKDHSLEGRYFQNYSYGGVIQDDHIPFLRRGVPVLHLIPSPFPEVWHTMDDNEENLDESTIDNLNKILQVFVLEYLHL

SEQ ID NO: 5631 - protein, 328 aa, Homo sapiens
MGFWILAILTILMYSTAAKFSKQSWGLENEALIVRCPRQGKPSYTVDWYYSQTNKSIPTQERNRVFASGQLLKFLPAEVADSGIYTCIVRSPTFNRTGYANVTIYKKQSDCNVPDYLMYSTVSGSEKNSKIYCPTIDLYNWTAPLEWFKNCQALQGSRYRAHKSFLVIDNVMTEDAGDYTCKFIHNENGANYSVTATRSFTVKDEQGFSLFPVIGAPAQNEIKEVEIGKNANLTCSACFGKGTQFLAAVLWQLNGTKITDFGEPRIQQEEGQNQSFSNGLACLDMVLRIADVKEEDLLLQYDCLALNLHGLRRHTVRLSRKNPSKECF

SEQ ID NO: 5632 - protein, 556 aa, Homo sapiens
MGFWILAILTILMYSTAAKFSKQSWGLENEALIVRCPRQGKPSYTVDWYYSQTNKSIPTQERNRVFASGQLLKFLPAEVADSGIYTCIVRSPTFNRTGYANVTIYKKQSDCNVPDYLMYSTVSGSEKNSKIYCPTIDLYNWTAPLEWFKNCQALQGSRYRAHKSFLVIDNVMTEDAGDYTCKFIHNENGANYSVTATRSFTVKDEQGFSLFPVIGAPAQNEIKEVEIGKNANLTCSACFGKGTQFLAAVLWQLNGTKITDFGEPRIQQEEGQNQSFSNGLACLDMVLRIADVKEEDLLLQYDCLALNLHGLRRHTVRLSRKNPIDHHSIYCIIAVCSVFLMLINVLVIILKMFWIEATLLWRDIAKPYKTRNDGKLYDAYVVYPRNYKSSTDGASRVEHFVHQILPDVLENKCGYTLCIYGRDMLPGEDVVTAVETNIRKSRRHIFILTPQITHNKEFAYEQEVALHCALIQNDAKVILIEMEALSELDMLQAEALQDSLQHLMKVQGTIKWREDHIANKRSLNSKFWKHVRYQMPVPSKIPRKASSLTPLAAQKQ

SEQ ID NO: 5633 - protein, 259 aa, Homo sapiens
MGFWILAILTILMYSTAAKFSKQSWGLENEALIVRCPRQGKPSYTVDWYYSQTNKSIPTQERNRVFASGQLLKFLPAEVADSGIYTCIVRSPTFNRTGYANVTIYKKQSDCNVPDYLMYSTVSGSEKNSKIYCPTIDLYNWTAPLEWFKNCQALQGSRYRAHKSFLVIDNVMTEDAGDYTCKFIHNENGANYSVTATRSFTVKVWCQSFCKLKKSLIFSNTHWIQSLMRGFVMVYYGVHKCCRVVFNLCLQYFQHHQWP

SEQ ID NO: 5634 - protein, 271 aa, Homo sapiens
DGDATPSPPRAQPLVPVAHIRPLPTTVQAASPLPEEPPVPRPPPGFQASVPREASARVVVPIAPTCRSLESSPHSLVPMGPGREHLEEPPMAGPAAEAERVSSPAWASSPTPPSGPHPCPVPKVAPKPRLSGWTWLKKQLLEEAPEPPCPEPRQSLEPEVPTPTEQEVPAPTEQEVPALTAPRAPASRTSRMWDAVLYRMSVAEAQGRLAGPSGGEHTPASLTRLPFLYRPRFNARKLQEATRPPPTVRSILELSPQPKNFNRTATGWRLQ

SEQ ID NO: 5635 - protein, 152 aa, Homo sapiens
ELSSSCLSGRAPFKSSDCKERRSRCPRVPGDCEVLTNCHWTYLKQNRKMAANSSGQGFQNKNRVAILAELDKEKRKLLMQNQSSTNHPGASIALSRPSLNKDFRDHAEQQHIAAQQKAALQHAHAHSSGYFITQDSAFGNLILPVLPRLDPE

SEQ ID NO: 5636 - protein, 510 aa, Homo sapiens
FIVRNLCKKETNYFWLPLLHGHLQERGGAARLSGRKMKRVLVLLLAVAFGHALERGRDYEKNKVCKEFSHLGKEDFTSLSLVLYSRKFPSGTFEQVSQLVKEVVSLTEACCAEGADPDCYDTRTSALSAKSCESNSPFPVHPGTAECCTKEGLERKLCMAALKHQPQEFPTYVEPTNDEICEAFRKDPKEYANQFMWEYSTNYGQAPLSLLVSYTKSYLSMVGSCCTSASPTVCFLKERLQLKHLSLLTTLSNRVCSQYAAYGEKKSRLSNLIKLAQKVPTADLEDVLPLAEDITNILSKCCESASEDCMAKELPEHTVKLCDNLSTKNSKFEDCCQEKTAMDVFVCTYFMPAAQLPELPDVELPTNKDVCDPGNTKVMDKYTFELSRRTHLPEVFLSKVLEPTLKSLGECCDVEDSTTCFNAKGPLLKKELSSFIDKGQELCADYSENTFTEYKKKLAERLKAKLPDATPTELAKLVNKHSDFASNCCSINSPPLYCDSEIDAELKNIL

SEQ ID NO: 5637 - protein, 1091 aa, Homo sapiens
MAAGCLLALTLTLFQSLLIGPSSEEPFPSAVTIKSWVDKMQEDLVTLAKTASGVNQLVDIYEKYQDLYTVEPNNARQLVEIAARDIEKLLSNRSKALVSLALEAEKVQAAHQWREDFASNEVVYYNAKDDLDPEKNDSEPGSQRIKPVFIEDANFGRQISYQHAAVHIPTDIYEGSTIVLNELNWTSALDEVFKKNREEDPSLLWQVFGSATGLARYYPASPWVDNSRTPNKIDLYDVRRRPWYIQGAASPKDMLILVDVSGSVSGLTLKLIRTSVSEMLETLSDDDFVNVASFNSNAQDVSCFQHLVQANVRNKKVLKDAVNNITAKGITDYKKGFSFAFEQLLNYNVSRANCNKIIMLFTDGGEERAQEIFNKYNKDKKVRVFRFSVGQHNYERGPIQWMACENKGYYYEIPSIGAIRINTQEYLDVLGRPMVLAGDKAKQVQWTNVYLDALELGLVITGTLPVFNITGQFENKTNLKNQLILGVMGVDVSLEDIKRLTPRFTLCPNGYYFAIDPNGYVLLHPNLQPKNPKSQEPVTLDFLDAELENDIKVEIRNKMIDGESGEKTFRTLVKSQDERYIDKGNRTYTWTPVNGTDYSLALVLPTYSFYYIKAKLEETITQARSKKGKMKDSETLKPDNFEESGYTFIAPRDYCNDLKISDNNTEFLLNFNEFIDRKTPNNPSCNADLINRVLLDAGFTNELVQNYWSKQKNIKGVKARFVVTDGGITRVYPKEAGENWQENPETYEDSFYKRSLDNDNYVFTAPYFNKSGPGAYESGIMVSKAVEIYIQGKLLKPAVVGIKIDVNSWIENFTKTSIRDPCAGPVCDCKRNSDVMDCVILDDGGFLLMANHDDYTNQIGRFFGEIDPSLMRHLVNISVYAFNKSYDYQSVCEPGAAPKQGAGHRSAYVPSVADILQIGWWATAAAWSILQQFLLSLTFPRLLEAVEMEDDDFTASLSKQSCITEQTQYFFDNDSKSFSGVLDCGNCSRIFHGEKLMNTNLIFIMVESKGTCPCDTRLLIQAEQTSDGPNPCDMVKQPRYRKGPDVCFDNNVLEDYTDCGGVSGLNPSLWYIIGIQFLLLWLVSGSTHRLL

SEQ ID NO: 5638 - protein, 918 aa, Homo sapiens [sequence omitted]

SEQ ID NO: 5639 - protein, 329 aa, Homo sapiens [sequence omitted]

SEQ ID NO: 5640 - protein, 117 aa, Homo sapiens
MEFGLNWVFLVAIIKGAQCEVQLVESGGGLVQPGGSLRLSCPASGFTFSNHYMSWVRQAPGKGLEWVSYISGDSGYTNYADSVKGRFTISRDNANNSPYLQMNSLRAEDTAVYYCVK

SEQ ID NO: 5641 - protein, 123 aa, Homo sapiens
IGWTCKILFLVAAATGAQCEVQLVESGGGLVQPGGSLRLSCPASGFTFSNHYMSWVRQAPGKGLEWVSYISGDSGYTNYADSVKGRFTISRDNANNSPYLQMNSLRAEDTAVYYCVKHTARGS

SEQ ID NO: 5642 - protein, 117 aa, Homo sapiens
MEFGLNWVFLVAIIKGAQCEVQLVESGGGLVQPGGSLRLSCPDSGFTFSNHYMSWVRQAPGKGLEWISYISGDSGYTNYADSVKGRFTISRDNANNSPYLQMNSLRAEDTAVYYCVK

SEQ ID NO: 5643 - protein, 123 aa, Homo sapiens
IGWTCKILFLVAAATGAQCEVQLVESGGGLVQPGGSLRLSCPDSGFTFSNHYMSWVRQAPGKGLEWISYISGDSGYTNYADSVKGRFTISRDNANNSPYLQMNSLRAEDTAVYYCVKHTARGS

SEQ ID NO: 5644 - protein, 112 aa, Homo sapiens
WTCKILFLVAAATGAHFLVQLVQSGAEVKKPGASVKVSCQASGYTFTYCYLHWVRWAPGQGLEWTGFYGDSGYTNYADSVKGRFTISRDNANNSPYLQMNSLRAEDTAVYYC

SEQ ID NO: 5645 - protein, 448 aa, Homo sapiens
MDPKYFILILFCGHLNNTFFSKTETITTEKQSQPTLYTSSMSQVLANSQNTTGNPLGQPTQFSDTFSGQSISPAKVTAGQPTPAVYTSSEKPEAHTSAGQPLAYNTKQPTPIANTSSQQAVFTSARQLPSARTSTTQPPKSFVYTFTQQSSSVQIPSRKQITVHNPSTQPTSTVKNSPRSTPGFILDTTSNKQTPQKNNYNSIAAILIGVLLTSMLVAIIIIVLWKCLRKPVLNDQNWAGRSPFADGETPDICMDNIRENEISTKRTSIISLTPWKPSKSTLLADDLEIKLFESSENIEDSNNPKTEKIKDQVNGTSEDSADGSTVGTAVSSSDDADLPPPPPLLDLEGQESNQSDKPTMTIVSPLPNDSTSLPPSLDCLNQDCGDHKSEIIQSFPPLDSLNLPLPPVDFMKNQEDSNLEIQCQEFSIPPNSDQDLNESLPPPPAELL

SEQ ID NO: 5646 - protein, 401 aa, Homo sapiens
MWSGGSGKARGWEAAAGGRSSPGRLSRRRIMSMSPKHTTPFSVSDILSPLEESYKKVGMEGGGLGAPLAAYRQGQAAPPTAAMQQHAVGHHGAVTAAYHMTAAGVPQLSHSAVGGYCNGNLGNMSELPPYQDTMRNSASGPGWYGANPDPRFPAISRFMGPASGMNMSGMGGLGSLGDVSKNMAPLPSAPRRKRRVLFSQAQVYELERRFKQQKYLSAPEREHLASMIHLTPTQVKIWFQNHRYKMKRQAKDKAAQQQLQQDSGGGGGGGGTGCPQQQQAQQQSPRRVAVPVLVKDGKPCQAGAPAPGAASLQGHAQQQAQHQAQAAQAAAAAISVGSGGAGLGAHPGHQPGSAGQSPDLAHHAASPAALQGQVSSLSHLNSSGSDYGTMSCSTLLYGRTW

SEQ ID NO: 5647 - protein, 371 aa, Homo sapiens
MSMSPKHTTPFSVSDILSPLEESYKKVGMEGGGLGAPLAAYRQGQAAPPTAAMQQHAVGHHGAVTAAYHMTAAGVPQLSHSAVGGYCNGNLGNMSELPPYQDTMRNSASGPGWYGANPDPRFPAISRFMGPASGMNMSGMGGLGSLGDVSKNMAPLPSAPRRKRRVLFSQAQVYELERRFKQQKYLSAPEREHLASMIHLTPTQVKIWFQNHRYKMKRQAKDKAAQQQLQQDSGGGGGGGGTGCPQQQQAQQQSPRRVAVPVLVKDGKPCQAGAPAPGAASLQGHAQQQAQHQAQAAQAAAAAISVGSGGAGLGAHPGHQPGSAGQSPDLAHHAASPAALQGQVSSLSHLNSSGSDYGTMSCSTLLYGRTW

SEQ ID NO: 5648 - protein, 1841 aa, Homo sapiens
RGAMALQLWALTLLGLLGAGASLRPRKLDFFRSEKELNHLAVDEASGVVYLGAVNALYQLDAKLQLEQQVATGPALDNKKCTPPIEASQCHEAEMTDNVNQLLLLDPPRKRLVECGSLFKGICALRALSNISLRLFYEDGSGEKSFVASNDEGVATVGLVSSTGPGGDRVLFVGKGNGPHDNGIIVSTRLLDRTDSREAFEAYTDHATYKAGYLSTNTQQFVAAFEDGPYVFFVFNQQDKHPARNRTLLARMCREDPNYYSYLEMDLQCRDPDIHAAAFGTCLAASVAAPGSGRVLYAVFSRDSRSSGGPGAGLCLFPLDKVHAKMEANRNACYTGTREARDIFYKPFHGDIQCGGHAPGSSKSFPCGSEHLPYPLGSRDGLRGTAVLQRGGLNLTAVTVAAENNHTVAFLGTSDGRILKVYLTPDGTSSEYDSILVEINKRVKRDLVLSGDLGSLYAMTQDKVFRLPVQECLSYPTCTQCRDSQDPYCGWCVVEGRCTRKAECPRAEEASHWLWSRSKSCVAVTSAQPQNMSRRAQGEVQLTVSPLPALSEEDELLCLFGESPPHPARVEGEAVICNSPSSIPVTPPGQDHVAVTIQLLLRRGNIFLTSYQYPFYDCRQAMSLEENLPCISCVSNRWTCQWDLRYHECREASPNPEDGIVRAHMEDSCPQFLGPSPLVIPMNHETDVNFQGKNLDTVKGSSLHVGSDLLKFMEPVTMQESGTFAFRTPKLSHDANETLPLHLYVKSYGKNIDSKLHVTLYNCSFGRSDCSLCRAANPDYRCAWCGGQSRCVYEALCNTTSECPPPVITRIQPETGPLGGGIRITILGSNLGVQAGDIQRISVAGRNCSFQPERYSVSTRIVCVIEAAETPFTGGVEVDVFGKLGRSPPNVQFTFQQPKPLSVEPQQGPQAGGTTLTIHGTHLDTGSQEDVRVTLNGVPCKVTKFGAQLQCVTGPQATRGQMLLEVSYGGSPVPNPGIFFTYRENPVLRAFEPLRSFASGGRSINVTGQGFSLIQRFAMVVIAEPLQSWQPPREAESLQPMTVVGTDYVFHNDTKVVFLSPAVPEEPEAYNLTVLIEMDGHRALLRTEAGAFEYVPDPTFENFTGGVKKQVNKLIHARGTNLNKAMTLQEAEAFVGAERCTMKTLTETDLYCEPPEVQPPPKRRQKRDTTHNLPEFIVKFGSREWVLGRVEYDTRVSDVPLSLILPLVIVPMVVVIAVSVYCYWRKSQQAEREYEKIKSQLEGLEESVRDRCKKEFTDLMIEMEDQTNDVHEAGIPVLDYKTYTDRVFFLPSKDGDKDVMITGKLDIPEPRRPVVEQALYQFSNLLNSKSFLINFIHTLENQREFSARAKVYFASLLTVALHGKLEYYTDIMHTLFLELLEQYVVAKNPKLMLRRSETVVERMLSNWMSICLYQYLKDSAGEPLYKLFKAIKHQVEKGPVDAVQKKAKYTLNDTGLLGDDVEYAPLTVSVIVQDEGVDAIPVKVLNCDTISQVKEKIIDQVYRGQPCSCWPRPDSVVLEWRPGSTAQILSDLDLTSQREGRWKRVNTLMHYNVRDGATLILSKVGVSQQPEDSQQDLPGERHALLEEENRVWHLVRPTDEVDEGKSKRGSVKEKERTKAITEIYLTRLLSVKGTLQQFVDNFFQSVLAPGHAVPPAVKYFFDFLDEQAEKHNIQDEDTIHIWKTNSLPLRFWVNILKNPHFIFDVHVHEVVDASLSVIAQTFMDACTRTEHKLSRDSPSNKLLYAKEISTYKKMVEDYYKGIRQMVQVSDQDMNTHLAEISRAHTDSLNTLVALHQLYQYTQKYYDEIINALEEDPAAQKMQLAFRLQQIAAALENKVTDL

SEQ ID NO: 5649 - protein, 747 aa, Homo sapiens
MRRCNSGSGPPPSLLLLLLWLLAVPGANAAPRSALYSPSDPLTLLQADTVRGAVLGSRSAWAVEFFASWCGHCIAFAPTWKALAEDVKAWRPALYLAALDCAEETNSAVCRDFNIPGFPTVRFFKAFTKNGSGAVFPVAGADVQTLRERLIDALESHHDTWPPACPPLEPAKLEEIDGFFARNNEEYLALIFEKGGSYLGREVALDLSQHKGVAVRRVLNTEANVVRKFGVTDFPSCYLLFRNGSVSRVPVLMESRSFYTAYLQRLSGLTREAAQTTVAPTTANKIAPTVWKLADRSKIYMADLESALHYILRIEVGRFPVLEGQRLVALKKFVAVLAKYFPGRPLVQNFLHSVNEWLKRQKRNKIPYSFFKTALDDRKEGAVLAKKVNWIGCQGSEPHFRGFPCSLWVLFHFLTVQAARQNVDHSQEAAKAKEVLPAIRGYVHYFFGCRDCASHFEQMAAASMHRVGSPNAAVLWLWSSHNRVNARLAGAPSEDPQFPKVQWPPRELCSACHNERLDVPVWDVEATLNFLKAHFSPSNIILDFPAAGSAARRDVQNVAAAPELAMGALELESRNSTLDPGKPEMMKSPTNTTPHVPAEGPEASRPPKLHPGLRAAPGQEPPEHMAELQRNEQEQPLGQWHLSKRDTGAALLAESRAEKNRLWGPLEVRRVGRSSKQLVDIPEGQLEARAGRGRGQWLQVLGGGFSYLDISLCVGLYSLSFMGLLAMYTYFQAKIRALKGHAGHPAA

SEQ ID NO: 5650 - protein, 793 aa, Homo sapiens
AEDEEVQQRLRAAPSLLLLLLWLLAVPGANAAPRSALYSPSDPLTLLQADTVRGAVLGSRSAWAVEFFASWCGHSIAFAPTWKALAEDVKRWRPALYLAALDCAEETNSAVCRDFNIPGFPTVRFFKAFTKNGSGAVFPVAGADVQTLRERLIDALESHHDTWPPACPPLEPAKLEEIDGFFARNNEEYLALIFEKGGSYLGREVALDLSQHKGVAVARVVNTEANVVRKFGVTDFPSCYLLFRNGSVSRVPVLMESRSFYTAYLQRLSGLTREAAQTTVAPTTANKIAPTVWKLADRSKIYMADLESALHYILRIEVGRFPVLEGQRLGGPEKVCGSSGQVFPGRPLVQNFLHSVNEWLKRQKRNKIPYSFFKTALDDRKEGAVLAKKVNWIGCQGSEPHFRGFPCSCGSSSTSRLCRQLGSKCRPLTGSTQGQGGPPSHPRLAALLLRLPRLRKPLRADAAASMHRVGSPNAAVLWLWSSHNRVNARLQVPPARTPSSPRCSGHPVNFVLPATMNAWMCPCGTWKPPSTSSRPTSPQATSSWTSLQLGQLPEGCAECAAAPELAMGALELESRNSTLDPGKPEMMKSPTNTTPHVPAEGPEASRPPKLHPGLRAAPGQEPPEHMADVQRNEQDEPLGQWHLRSETQGLHCWLSPGLRRTASGALWRSGAWAAAPSSWSTSLRPAGGPSWTGRGQWLQVLGGGFSYLDISLCVGLYPCPSWACWHVHLLPGQDKALNRMLATLQPEPPGEEAGEGAAISRHLKPPDPIPSPPTPCSLSGLEVWEIQENELLQ

SEQ ID NO: 5651 - protein, 788 aa, Homo sapiens [sequence omitted]

SEQ ID NO: 5652 - protein, 852 aa, Homo sapiens
MLPGTSTGNNQSTITLSVASQNLTFTSSSSPPNGDSINKDPKLCTKSPRKRLSSTLQETQVPPVKKPIVEQLSAATIEGQKQGSVKKDQKVPHSGKTEGSTAGAQIPSKVSVNVSSHIGANQPLNSSALVISDSALEQQTTPSSSPDIKVKLEGSVFLLDSDSKSVGSFNPNGWQQITKDSEFISASCEQQQDISVMTIPEHSDINDLEKSVWELEGMPQDTYSQQLHSQIQESSLNQIQAHSSDQLPLQSELKEFEPSVSQTNESYFPFDDELTQDSIVEELVLMEQQMSMNNSHSYGNCLGMTLQSQSVTPGAPMSSHTSSTHFYHPIHSNGTPIHTPTPTPTPTPTPTPTPTPTSEMIAGSQSLSRESPCSRLAQTTPVDSALGSSRHTPIGTPHSNCSSSVPPSPVECRNPFAFTPISSSMAYHDASIVSSSPVKPMQRPMATHPDKTKLEWMNNGYSGVGNSSVSGHGILPSYQELVEDRFRKPHAFAVPGQSYQSQSRHHDTHFGRLTPVSPVQHQGATVNNTNKQEGFAVPAPLDNKGTNSSASSNFRCRSVSPAVHRQRNLSGSTLYPVSNIPRSNVTPFGSPVTPEVHVFTNVHTDACANNIAQRSQSVPLTVMMQTAFPNALQKQANSKKITNVLLSKLDSDNDDAVRGLGMNNLPSNYTARMNLTQILEPSTVFPSANPQNMIDSSTSVYEFQTPSYLTKSNSTGQINFSPGDNQAQSEIGEQQLDFNSTVKDLLSGDSLQTNQQLVGQGASDLTNTASDFSSDIRLSSELSGSINDLNTLDPNLLFDPGRQQGQDDEATLEELKNDPLFQQICSESMNSMTSSGFEWIESKDHPTVEMLG

SEQ ID NO: 5653 - protein, 972 aa, Homo sapiens
MGPGVLLLLLVATAWHGQGIPVIEPSVPELVVKPGATVTLRCVGNGSVEWDGPPSPHWTLYSDGSSSILSTNNATFQNTGTYRCTEPGDPLGGSAAIHLYVKDPARPWNVLAQEVVVFEDQDALLPCLLTDPVLEAGVSLVRVRGRPLMRHTNYSFSPWHGFTIHRAKFIQSQDYQCSALMGGRKVMSISIRLKVQKVIPGPPALTLVPAELVRIRGEAAQIVCSASSVDVNFDVFLQHNNTKLAIPQQSDFHNNRYQKVLTLNLDQVDFQHAGNYSCVASNVQGKHSTSMFFRVVESAYLNLSSEQNLIQEVTVGEGLNLKVMVEAYPGLQGFNWTYLGPFSDHQPEPKLANATTKDTYRHTFTLSLPRLKPSEAGRYSFLARNPGGWRALTFELTLRYPPEVSVIWTFINGSGTLLCAASGYPQPNVTWLQCSGHTDRCDEAQVLQVWDDPYPEVLSQEPFHKVTVQSLLTVETLEHNQTYECRAHNSVGSGSWAFIPISAGAHTHPPDEFLFTPVVVACMSIMALLLLLLLLLLYKYKQKPKYQVRWKIIESYEGNSYTFIDPTQLPYNEKWEFPRNNLQFGKTLGAGAFGKVVEATAFGLGKEDAVLKVAVKMLKSTAHADEKEALMSELKIMSHLGQHENIVNLLGACTHGGPVLVITEYCCYGDLLNFLRRKAEAMLGPSLSPGQDPEGGVDYKNIHLEKKYVRRDSGFSSQGVDTYVEMRPVSTSSNDSFSEQDLDKEDGRPLELRDLLHFSSQVAQGMAFLASKNCIHRDVAARNVLLTNGHVAKIGDFGLARDIMNDSNYIVKGNARLPVKWMAPESIFDCVYTVQSDVWSYGILLWEIFSLGLNPYPGILVNSKFYKLVKDGYQMAQPAFAPKNIYSIMQACWALEPTHRPTFQQICSFLQEQAQEDRRERDYTNLPSSSRSGGSGSSSSELEEESSSEHLTCCEQGDIAQPLLQPNNYQFC

SEQ ID NO: 5654 - protein, 488 aa, Homo sapiens
PHGIKEGREGADLFGRKTDFVVRFLGVQEQVKGEREERGKARGREGERGSVAGRGRRDLNGECQPIPETHRDLRTKIRHHGHHTGHELTGKSSWEDQGRAAGSTQGRKMRWLLLYYALCFSLSKASAHTVELNNMFGQIQSPGYPDSYPSDSEVTWNITVPDGFRIKLYFMHFNLESSYLCEYDYVKVETEDQVLATFCGRETTDTEQTPGQEVVLSPGSFMSITFRSDFSNEERFTGFDAHYMAVDVDECKEREDEELSCDHYCHNYIGGYYCSCRFGYILHTDNRTCRVECSDNLFTQRTGVITSPDFPNPYPKSSECLYTIELEEGFMVNLQFEDIFDIEDHPEVPCPYDYIKIKVGPKVLGPFCGEKAPEPISTQSHSVLILFHSDNSGENRGWRLSYRAAGNECPELQPPVHGKIEPSQAKYFFKDQVLVSCDTGYKVLKDNVEMDTFQIECLKDGTWSNKIPTCKKNEIDLESELKSEQVTE

SEQ ID NO: 5655 - protein, 211 aa, Homo sapiens
EYDLRRWEKWELDLDIKEVFVHPNYSKSTTDNDIALLHLAQPATLSQTIVPICLPDSGLAERELNQAGQETLVTGWGYHSSREKEAKRNRTFVLNFIKIPVVPHNECSEVMSNMVSENMLCAGILGDRQDACEGDSGGPMVASFHGTWFLVGLVSWGEGCGLLHNYGVYTSQPLPRLDPWAHQRQGSPPEELGTLATLPAGLGFCMAMDGT

SEQ ID NO: 5656 - protein, 763 aa, Homo sapiens
MNQKTILVLLILAVITIFALVCVLLVGRGGDGGEPSQLPHCPSVSPSAQPWTHPGQSQLFADLSREELTAVMRFLTQRLGPGLVDAAQARPSDNCVFSVELQLPPKAAALAHLDRGSPPPAREALAIVFFGRQPQPNVSELVVGPLPHPSYMRDVTVERHGGPLPYHRRPVLFQEYLDIDQMIFNRELPQASGLLHHCCFYKHRGRNLVTMTTAPRGLQSGDRATWFGLYYNISGAGFFLHHVGLELLVNHKALDPARWTIQKVFYQGRYYDSLAQLEAQFEAGLVNVVLIPDNGTGGSWSLKSPVPPGPAPPLQFYPQGPRFSVQGSRVASSLWTFSFGLGAFSGPRIFDVRFQGERLVYEISLQEALAIYGGNSPAAMTTRYVDGGFGMGKYTTPLTRGVDCPYLATYVDWHFLLESQAPKTIRDAFCVFEQNQGLPLRRHHSDLYSHYFGGLAETVLVVRSMSTLLNYDYVWDTVFHPSGAIEIRFYATGYISSAFLFGATGKYGNQVSEHTLGTVHTHSAHFKVDLDVAGLENWVWAEDMVFVPMAVPWSPEHQLQRLQVTRKLLEMEEQAAFLVGSATPRYLYLASNHSNKWGHPRGYRIQMLSFAGEPLPQNSSMARGFSWERYQLAVTQRKEEEPSSSSVFNQNDPWAPTVDFSDFINNETIAGKDLVAWVTAGFLHIPHAEDIPNTVTVGNGVGFFLRPYNFFDEDPSFYSADSIYFRGDQDAGACEVNPLACLPQAAACAPDLPAFSHGGFSHN

SEQ ID NO: 5657 - protein, 1445 aa, Homo sapiens
MRRLLEPCWWILFLKITSSVLHYVVCFPALTEGYVGALHENRHGSAVQIRRRKASGDPYWAYSGAYGPEHWVTSSVSCGSRHQSPIDILDQYARVGEEYQELQLDGFDNESSNKTWMKNTGKTVAILLKDDYFVSGAGLPGRFKAEKVEFHWGHSNGSAGSEHSINGRRFPVEMQIFFYNPDDFDSFQTAISENRIIGAMAIFFQVSPRDNSALDPIIHGLKGVVHHEKETFLDPFVLRDLLPASLGSYYRYTGSLTTPPCSEIVEWIVFRRPVPISYHQLEAFYSIFTTEQQDHVKSVEYLRNNFRPQQRLHDRVVSKSAVRDSWNHDMTDFLENPLGTEASKVCSSPPIHMKVQPLNQTALQVSWSQPETIYHPPIMNYMISYSWTKNEDEKEKTFTKDSDKDLKATISHVSPDSLYLFRVQAVCRNDMRSDFSQTMLFQANTTRIFQGTRIVKTGVPTASPASSADMAPISSGSSTWTSSGIPFSFVSMATGMGPSSSGSQATVASVVTSTLLAGLGFGGGGISSFPSTVWPTRLPTAASASKQAARPVLATTEALASPGPDGDSSPTKDGEGTEEGEKDEKSESEDGEREHEEDGEKDSEKKEKSGVTHAAEERNQTEPSPTPSSPNRTAEGGHQTIPGHEQDHTAVPTDQTGGRRDAGPGLDPDMVTSTQVPPTATEEQYAGSDPKRPEMPSKKPMSRGDRFSEDSRFITVNPAEKNTSGMISRPAPGRMEWIIPLIVVSALTFVCLILLIAVLVYWRGCNKIKSKGFPRRFREVPSSGERGEKGSRKCFQTAHFYVEDSSSPRVVPNESIPIIPIPDDMEAIPVKQFVKHIGELYSNNQHGFSEDFEEVQRCTADMNITAEHSNHPENKHKNRYINILAYDHSRVKLRPLPGKDSKHSDYINANYVDGYNKAKAYIATQGPLKSTFEDFWRMIWEQNTGIIVMITNLVEKGRRKCDQYWPTENSEEYGNIIVTLKSTKIHACYTVRRFSIRNTKVKKGQKGNPKGRQNERVVIQYHYTQWPDMGVPEYALPVLTFVRRSSAARMPETGPVLVHCSAGVGRTGTYIVIDSMLQQIKDKSTVNVLGFLKHIRTQRNYLVQTEEQYIFIHDALLEAILGKETEVSSNQLHSYVNSILIPGVGGKTRLEKQFKLVTQCNAKYVECFSAQKECNKEKNRNSSVVPSERARVGLAPLPGMKGTDYINASYIMGYYRSNEFIITQHPLPHTTKDFWRMIWDHNAQIIVMLPDNQSLAEDEFVYWPSREESMNCEAFTVTLISKDRLCLSNEEQIIIHDFILEATQDDYVLEVRHFQCPKWPNPDAPISSTFELINVIKEEALTRDGPTIVHDEYGAVSAGMLCALTTLSQQLENENAVDVFQVAKMINLMRPGVFTDIEQYQFIYKARLSLVSTKENGNGPMTVDKNGAVLIADESDPAESMESLV

SEQ ID NO: 5658 - protein, 402 aa, Homo sapiens
CSSKSFKLYSPKEPPNGNAFPPFHPGTMLDRDVGPTPMYPPTYLEPGIGRHTPYGNQTDYRIFELNKRLQNWTEECDNLWWDAFTTEFFEDDAMLTITFCLEDGPKRYTIGRTLIPRYFRSIFEGGATELYYVLKHPKEAFHSNFVSLDCDQGSMVTQHGKPMFTQVCVEGRLYLEFMFDDMMRIKTWHFSIRQHRELIPRSILAMHAQDPQMLDQLSKNITRCGLSNSTLNYLRLCVILEPMQELMSRHKTYSLSPRDCLKTCLFQKWQRMVAPPAEPTRQQPSKRRKRKMSGGSTMSSGGGNTNNSNSKKKSPASTFALSSQVPDVMVVGEPTLMGGEFGDEDERLITRLENTQFDAANGIDDEDSFNNSPALGANSPWNSKPPSSQESKSENPTSQASQ

SEQ ID NO: 5659 - protein, 1939 aa, Homo sapiens
MSSDSEMAIFGEAAPFLRKSERERIEAQNKPFDAKTSVFVVDPKESFVKATVQSREGGKVTAKTEAGATVTVKDDQVFPMNPPKYDKIEDMAMMTHLHEPAVLYNLKERYAAWMIYTYSGLFCVTVNPYKWLPVYNAEVVTAYRGKKRQEAPPHIFSISDNAYQFMLTDRENQSILITGESGAGKTVNTKRVIQYFATIAVTGEKKKEEVTSGKMQGTLEDQIISANPLLEAFGNAKTVRNDNSSRFGKFIRIHFGTTGKLASADIETYLLEKSRVTFQLKAERSYHIFYQIMSNKKPDLIEMLLITTNPYDYAFVSQGEITVPSIDDQEELMATDSAIEILGFTSDERVSIYKLTGAVMHYGNMKFKQKQREEQAEPDGTEVADKAAYLQNLNSADLLKALCYPRVKVGNEYVTKGQTVQQVYNAVGALAKAVYDKMFLWMVTRINQQLDTKQPRQYFIGVLDIAGFEIFDFNSLEQLCINFTNEKLQQFFNHHMFVLEQEEYKKEGIEWTFIDFGMDLAACIELIEKPMGIFSILEEECMFPKATDTSFKNKLYEQHLGKSNNFQKPKPAKGKPEAHFSLIHYAGTVDYNIAGWLDKNKDPLNETVVGLYQKSAMKTLALLFVGATGAEAEAGGGKKGGKKKGSSFQTVSALFRENLNKLMTNLRSTHPHFVRCIIPNETKTPGAMEHELVLHQLRCNGVLEGIRICRKGFPSRILYADFKQRYKVLNASAIPEGQFIDSKKASEKLLGSIDIDHTQYKFGHTKVFFKAGLLGLLEEMRDEKLAQLITRTQAMCRGFLARVEYQKMVERRESIFCIQYNVRAFMNVKHWPWMKLYFKIKPLLKSAETEKEMANMKEEFEKTKEELAKTEAKRKELEEKMVTLMQEKNDLQLQVQAEADSLADAEERCDQLIKTKIQLEAKIKEVTERAEDEEEINAELTAKKRKLEDECSELKKDIDDLELTLAKVEKEKHATENKVKNLTEEMAGLDETIAKLTKEKKALQEAHQQTLDDLQAEEDKVNTLTKAKIKLEQQVDDLEGSLEQEKKIRMDLERAKRKLEGDLKLAQESAMDIENDKQQLDEKLKKKEFEMSGLQSKIEDEQALGMQLQKKIKELQARIEELEEEIEAERASRAKAEKQRSDLSRELEEISERLEEAGGATSAQIEMNKKREAEFQKMRRDLEEATLQHEATAATLRKKHADSVAELGEQIDNLQRVKQKLEKEKSEMKMEIDDLASNMETVSKAKGNLEKMCRALEDQLSEIKTKEEEQQRLINDLTAQRARLQTESGEYSRQLDEKDTLVSQLSRGKQAFTQQIEELKRQLEEEIKAKSALAHALQSSRHDCDLLREQYEEEQEAKAELQRAMSKANSEVAQWRTKYETDAIQRTEELEEAKKKLAQRLQDAEEHVEAVNAKCASLEKTKQRLQNEVEDLMIDVERTNAACAALDKKQRNFDKILAEWKQKCEETHAELEASQKESRSLSTELFKIKNAYEESLDQLETLKRENKNLQQEISDLTEQIAEGGKRIHELEKIKKQVEQEKSELQAALEEAEASLEHEEGKILRIQLELNQVKSEVDRKIAEKDEEIDQMKRNHIRIVESMQSTLDAEIRSRNDAIRLKKKMEGDLNEMEIQLNHANRMAAEALRNYRNTQAILKDTQLHLDDALRSQEDLKEQLAMVERRANLLQAEIEELRATLEQTERSRKIAEQELLDASERVQLLHTQNTSLINTKKKLETDISQIQGEMEDIIQEARNAEEKAKKAITDAAMMAEELKKEQDTSAHLERMKKNLEQTVKDLQHRLDEAEQLALKGGKKQIQKLEARVRELEGEVESEQKRNVEAVKGLRKHERKVKELTYQTEEDRKNILRLQDLVDKLQAKVKSYKRQAEEAEEQSNVNLSKFRRIQHELEEAEERADIAESQVNKLRVKSREVHTKIISEE

SEQ ID NO: 5660 - protein, 585 aa, Homo sapiens
ELLTFKDVSVDFTQEEWGQLAPAHRNLYREVMLENYGNLVSVGPIGLPRKRDRKYDTPGKRSRYNIDLVNHSRSYTKMKTFECNICEKIFKQLIHLTEHMRIHTGEKPFRCKECGKAFSQSSSLIPHQRIHTGEKPYECKECGKTFRHPSSLTQHVRIHTGEKPYECRVCEKAFSQSIGLIQHLRTHVREKPFTCKDCGKAFFQIRHLRQHEIIHTGVKPYICNVCSKTFSHSTYLTQHQRTHTGERPYKCKECGKAFSQRIHLSIHQRVHTGVKPYECSHCGKAFRHDSSFAKHQRIHTGEKPYDCNECKECGRAFSQSASLSTHQRIHTGEKPFECEECGKAFRHRSSLNQHHRTHTGEKPYVCDKCQKAFSQNISLVQHLRTHSGEKPFTCNECGKTFRQIRHLSEHIRIHTGEKPYACTACCKTFSHRAYLTHHQRIHTGERPYKCKECGKAFRQRIHLSNHKTVHTGVKAYECNRCGKAYRHDSSFKKHQRHHTGEKPYECNECGKAFSYNSSLTQLVVHQRLHTGEKPYECSQCGKTFTWNSSFNQHVKSHTLEKSFECKECGKTFRYSSSLYKHSRFH

SEQ ID NO: 5661 - protein, 505 aa, Homo sapiens
MPQQLLITLPTEASTWVKLQHPKKAVEGAPLWEDVTKMFEGEALLSQDAEDVKTQRESLEDEVTPGLPTAESQELLTFKDISIDFTQEEWGQLAPAHQNLYREVMLENYSNLVSVGYQLSKPSVISQLEKGEEPWMAEKEGPGDPSSDLKSKIETIESTAKSTISQERLYHGIMMESFMRDDIIYSTLRKVSTYDDVLERHQETCMRDVRQAILTHKKRVQETNKFGENIIVHSNVIIEQRHHKYDTPTKRNTYKLDLINHPTSYIRTKTYECNICEKIFKQPIHLTEHMRIHTGEKPFRCKECGRAFSQSASLSTHQRIHTGEKPFECEECGKAFRHRSSLNQHHRTHTGEKPYVCDKCQKAFSQNISLVQHLRTHSGEKPFTCNECGKTFRQIRHLSEHIRIHTGEKPYACTACCKTFSHRAYLTHHQRIHTGERPYKCKECGKAFRQRIHLSNHKTVHTGVKAYECNRCGKAYRHDSSFKKHQRHHTGEKPYECNECGKAFS

SEQ ID NO: 5662 - protein, 611 aa, Homo sapiens
LTFKDVSVDFTQEEWGQLAPAHRNLYREVMLENYGNLVSVGCQLSKPGVISQLEKGEEPWLMERDISGVPSSGKCKADLKSKTKTKESALQNDISWEELHCGLMMERFTKGSSMYSTLGRISKCNKLESQQENQRMGKGQIPLMCKKTFTQERGQESNRFEKRINVKSEVMPGPIGLPRKRDRKYDTPGKRSRYNIDLVNHSRSYTKMKTFECNICEKIFKQLIHLTEHMRIHTGEKPFRCKECGKAFSQSSSLIPHQRIHTGEKPYECKECGKTFRHPSSLTQHVRIHTGEKPYECRVCEKAFSQSIGLIQHLRTHVREKPFTCKDCGKAFFQIRHLRQHEIIHTGVKPYICNVCSKTFSHSTYLTQHQRTHTGERPYKCKECGKAFSQRIHLSIHQRVHTGVKPYECSHCGKAFRHDSSFAKHQRIHTGEKPYDCNECGKAFSCSSSLIRHCKTHLRNTFSNVVIHTGEKPFRCKECGRAFSQSASLSTHQRIHTGEKPFECEECGKAFRHRSSLNQHHRTHTGEKPYVCDKCQKAFSQNISLVQHLRTHSGEKPFTCNECGKTFRQIRHLSEHIRIHTGEKPYACTACCKTFSHRAYLTHHQRIHTGE

SEQ ID NO: 5663 - protein, 526 aa, Homo sapiens
MPQQLLITLPTEASTWVKLQHPKKAVEGAPLWEDVTKMFEGEALLSQDAEDVKTQRESLEDEVTPGLPTAESQELLTFKDISIDFTQEEWGQLAPAHQNLYREVMLENYSNLVSVGYQLSKPSVISQLEKGEEPWMAEKEGPGDPSSDLKSKIETIESTAKSTISQERLYHGIMMESFMRDDIIYSTLRKVSTYDDVLERHQETCMRDVRQAILTHKKRVQETNKFGENIIVHSNVIIEQRHHKYDTPTKRNTYKLDLINHPTSYIRTKTYECNICEKIFKQPIHLTEHMRIHTGEKPFRCKECGRAFSQSASLSTHQRIHTGEKPFECEECGKAFRHRSSLNQHHRTHTGEKPYVCDKCQKAFSQNISLVQHLRTHSGEKPFTCNECGKTFRQIRHLSEHIRIHTGEKPYACTACCKTFSHRAYLTHHQRIHTGERPYKCKECGKAFRQRIHLSNHKTVHTGVKAYECNRCGKAYRHDSSFKKHQRHHTGEKPYECNECGKAFSYNSSLSRHHEIHRRNAFRNKV

SEQ ID NO: 5664 - protein, 372 aa, Homo sapiens
MARAMAAAWPLLLVALLVLSWPPPGTGDVVVQAPTQVPGFLGDSVTLPCYLQVPNMEVTHVSQLTWARHGESGSMAVFHQTQGPSYSESKRLEFVAARLGAELRNASLRMFGLRVEDEGNYTCLFVTFPQGSRSVDIWLRVLAKPQNTAEVQKVQLTGEPVPMARCVSTGGRPPAQITWHSDLGGMPNTSQVPGFLSGTVTVTSLWILVPSSQVDGKNVTCKVEHESFEKPQLLTVNLTVYYPPEVSISGYDNNWYLGQNEATLTCDARSNPEPTGYNWSTTMGPLPPFAVAQGAQLLIRPVDKPINTTLICNVTNALGARQAELTVQVKEGPPSEHSGTEHASASANGHVSYSAVSRENSSSQDPQTEGTR

SEQ ID NO: 5665 - protein, 364 aa, Homo sapiens
MARAMAAAWPLLLVALLVLSWPPPGTGDVVVQAPTQVPGFLGDSVTLPCYLQVPNMEVTHVSQLTWARHGESGSMAVFHQTQGPSYSESKRLEFVAARLGAELRNASLRMFGLRVEDEGNYTCLFVTFPQGSRSVDIWLRVLAKPQNTAEVQKVQLTGEPVPMARCVSTGGRPPAQITWHSDLGGMPNTSQVPGFLSGTVTVTSLWILVPSSQVDGKNVTCKVEHESFEKPQLLTVNLTVYYPPEVSISGYDNNWYLGQNEATLTCDARSNPEPTGYNWSTTMGPLPPFAVAQGAQLLIRPVDKPINTTLICNVTNALGARQAELTVQVKGTEHASASANGHVSYSAVSRENSSSQDPQTEGTR

SEQ ID NO: 5666 - protein, 417 aa, Homo sapiens
MARAMAAAWPLLLVALLVLSWPPPGTGDVVVQAPTQVPGFLGDSVTLPCYLQVPNMEVTHVSQLTWARHGESGSMAVFHQTQGPSYSESKRLEFVAARLGAELRNASLRMFGLRVEDEGNYTCLFVTFPQGSRSVDIWLRVLAKPQNTAEVQKVQLTGEPVPMARCVSTGGRPPAQITWHSDLGGMPNTSQVPGFLSGTVTVTSLWILVPSSQVDGKNVTCKVEHESFEKPQLLTVNLTVYYPPEVSISGYDNNWYLGQNEATLTCDARSNPEPTGYNWSTTMGPLPPFAVAQGAQLLIRPVDKPINTTLICNVTNALGARQAELTVQVKEGPPSEHSGISRNAIIFLVLGILVFLILLGIGIYFYWSKCSREVLWHCHLCPSSTEHASASANGHVSYSAVSRENSSSQDPQTEGTR

SEQ ID NO: 5667 - protein, 392 aa, Homo sapiens
MARAMAAAWPLLLVALLVLSWPPPGTGDVVVQAPTQVPGFLGDSVTLPCYLQVPNMEVTHVSQLTWARHGESGSMAVFHQTQGPSYSESKRLEFVAARLGAELRNASLRMFGLRVEDEGNYTCLFVTFPQGSRSVDIWLRVLAKPQNTAEVQKVQLTGEPVPMARCVSTGGRPPAQITWHSDLGGMPNTSQVPGFLSGTVTVTSLWILVPSSQVDGKNVTCKVEHESFEKPQLLTVNLTVYYPPEVSISGYDNNWYLGQNEATLTCDARSNPEPTGYNWSTTMGPLPPFAVAQGAQLLIRPVDKPINTTLICNVTNALGARQAELTVQVKEGPPSEHSGISRNAIIFLVLGILVFLILLGIGIYFYWSKCSREVLWHCHLCPSSEHHQSCRN

SEQ ID NO: 5668 - protein, 4834 aa, Homo sapiens
MPSESFCLAAQARLDSKWLKTDIQLAFTRDGLCGLWNEMVKDGEIVYTGTESTQNGELPPRKDDSVEPSGTKKEDLNDKEKKDEEETPAPIYRAKSILDSWVWGKQPDVNELKECLSVLVKEQQALAVQSATTTLSALRLKQRLVILERYFIALNRTVFQENVKVKWKSSGISLPPVDKKSSRPAGKGVEGLARVGSRAALSFAFAFLRRAWRSGEDADLCSELLQESLDALRALPEASLFDESTVSSVWLEVVERATRFLRSVVTGDVHGTPATKGPGSIPLQDQHLALAILLELAVQRGTLSQMLSAILLLLQLWDSGAQETDNERSAQGTSAPLLPLLQRFQSIICRKDAPHSEGDMHLLSGPLSPNESFLRYLTLPQDNELAIDLRQTAVVVMAHLDRLATPCMPPLCSSPTSHKGSLQEVIGWGLIGWKYYANVIGPIQCEGLANLGVTQIACAEKRFLILSRNGRVYTQAYNSDTLAPQLVQGLASRNIVKIAAHSDGHHYLALAATGEVYSWGCGDGGRLGHGDTVPLEEPKVISAFSGKQAGKHVVHIACGSTYSAAITAEGELYTWGRGNYGRLGHGSSEDEAIPMLVAGLKGLKVIDVACGSGDAQTLAVTENGQVWSWGDGDYGKLGRGGSDGCKTPKLIEKLQDLDVVKVRCGSQFSIALTKDGQVYSWGKGDNQRLGHGTEEHVRYPKLLEGLQGKKVIDVAAGSTHCLALTEDSEVHSWGSNDQCQHFDTLRVTKPEPAALPGLDTKHIVGIACGPAQSFAWSSCSEWSIGLRVPFVVDICSMTFEQLDLLLRQVSEGMDGSADWPPPQEKECVAVATLNLLRLQLHAAISHQVDPEFLGLGLGSILLNSLKQTVVTLASSAGVLSTVQSAAQAVLQSGWSVLLPTAEERARALSALLPCAVSGNEVNISPGRRFMIDLLVGSLMADGGLESALHAAITAEIQDIEAKKEAQKEKEIDEQEANASTFHRSRTPLDKDLINTGICESSGKQCLPLVQLIQQLLRNIASQTVARLKDVARRISSCLDFEQHSRERSASLDWLLRFQRLLISKLYPGESIGQTSDISSPELMGVGSLLKKYTALLCTHIGDILPVAASIASTSWRHFAEVAYIVEGDFTGVLLPELVVSIVLLLSKNADLMQEAGAVPLLGGLLEHLDRFNHLAPGKERDDHEELAWPGIMESFFTGQNCRNNEEVTLIRKADLENHNKDGGFWTVIDGKVYDIKDFQTQSLTGNSILAQFAGEDPVVALEAALQFEDTRESMHAFCVGQYLEPDQEIVTIPDLGSLSSPLIDTERNLGLLLGLHASYLAMSTPLSPVEIECAKWLQSSIFSGGLQTSQIHYRYNEEKDEDHCSSPGGTPASKSRLCSHRRALGDHSQAFLQAIADNNIQDHNVKDFLCQIERYCRQCHLTTPIMFPPEHPVEEVGRLLLCCLLKHEDLGHVALSLVHAGALGIEQVKHRTLPKSVVDVCRVVYQAKCSLIKTHQEQGRSYKEVCAPVIERLRFLFNELRPAVCNDLSIMSKFKLLSSLPRWRRIAQKIIRERRKKRVPKKPESMDDEEKIGNEESDLEEACILPHSPINVDKRPIAIKSPKDKWQPLLSTVTGVHKYKWLKQNVQGLYPQSPLLSTIAEFALKEEPVDVEKMRKCLLKQLERAEVRLEGIDTILKLASKNFLLPSVQYAMFCGWQRLIPEGIDIGEPLTDCLKDVDLIPPFNRMLLEVTFGKLYAWAVQNIRNVLMDASATFKELGIQPVPLQTITNENPSGPSLGTIPQARFLLVMLSMLTLQHGANNLDLLLNSGMLALTQTALRLIGPSCDNVEEDMNASAQGASATVLEETRKETAPVQLPVSGPELAAMMKIGTRVMRGVDWKWGDQDGPPPGLGRVIGELGEDGWIRVQWDTGSTNSYRMGKEGKYDLKLAELPAAAQPSAEDSDTEDDSEAEQTERNIHPTAMMFTSTINLLQTLCLSAGVHAEIMQSEATKTLCGLLRMLVESGTTDKTSSPNRLVYREQHRSWCTLGFVRSIALTPQVCGALSSPQWITLLMKVVEGHAPFTATSLQRQILAVHLLQAVLPSWDKTERARDMKCLVEKLFDFLGSLLTTCSSDVPLLRESTLRRRRVRPQASLTATHSSTLAEEVVALLRTLHSLTQWNGLINKYINSQLRSITHSFVGRPSEGAQLEDYFPDSENPEVGGLMAVLAVIGGIDGRLRLGGQVMHDEFGEGTVTRITPKGKITVQFSDMRTCRVCPLNQLKPLPAVAFNVNNLPFTEPMLSVWAQLVNLAGSKLEKHKIKKSTKQAFAGQVDLDLLRCQQLKLYILKAGRALLSHQDKLRQILSQPAVQETGTVHTDDGAVVSPDLGDMSPEGPQPPMILLQQLLASATQPSPVKAIFDKQELEAAALAVCQCLAVESTHPSSPGFEDCSSSEATTPVAVQHIHPARVKRRKQSPVPALPIVVQLMEMGFSRRNIEFALKSLTGASGNASSLPGVEALVGWLLDHSDIQVTELSDADTVSDEYSDEEVVEDVDDAAYSMSTGAVVTESQTYKKRADFLSNDDYAVYVRENIQVGMMVRCCRAYEEVCEGDVGKVIKLDRDGLHDLNVQCDWQQKGGTYWVRYIHVELIGYPPPSSSSHIKIGDKVRVKASVTTPKYKWGSVTHQSVGVVKAFSANGKDIIVDFPQQSHWTGLLSEMELVPSIHPGVTCDGCQMFPINGSRFKCRNCDDFDFCETCFKTKKHNTRHTFGRINEPGQSAVFCGRSGKQLKRCHSSQPGMLLDSWSRMVKSLNVSSSVNQASRLIDGSEPCWQSSGSQGKHWIRLEIFPDVLVHRLKMIVDPADSSYMPSLVVVSGGNSLNNLIELKTININPSDTTVPLLNDYTEYHRYIEIAIKQCRSSGIDCKIHGLILLGRIRAEEEDLAAVPFLASDNEEEEDEKGNSGSLIRKKAAGLESAATIRTKVFVWGLNDKDQLGGLKGSKIKVPSFSETLSALNVVQVAGGSKSLFAVTVEGKVYACGEATNGRLGLGISSGTVPIPRQITALSSYVVKKVAVHSGGRHATALTVDGKVFSWGEGDDGKLGHFSRMNCDKPRLIEALKTKRIRDIACGSSHSAALTSSGELYTWGLGEYGRLGHGDNTTQLKPKMVKVLLGHRVIQVACGSRDAQTLALTDEGLVFSWGDGDFGKLGRGGSEGCNIPQNIERLNGQGVCQIECGAQFSLALTKSGVVWTWGKGDYFRLGHGSDVHVRKPQVVEGLRGKKIVHVAVGALHCLAVTDSGQVYAWGDNDHGQQGNGTTTVNRKPTLVQGLEGQKITRVACGSSHSVAWTTVDVATPSVHEPVLFQTARDPLGASYLGVPSDADSSAASNKISGASNSKPNRPSLAKILLSLDGNLAKQQALSHILTALQIMYARDAVVGALMPAAMIAPVECPSFSSAAPSDASAMASPMNGEECMLAVDIEDRLSPNPWQEKREIVSSEDAVTPSAVTPSAPSASARPFIPVTDDLGAASIIAETMTKTKEDVESQNKAAGPEPQALDEFTSLLIADDTRVVVDLLKLSVCSRAGDRGRDVLSAVLSGMGTAYPQVADMLLELCVTELEDVATDSQSGRLSSQPVVVESSHPYTDDTSTSGTVKIPGAEGLRVEFDRQCSTERRHDPLTVMDGVNRIVSVRSGREWSDWSSELRIPGDELKWKFISDGSVNGWGWRFTVYPIMPAAGPKELLSDRCVLSCPSMDLVTCLLDFRLNLASNRSIVPRLAASLAACAQLSALAASHRMWALQRLRKLLTTEFGQSININRLLGENDGETRALSFTGSALAALVKGLPEALQRQFEYEDPIVRGGKQLLHSPFFKVLVALACDLELDTLPCCAETHKWAWFRRYCMASRVAVALDKRTPLPRLFLDEVAKKIRELMADSENMDVLHESHDIFKREQDEQLVQWMNRRPDDWTLSAGGSGTIYGWGHNHRGQLGGIEGAKVKVPTPCEALATLRPVQLIGGEQTLFAVTADGKLYATGYGAGGRLGIGGTESVSTPTLLESIQHVFIKKVAVNSGGKHCLALSSEGEVYSWGEAEDGKLGHGNRSPCDRPRVIESLRGIEVVDVAAGGAHSACVTAAGDLYTWGKGRYGRLGHSDSEDQLKPKLVEALQGHRVVDIACGSGDAQTLCLTDDDTVWSWGDGDYGKLGRGGSDGCKVPMKIDSLTGLGVVKVECGSQFSVALTKSGAVYTWGKGDYHRLGHGSDDHVRRPRQVQGLQGKKVIAIATGSLHCVCCTEDGEVYTWGDNDEGQLGDGTTNAIQRPRLVAALQGKKVNRVACGSAHTLAWSTSKPASAGKLPAQVPMEYNHLQEIPIIALRNRLLLLHHLSELFCPCIPMFDLEGSLDETGLGPSVGFDTLRGILISQGKEAAFRKVVQATMVRDRQHGPVVELNRIQVKRSRSKGGLAGPDGTKSVFGQMCAKMSSFGPDSLLLPHRVWKVKFVGESVDDCGGGYSESIAEICEELQNGLTPLLIVTPNGRDESGANRDCYLLSPAARAPVHSSMFRFLGVLLGIAIRTGSPLSLNLAEPVWKQLAGMSLTIADLSEVDKDFIPGLMYIRDNEATSEEFEAMSLPFTVPSASGQDIQLSSKHTHITLDNRAEYVRLAINYRLHEFDEQVAAVREGMARVVPVPLLSLFTGYELETMVCGSPDIPLHLLKSVATYKGIEPSASLIQWFWEVMESFSNTERSLFLRFVWGRTRLPRTIADFRGRDFVIQVLDKYNPPDHFLPESYTCFFLLKLPRYSCKQVLEEKLKYAIHFCKSIDTDDYARIALTGEPAADDSSDDSDNEDVDSFASDSTQDYLTGH

SEQ ID NO: 5669 - protein, 2162 aa, Homo sapiens
SDSENSNKRIIDNSSEQKPENELKNKNTSKINGEEGKPHNNEKAGEETLKNSQPPWDQIQEDKKHEEAEKRKSVDTQLQEDMIIHTSEQSTVSDHNSNDLLPQECNMDKTHTMELLPKEKFVSRPPTPKCVIDITNDTNLEKVAQENSSTFGLQTLQKMDPNVSDSKHSIANAKFLETAKKDSDQSWVSDVVKVDLTQSSVTNASSGNDHLNMEKEKYVSYISPLSAVSVMEDKLHKRSPPPETIKSKLNTSVDTHKIKSSPSPEVVKPKITHSPDSVKSKATYVNSQATGERRLANKIEHELSRCSFHPIPTRSSTLETTKSPLIIDKNEHFTVYRDPALIGSETGANHISPFLSQHPFPLHSSSHRTCLNPGTHHPALTPAPHLLAGSSSQTPLPTINTHPLTSGPHHAVHHPHLLPTVLPGVPTASLLGGHPRLESAHASSLSHLALAHQQQQQLLQHQSPHLLGQAHPSASYNQLGLYPIIWQYPNGTHAYSGLGLPSSKWVHPENAVNAEASLRRNSPSPWLHQPTPVTSADGIGLLSHIPVRPSSAEPHRPLKITAHSSPPLTKTLVDHHKEELERKAFMEPLRSVASTSAKNDLDLNRSQTGKDCHLHRHFVDPVLNQLQRPPQETGERLNKYKEEHRRILQESIDVAPFTTKIKGLEGERENYSRVASSSSSPKSHIIKQDMDVERSVSDLYKMKHSVPQSLPQSNYFTTLSNSVVNEPPRSYPSKEVSNIYGDKQSNALAAAAANPQTLTSFITSLSKPPPLIKHQPESEGLVGKIPEHLPHQIASHSVTTFRNDCRSPTHLTVSSTNTLRSMPALHRAPVFHPPIHHSLERKEGSYSSLSPPTLTPVMPVNAGGKVQESQKPPTLIPEPKDSQANFKSSSEQSLTEMWRPNNNLSKEKTEWHVEKSSGKLQAAMASVIVRPSSSTKTDSMPAMQLASKDRVSERSSAGAHKTDCLKLAEAGETGRIILPNVNSDSVHTKSEKNFQAVSQGSVPSSVMSAVNTMCNTKTDVITSAADTTSVSSWGGSEVISSLSNTILASTSSECVSSKSVSQPVAQKQECKVSTTAPVTLASSKTGSVVQPSSGFSGTTDFIHLKKHKAALAAAQYKSSNASETEPNAIKNQTLSASLPLDSTVICSTINKANSVGNGQASQTSQPNYHTKLKKAWLTRHSEEDKNTNKMENSGNSVSEIIKPCSVNLIASTSSDIQNSVDSKIIVDKYVKDDKVNRRKAKRTYESGSESGDSDESESKSEQRTKRQPKPTYKKKQNDLQKRKGEIEEDLKPNGVLSRSAKERSKLKLQSNSNTGIPRSVLKDWRKVKKLKQTGESFLQDDSCCEIGPNLQKCRECRLIRSKKGEEPAHSPVFCRFYYFRRLSFSKNGVVRIDGFSSPDQYDDEAMSLWTHENFEDDELDIETSKYILDIIGDKFCQLVTSEKTALSWVKKDAKIAWKRAVRGVREMCDACEATLFNIHWVCQKCGFVVCLDCYKAKERKSSRDKELYAWMKCVKGQPHDHKHLMPTQIIPGSVLTDLLDAMHTLREKYGIKSHCHCTNKQNLQVGNFPTMNGVSQVLQNVLNHSNKISLCMPESQQQNTPPKSEKNGGSSPESDVGTDNKLTPPESQSPLHWLADLAEQKAREEKKENKELTLENQIKEEREQDNSESPNGRTSPLVSQNNEQGSTLRDLLTTTAGKLRVGSTDAGIAFAPVYSMGAPSSKSGRTMPNILDDIIASVVENKIPPSKTSKINVKPELKEEPEESIISAVDENNKLYSDIPHSWICEKHILWLKDYKNSSNWKLFKECWKQGQPAVVSGVHKKMNISLWKAESISLDFGDHQADLLNCKDSIISNANVKEFWDGFEEVSKRQKNKSGETVVLKLKDWPSGEDFKTMMPARYEDLLKSLPLPEYCNPEGKFNLASHLPGFFVRPDLGPRLCSAYGVVAAKDHDIGTTNLHIEVSDVVNILVYVGIAKGNGILSKAGILKKFEEEDLDDILRKRLKDSSEIPGALWHIYAGKDVDKIREFLQKISKEQGLEVLPEHDPIRDQSWYVNKKLRQRLLEEYGVRTCTLIQFLGDAIVLPAGALHQVQNFHSCIQVTEDFVSPEHLVESFHLTQELRLLKEEINYDDKLQVKNILYHAVKEMVRALKIHEDEVDDMEEN

SEQ ID NO: 5670 - protein, 2210 aa, Homo sapiens
MIVMNDQVLEPQNVDPSMVQMTFLDDVVHSLLKGENIGITSRRRSRANQNVNAVHSHYTRAQANSPRPAMNSQAAVPKQNTHQQQQQRSIRPNKRKGSDSSIPDEEKMKEEKYDYISRGENPKGKNKHLMNKRRKPEEDEKKLNMKRLRTDNVSDFSESSDSENSNKRIIDNSSEQKPENELKNKNTSKINGEEGKPHNNEKAGEETLKNSQPPWDQIQEDKKHEEAEKRKSVDTQLQEDMIIHSSEQSTVSDHNSNDLLPQECNMDKAHTMELLPKEKFVSRPPTPKCVIDITNDTNLEKVAQENSSTFGLQTLQKMDPNVSDSKHSIANAKFLETAKKDSDQSWVSDVVKVDLTQSSVTNASSGNDHLNMEKEKYVSYISPLSAVSVMEDKLHKRSPPPETIKSKLNTSVDTHKIKSSPSPEVVKPKITHSPDSVKSKATYVNSQATGERRLANKIEHELSRCSFHPIPTRSSTLETTKSPLIIDKNEHFTVYRDPALIGSETGANHISPFLSQHPFPLHSSSHRTCLNPGTHHPALTPAPHLLAGSSSQTPLPTINAHPLPSGPHHAVHHPHLLPTVLPGVPTASLLGGHPRLESAHASSLSHLALAHQQQQQLLQHQSPHLLGQAHPSASYNQLGLYPIIWQYPNGTHAYSGLGLPSSKWVHPENAVNAEASLRRNSPSPWLHQPTPVTSADGIGLLSHIPVRPSSAEPHRPLKITAHSSPPLTKTLVDHHKEELERKAFMEPLRSVASTSAKNDLDLNRSQTGKDCHLHRHFVDPVLNQLQRPPQETGERLNKYKEEHRRILQESIDVAPFTTKIKGLEGERENYSRVASSSSSPKSHIIKQDMDVERSVSDLYKMKHSVPQSLPQSNYFTTLSNSVVNEPPRSYPSKEVSNIYGDKQSNALAAAAANPQTLTSFITSLSKPPPLIKHQPESEGLVGKIPEHLPHQIASHSVTTFRNDCRSPTHLTVSSTNTLRSMPALHRAPVFHPPIHHSLERKEGSYSSLSPPTLTPVMPVNAGGKVQESQKPPTLIPEPKDSQANFKSSSEQSLTEMWRPNNNLSKEKTEWHVEKSSGKLQAAMASVIVRPSSSTKTDSMPAMQLASKDRVSERSSAGAHKTDCLKLAEAGETGRIILPNVNSDSVHTKSEKNFQAVSQGSVPSSVMSAVNTMCNTKTDVITSAADTTSVSSWGGSEVISSLSNTILASTSSECVSSKSVSQPVAQKQECKVSTTAPVTLASSKTGSVVQPSSGFSGTTDFIHLKKHKAALAAAQYKSSNASETEPNAIKNQTLSASLPLDSTVICSTINKANSVGNGQASQTSQPNYHTKLKKAWLTRHSEEDKNTNKMENSGNSVSEIIKPCSVNLIASTSSDIQNSVDSKIIVDKYVKDDKVNRRKAKRTYESGSESGDSDESESKSEQRTKRQPKPTYKKKQNDLQKRKGEIEEDLKPNGVLSRSAKERSKLKLQSNSNSCHLVNGVVRIDGFSSPDQYDDEAMSLWTHENFEDDELDIETSKYILDIIGDKFCQLVTSEKTALPRVKKDAKIAWKRAVRGVREMCDACEATLFNIHWVCQKCGFVVCLDCYKAKERKSSRDKELYAWMKCVKGQPHDHKHLMPTQIIPGSVLTDLLDAMHTLREKYGIKSHCHCTNKQNLQVGNFPTMNGVSQSQQQNTPPKSEKNGGSSPESDVGTDNKLTPPESQSPLHWLADLAEQKAREEKKENKELTLENQIKEEREQDNSESPNGRTSPLVSQNNEQGSTLRDLLTTTAGKLRVGSTDAGIAFAPVYSMGAPSSKSGRTMPNILDDIIASVVENKIPPSKTSKINVKPELKEEPEESIISAVDENNKLYSDIPHSWICEKHILWLKDYKNSSNWKLFKECWKQGQPAVVSGVHKKMNISLWKAESISLDFGDHQADLLNCKDSIISNANVKEFWDGFEEVSKRQKNKSGETVVLKLKDWPSGEDFKTMMPARYEDLLKSLPLPEYCNPEGKFNLASHLPGFFVRPDLGPRLCSAYGVVAAKDHDIGTTNLHIEVSDVVNILVYVGIAKGNGILSKAGILKKFEEEDLDDILRKRLKDSSEIPGALWHIYAGKDVDKIREFLQKISKEQGLEVLPEHDPIRDQSWYVNKKLRQRLLEEYGVRTCTLIQFLGDAIVLPAGALHQVQNFHSCIQVTEDFVSPEHLVESFHLTQELRLLKEEINYDDKLQSKKW

SEQ ID NO: 5671 - protein, 171 aa, Homo sapiens
MSSKRTKTKTKKRPQRATSNVFAMFDQSQIQEFKEAFNMIDQNRDGFIDKEDLHDMLASLGKNPTDEYLDAMMNEAPGPINFTMFLTMFGEKLNGTDPEDVIRNAFACFDEEATGTIQEDYLRELLTTMGDRFTDEEVDELYREAPIDKKGNFNYIEFTRILKHGAKDKDD

SEQ ID NO: 5672 - protein, 757 aa, Homo sapiens
MVPDTACVLLLTLAALGASGQGQSPLGSDLGPQMLRELQETNAALQDVRDWLRQQVREITFLKNTVMECDACGMQQSVRTGLPSVRPLLHCAPGFCFPGVACIQTESGGRCGPCPAGFTGNGSHCTDVNECNAHPCFPRVRCINTSPGFRCEACPPGYSGPTHQGVGLAFAKANKQVCTDINECETGQHNCVPNSVCINTRGSFQCGPCQPGFVGDQASGCQRGAQRFCPDGSPSECHEHADCVLERDGSRSCVCRVGWAGNGILCGRDTDLDGFPDEKLRCPEPQCRKDNCVTVPNSGQEDVDRDGIGDACDPDADGDGVPNEKDNCPLVRNPDQRNTDEDKWGDACDNCRSQKNDDQKDTDQDGRGDACDDDIDGDRIRNQADNCPRVPNSDQKDSDGDGIGDACDNCPQKSNPDQADVDHDFVGDACDSDQDQDGDGHQDSRDNCPTVPNSAQEDSDHDGQGDACDDDDDNDGVPDSRDNCRLVPNPGQEDADRDGVGDVCQDDFDADKVVDKIDVCPENAEVTLTDFRAFQTVVLDPEGDAQIDPNWVVLNQGREIVQTMNSDPGLAVGYTAFNGVDFEGTFHVNTVTDDDYAGFIFGYQDSSSFYVVMWKQMEQTYWQANPFRAVAEPGIQLKAVKSSTGPGEQLRNALWHTGDTESQVRLLWKDPRNVGWKDKKSYRWFLQHRPQVGYIRVRFYEGPELVADSNVVLDTTMRGGRLGVFCFSQENIIWANLRYRCNDTIPEDYETHQLRQA

SEQ ID NO: 5673 - protein, 326 aa, Homo sapiens
MTGLCGYSAPDMRGLRLIMIPVELLLCYLLLHPVDATSYGKQTNVLMHFPLSLESQTPSSDPLSCQFLHPKSLPGFSHMAPLPKFLVSLALRNALEEAGCQADVWALQLQLYRQGGVNATQVLIQHLRGLQKGRSTERNVSVEALASALQLLAREQQSTGRVGRSLPTEDCENEKEQAVHNVVQLLPGVGTFYNLGTALYYATQNCLGKARERGRDGAIDLGYDLLMTMAGMSGGPMGLAISAALKPALRSGVQQLIQYYQDQKDANISQPETTKEGLRAISDVSDLEETTTLASFISEVVSSAPYWGWAIIKSYDLDPGAGSLEI

SEQ ID NO: 5674 - protein, 463 aa, Homo sapiens [sequence omitted]

SEQ ID NO: 5675 - protein, 436 aa, Homo sapiens
MDGKPATRKGPDFCSLRYGLALIMHFSNFTMITQRVSLSIAIIAMVNTTQQQGLSNASTEGPVADAFNNSSISIKEFDTKASVYQWSPETQGIIFSSINYGIILTLIPSGYLAGIFGAKKMLGAGLLISSLLTLFTPLAADFGVILVIMVRTVQGMAQGMAWTGQFTIWAKWAPPLERSKLTTIAGSGSAFGSFIILCVGGLISQALSWPFIFYIFGSTGCVCCLLWFTVIYDDPMHHPCISVREKEHILSSLAQQPSSPGRAVPIKAMVTCLPLWAIFLGFFSHFWLCTIILTYLPTYISTLLHVNIRDSGVLSSLPFIAAASCTILGGQLADFLLSRNLLRLITVRKLFSSLDMQVSSWESQGDLGSSQESSLPLPLDSSSVRILSLVGGMSFSCLLQSTCLAWSFTSRLDKQNFKTGPKRGPLPASEDIKLQT

SEQ ID NO: 5676 - protein, 466 aa, Homo sapiens
FCSLRYGLALIMHFSNFTMITQRVSLSIAIIAMVNTTQQQGLSNASTEGPVADAFNNSSISIKEFDTKASVYQWSPETQGIIFSSINYGIILTLIPSGYLAGIFGAKKMLGAGLLISSLLTLFTPLAADFGVILVIMVRTVQGMAQGMAWTGQFTIWAKWAPPLERSKLTTIAGSGSAFGSFIILCVGGLISQALSWPFIFYIFGSTGCVCCLLWFTVIYDDPMHHPCISVREKEHILSSLAQQPSSPGRAVPIKAMVTCLPLWAIFLGFFSHFWLCTIILTYLPTYISTLLHVNIRDSGVLSSLPFIAAASCTILGGQLADFLLSRNLLRLITVRKLFSSLGLLLPSICAVALPFVASSYVITIILLILIPGTSNLCDSGFIINTLDIAPRYASFLMGISRGFGLIAGIISSTATGFLISQDFESGWRNVFFLSAAVNMFGLVFYLTFGQAELQDWAKERTLTRL

SEQ ID NO: 5677 - protein, 791 aa, Homo sapiens
MWNMLIVAMCLALLGCLQAQELQGHVSIILLGATGDLAKKYLWQGLFQLYLDEAGRGHSFSFHGAALTAPKQGQELMAKALESLSCPKDMAPSHCAEHKDQFLQLSQYRQLKTAEDYQALNKDIEAQLQHAGLREAGRIFYFSVPPFAYEDIARNINSSCRPGPGAWLRVVLEKPFGHDHFSAQQLATELGTFFQEEEMYRVDHYLGKQAVAQILPFRDQNRKALDGLWNRHHVERVEIIMKETVDAEGRTSFYEEYGVIRDVLQNHLTEVLTLVAMELPHNVSSAEAVLRHKLQVFQALRGLQRGSAVVGQYQSYSEQVRRELQKPDSFHSLTPTFAGVLVHIDNLRWEGVPFILMSGKALDERVGYARILFKNQACCVQSEKHWAAAQSQCLPRQLVFHIGHGDLGSPAVLVSRNLFRPSLPSSWKEMEGPPGLRLFGSPLSDYYAYSPVRERDAHSVLLSHIFHGRKNFFITTENLLASWNFWTPLLESLAHKAPRLYPGGAENGRLLDFEFSSGRLFFSQQQPEQLVPGPGPAPMPSDFQVLRAKYRESPLVSAWSEELISKLANDIEATAVRAVRRFGQFHLALSGGSSPVALFQQLATAHYGFPWAHTHLWLVDERCVPLSDPESNFQGLQAHLLQHVRIPYYNIHPMPVHLQQRLCAEEDQGAQIYAREISALVANSSFDLVLLGMGADGHTASLFPQSPTGLDGEQLVVLTTSPSQPHRRMSLSLPLINRAKKVAVLVMGRMKREITTLVSRVGHEPKKWPISGVLPHSGQLVWYMDYDAFLG

SEQ ID NO: 5678 - protein, 1321 aa, Homo sapiens
MEPPGRRRGRAQPPLLLPLSLLALLALLGGGGGGGAAALPAGCKHDGRPRGAGRAAGAAEGKVVCSSLELAQVLPPDTLPNRTVTLILSNNKISELKNGSFSGLSLLERLDLRNNLISSIDPGAFWGLSSLKRLDLTNNRIGCLNADIFRGLTNLVRLNLSGNLFSSLSQGTFDYLASLRSLEFQTEYLLCDCNILWMHRWVKEKNITVRDTRCVYPKSLQAQPVTGVKQELLTCDPPLELPSFYMTPSHRQVVFEGDSLPFQCMASYIDQDMQVLWYQDGRIVETDESQGIFVEKNMIHNCSLIASALTISNIQAGSTGNWGCHVQTKRGNNTRTVDIVVLESSAQYCPPERVVNNKGDFRWPRTLAGITAYLQCTRNTHGSGIYPGNPQDERKAWRRCDRGGFWADDDYSRCQYANDVTRVLYMFNQMPLNLTNAVATARQLLAYTVEAANFSDKMDVIFVAEMIEKFGRFTKEEKSKELGDVMVDIASNIMLADERVLWLAQREAKACSRIVQCLQRIATYRLAGGAHVYSTYSPNIALEAYVIKSTGFTGMTCTVFQKVAASDRTGLSDYGRRDPEGNLDKQLSFKCNVSNTFSSLALKNTIVEASIQLPPSLFSPKQKRELRPTDDSLYKLQLIAFRNGKLFPATGNSTNLADDGKRRTVVTPVILTKIDGVNVDTHHIPVNVTLRRIAHGADAVAARWDFDLLNGQGGWKSDGCHILYSDENITTIQCYSLSNYAVLMDLTGSELYTQAASLLHPVVYTTAIILLLCLLAVIVSYIYHHSLIRISLKSWHMLVNLCFHIFLTCVVFVGGITQTRNASICQAVGIILHYSTLATVLWVGVTARNIYKQVTKKAKRCQDPDEPPPPPRPMLRFYLIGGGIPIIVCGITAAANIKNYGSRPNAPYCWMAWEPSLGAFYGPASFITFVNCMYFLSIFIQLKRHPERKYELKEPTEEQQRLAANENGEINHQDSMSLSLISTSALENEHTFHSQLLGASLTLLLYVALWMFGALAVSLYYPLDLVFSFVFGATSLSFSAFFVVHHCVNREDVRLAWIMTCCPGRSSYSVQVNVQPPNSNGTNGEAPKCPNSSAESSCTNKSASSFKNSSQGCKLTNLQAAAAQCHANSLPLNSTPQLDNSLTEHSMDNDIKMHVAPLEVQFRTNVHSSRHHKNRSKGHRASRLTVLREYAYDVPTSVEGSVQNGLPKSRLGNNEGHSRSRRAYLAYRERQYNPPQQDSSDACSTLPKSSRNFEKPVSTTSKKDALRKPAVVELENQQKSYGLNLAIQNGPIKSNGQEGPLLGTDSTGNVRTGLWKHETTV

SEQ ID NO: 5679 - protein, 1178 aa, Homo sapiens
MMRVMPCQVDLTNNRIGCLNADIFRGLTNLVRLNLSGNLFSSLSQGTFDYLASLRSLEFQTEYLLCDCNILWMHRWVKEKNITVRDTRCVYPKSLQAQPVTGVKQELLTCDPPLELPSFYMTPSHRQVVFEGDSLPFQCMASYIDQDMQVLWYQDGRIVETDESQGIFVEKNMIHNCSLIASALTISNIQAGSTGNWGCHVQTKRGNNTRTVDIVVLESSAQYCPPERVVNNKGDFRWPRTLAGITAYLQCTRNTHGSGIYPGNPQDERKAWRRCDRGGFWADDDYSRCQYANDVTRVLYMFNQMPLNLTNAVATARQLLAYTVEAANFSDKMDVIFVAEMIEKFGRFTKEEKSKELGDVMVDIASNIMLADERVLWLAQREAKACSRIVQCLQRIATYRLAGGAHVYSTYSPNIALEAYVIKSTGFTGMTCTVFQKVAASDRTGLSDYGRRDPEGNLDKQLSFKCNVSNTFSSLALKQKRELRPTDDSLYKLQLIAFRNGKLFPATGNSTNLADDGKRRTVVTPVILTKIDGVNVDTHHIPVNVTLRRIAHGADAVAARWDFDLLNGQGGWKSDGCHILYSDENITTIQCYSLSNYAVLMDLTGSELYTQAASLLHPVVYTTAIILLLCLLAVIVSYIYHHSLIRISLKSWHMLVNLCFHIFLTCVVFVGGITQTRNASICQAVGIILHYSTLATVLWVGVTARNIYKQVTKKAKRCQDPDEPPPPPRPMLRFYLIGGGIPIIVCGITAAANIKNYGSRPNAPYCWMAWEPSLGAFYGPASFITFVNCMYFLSIFIQLKRHPERKYELKEPTEEQQRLAANENGEINHQDSMSLSLISTSALENEHTFHSQLLGASLTLLLYVALWMFGALAVSLYYPLDLVFSFVFGATSLSFSAFFVVHHCVNREDVRLAWIMTCCPGRSSYSVQVNVQPPNSNGTNGEAPKCPNSSAESSCTNKSASSFKNSSQGCKLTNLQAAAAQCHANSLPLNSTPQLDNSLTEHSMDNDIKMHVAPLEVQFRTNVHSSRHHKNRSKGHRASRLTVLREYAYDVPTSVEGSVQNGLPKSRLGNNEGHSRSRRAYLAYRERQYNPPQQDSSDACSTLPKSSRNFEKPVSTTSKKDALRKPAVVELENQQKSYGLNLAIQNGPIKSNGQEGPLLGTDSTGNVRTGLWKHETTV

SEQ ID NO: 5680 - protein, 1940 aa, Homo sapiens
MSSDTEMEVFGIAAPFLRKSEKERIEAQNQPFDAKTYCFVVDSKEEYAKGKIKSSQDGKVTVETEDNRTLVVKPEDVYAMNPPKFDRIEDMAMLTHLNEPAVLYNLKDRYTSWMIYTYSGLFCVTVNPYKWLPVYNPEVVEGYRGKKRQEAPPHIFSISDNAYQFMLTDRENQSILITGESGAGKTVNTKRVIQYFATIAATGDLAKKKDSKMKGTLEDQIISANPLLEAFGNAKTVRNDNSSRFGKFIRIHFGTTGKLASADIETYLLEKSRVTFQLKAERSYHIFYQILSNKKPELIELLLITTNPYDYPFISQGEILVASIDDREELLATDSAIDILGFTPEEKSGLYKLTGAVMHYGNMKFKQKQREEQAEPDGTEVADKTAYLMGLNSSDLLKALCFPRVKVGNEYVTKGQTVDQVHHAVNALSKSVYEKLFLWMVTRINQQLDTKLPRQHFIGVLDIAGFEIFEYNSLEQLCINFTNEKLQQFFNHHMFVLEQEEYKKEGIEWTFIDFGMDLAACIELIEKPMGIFSILEEECMFPKATDTSFKNKLYDQHLGKSNNFQKPKVVKGRAEAHFSLIHYAGTVDYSVSGWLEKNKDPLNETVVGLYQKSSNRLLAHLYATFATADADSGKKKVAKKKGSSFQTVSALFRENLNKLMSNLRTTHPHFVRCIIPNETKTPGAMEHSLVLHQLRCNGVLEGIRICRKGFPNRILYGDFKQRYRVLNASAILEGQFIDSKKACEKLLASIDIDHTQYKFGHTKVFFKAGLLGTLEEMRDDRLAKLITRTQAVCRGFLMRVEFQKMVQRRESIFCIQYNIRSFMNVKHWPWMKLFFKIKPLLKSAETEKEMATMKEEFQKTKDELAKSEAKRKELEEKLVTLVQEKNDLQLQVQAESENLLDAEERCDQLIKAKFQLEAKIKEVTERAEDEEEINAELTAKKRKLEDECSELKKDIDDLELTLAKVEKEKHATENKVKNLTEELSGLDETIAKLTREKKALQEAHQQALDDLQAEEDKVNSLNKTKSKLEQQVEDLESSLEQEKKLRVDLERNKRKLEGDLKLAQESILDLENDKQQLDERLKKKDFEYCQLQSKVEDEQTLGLQFQKKIKELQARIEELEEEIEAERATRAKTEKQRSDYARELEELSERLEEAGGVTSTQIELNKKREAEFLKLRRDLEEATLQHEAMVATLRKKHADSVAELGEQIDNLQRVKQKLEKEKSEFKLEIDDLSSSMESVSKSKANLEKICRTLEDQLSEARGKNEEIQRSLSELTTQKSRLQTEAGELSRQLEEKESIVSQLSRSKQAFTQQTEELKRQLEEENKAKNALAHALQSSRHDCDLLREQYEEEQEGKAELQRALSKANSEVAQWRTKYETDAIQRTEELEEAKKKLAQRLQDSEEQVEAVNAKCASLEKTKQRLQGEVEDLMVDVERANSLAAALDKKQRNFDKVLAEWKTKCEESQAELEASLKESRSLSTELFKLKNAYEEALDQLETVKRENKNLEQEIADLTEQIAENGKTIHELEKSRKQIELEKADIQLALEEAEAALEHEEAKILRIQLELTQVKSEIDRKIAEKDEEIEQLKRNYQRTVETMQSALDAEVRSRNEAIRLKKKMEGDLNEIEIQLSHANRQAAETLKHLRSVQGQLKDTQLHLDDALRGQEDLKEQLAIVERRANLLQAEVEELRATLEQTERARKLAEQELLDSNERVQLLHTQNTSLIHTKKKLETDLMQLQSEVEDASRDARNAEEKAKKAITDAAMMAEELKKEQDTSAHLERMKKNLEQTVKDLQHRLDEAEQLALKGGKKQIQKLETRIRELEFELEGEQKKNTESVKGLRKYERRVKELTYQSEEDRKNVLRLQDLVDKLQVKVKSYKRQAEEADEQANAHLTKFRKAQHELEEAEERADIAESQVNKLRAKTRDFTSSRMVVHESEE

SEQ ID NO: 5681 - protein, 1937 aa, Homo sapiens
MSASSDAEMAVFGEAAPYLRKSEKERIEAQNKPFDAKTSVFVAEPKESYVKSTIQSKEGGKVTVKTEGGATLTVREDQVFPMNPPKYDKIEDMAMMTHLHEPGVLYNLKERYAAWMIYTYSGLFCVTVNPYKWLPVYKPEVVAAYRGKKRQEAPPHIFSISDNAYQFMLTDRENQSILITGESGAGKTVNTKRVIQYFATIAVTGEKKKDESGKMQGTLEDQIISANPLLEAFGNAKTVRNDNSSRFGKFIRIHFGTTGKLASADIETYLLEKSRVTFQLKAERSYHIFYQITSNKKPDLIEMLLITTNPYDYAFVSQGEITVPSIDDQEELMATDSAIDILGFTPEEKVSIYKLTGAVMHYGNMKFKQKQREEQAEPDGTEVADKAAYLQSLNSADLLKALCYPRVKVGNEYVTKGQTVQQVYNAVGALAKAVYEKMFLWMVTRINQQLDTKQPRQYFIGVLDIAGFEIFDFNSLEQLCINFTNEKLQQFFNHHMFVLEQEEYKKEGIEWTFIDFGMDLAACIELIEKPLGIFSILEEECMFPKATDTSFKNKLYDQHLGKSANFQKPKVVKGKAEAHFSLIHYAGTVDYNITGWLDKNKDPLNDTVVGLYQKSAMKTLASLFSTYASAEADSSAKKGAKKKGSSFQTVSALFRENLNKLMTNLRSTHPHFVRCIIPNETKTPGAMEHELVLHQLRCNGVLEGIRICRKGFPSRILYGDFKQRYKVLNASAIPEGQFIDSKKASEKLLASIDIDHTQYKFGHTKVFFKAGLLGLLEEMRDEKLAQIITRTQAVCRGFLMRVEYQKMLQRREALFCIQYNVRAFMNVKHWPWMKLFFKIKPLLKSAETEKEMATMKEEFQKTKDELAKSEAKRKELEEKMVTLLKEKNDLQLQVQSEADSLADAEERCEQLIKNKIQLEAKIKEVTERAEEEEEINAELTAKKRKLEDECSELKKDIDDLELTLAKVEKEKHATENKVKNLTEEMAGLDETIAKLSKEKKALQETHQQTLDDLQAEEDKVNILTKAKTKLEQQVDDLEGSLEQEKKLRMDLERAKRKLEGDLKLAQESTMDMENDKQQLDEKLEKKEFEISNLISKIEDEQAVEIQLQKKIKELQARIEELGEEIEAERASRAKAEKQRSDLSRELEEISERLEEAGGATSAQVELNKKREAEFQKLRRDLEEATLQHEAMVAALRKKHADSMAELGEQIDNLQRVKQKLEKEKSELKMETDDLSSNAEAISKAKGNLEKMCRSLEDQVSELKTKEEEQQRLINDLTAQRARLQTEAGEYSRQLDEKDALVSQLSRSKQASTQQIEELKHQLEEETKAKNALAHALQSSRHDCDLLREQYEEEQEGKAELQRALSKANSEVAQWRTKYETDAIQRTEELEEAKKKLAQRLQEAEEHVEAVNAKCASLEKTKQRLQNEVEDLMLDVERSNAACAALDKKQRNFDKVLSEWKQKYEETQAELEASQKESRSLSTELFKVKNVYEESLDQLETLRRENKNLQQEISDLTEQIAEGGKQIHELEKIKKQVEQEKCEIQAALEEAEASLEHEEGKILRIQLELNQVKSEVDRKIAEKDEEIDQLKRNHTRVVETMQSTLDAEIRSRNDALRVKKKMEGDLNEMEIQLNHANRLAAESLRNYRNTQGILKETQLHLDDALRGQEDLKEQLAIVERRANLLQAEIEELWATLEQTERSRKIAEQELLDASERVQLLHTQNTSLINTKKKLENDVSQLQSEVEEVIQESRNAEEKAKKAITDAAMMAEELKKEQDTSAHLERMKKNLEQTVKDLQHRLDEAEQLALKGGKKQIQKLEARVRELEGEVENEQKRNAEAVKGLRKHERRVKELTYQTEEDRKNVLRLQDLVDKLQAKVKSYKRQAEEAEEQSNANLSKFRKLQHELEEAEERADIAESQVNKLRVKSREVHTKISAE

SEQ ID NO: 5682 - protein, 1935 aa, Homo sapiens
MGDSEMAVFGAAAPYLRKSEKERLEAQTRPFDLKKDVFVPDDKQEFVKAKIVSREGGKVTAETEYGKTVTVKEDQVMQQNPPKFDKIEDMAMLTFLHEPAVLYNLKDRYGSWMIYTYSGLFCVTVNPYKWLPVYTPEVVAAYRGKKRSEAPPHIFSISDNAYQYMLTDRENQSILITGESGAGKTVNTKRVIQYFAVIAAIGDRSKKDQSPGKGTLEDQIIQANPALEAFGNAKTVRNDNSSRFGKFIRIHFGATGKLASADIETYLLEKSRVIFQLKAERDYHIFYQILSNKKPELLDMLLITNNPYDYAFISQGETTVASIDDAEELMATDNAFDVLGFTSEEKNSMYKLTGAIMHFGNMKFKLKQREEQAEPDGTEEADKSAYLMGLNSADLLKGLCHPRVKVGNEYVTKGQNVQQVIYATGALAKAVYERMFNWMVTRINATLETKQPRQYFIGVLDIAGFEIFDFNSFEQLCINFTNEKLQQFFNHHMFVLEQEEYKKEGIEWTFIDFGMDLQACIDLIEKPMGIMSILEEECMFPKATDMTFKAKLFDNHLGKSANFQKPRNIKGKPEAHFSLIHYAGIVDYNIIGWLQKNKDPLNETVVGLYQKSSLKLLSTLFANYAGADAPIEKGKGKAKKGSSFQTVSALHRENLNKLMTNLRSTHPHFVRCIIPNETKSPGVMDNPLVMHQLRCNGVLEGIRICRKGFPNRILYGDFRQRYRILNPAAIPEGQFIDSRKGAEKLLSSLDIDHNQYKFGHTKVFFKAGLLGLLEEMRDERLSRIITRIQAQSRGVLARMEYKKLLERRDSLLVIQWNIRAFMGVKNWPWMKLYFKIKPLLKSAEREKEMASMKEEFTRLKEALEKSEARRKELEEKMVSLLQEKNDLQLQVQAEQDNLADAEERCDQLIKNKIQLEAKVKEMNERLEDEEEMNAELTAKKRKLEDECSELKRDIDDLELTLAKVEKEKHATENKVKNLTEEMAGLDEIIAKLTKEKKALQEAHQQALDDLQAEEDKVNTLTKAKVKLEQQVDDLEGSLEQEKKVRMDLERAKRKLEGDLKLTQESIMDLENDKQQLDERLKKKDFELNALNARIEDEQALGSQLQKKLKELQARIEELEEELESERTARAKVEKLRSDLSRELEEISERLEEAGGATSVQIEMNKKREAEFQKMRRDLEEATLQHEATAAALRKKHADSVAELGEQIDNLQRVKQKLEKEKSEFKLELDDVTSNMEQIIKAKANLEKMCRTLEDQMNEHRSKAEETQRSVNDLTSQRAKLQTENGELSRQLDEKEALISQLTRGKLTYTQQLEDLKRQLEEEVKAKNALAHALQSARHDCDLLREQYEEETEAKAELQRVLSKANSEVAQWRTKYETDAIQRTEELEEAKKKLAQRLQEAEEAVEAVNAKCSSLEKTKHRLQNEIEDLMVDVERSNAAAAALDKKQRNFDKILAEWKQKYEESQSELESSQKEARSLSTELFKLKNAYEESLEHLETFKRENKNLQEEISDLTEQLGSSGKTIHELEKVRKQLEAEKMELQSALEEAEASLEHEEGKILRAQLEFNQIKAEIERKLAEKDEEMEQAKRNHLRVVDSLQTSLDAETRSRNEALRVKKKMEGDLNEMEIQLSHANRMAAEAQKQVKSLQSLLKDTQIQLDDAVRANDDLKENIAIVERRNNLLQAELEELRAVVEQTERSRKLAEQELIETSERVQLLHSQNTSLINQKKKMDADLSQLQTEVEEAVQECRNAEEKAKKAITDAAMMAEELKKEQDTSAHLERMKKNMEQTIKDLQHRLDEAEQIALKGGKKQLQKLEARVRELENELEAEQKRNAESVKGMRKSERRIKELTYQTEEDRKNLLRLQDLVDKLQLKVKAYKRQAEEAEEQANTNLSKFRKVQHELDEAEERADIAESQVNKLRAKSRDIGTKGLNEE

SEQ ID NO: 5683 - protein, 1939 aa, Homo sapiens
MTDAQMADFGAAAQYLRKSEKERLEAQTRPFDIRTECFVPDDKEEFVKAKILSREGGKVIAETENGKTVTVKEDQVLQQNPPKFDKIQDMAMLTFLHEPAVLFNLKERYAAWMIYTYSGLFCVTVNPYKWLPVYNAEVVAAYRGKKRSEAPPHIFSISDNAYQYMLTDRENQSILITGESGAGKTVNTKRVIQYFASIAAIGDRGKKDNANANKGTLEDQIIQANPALEAFGNAKTVRNDNSSRFGKFIRIHFGATGKLASADIETYLLEKSRVIFQLKAERNYHIFYQILSNKKPELLDMLLVTNNPYDYAFVSQGEVSVASIDDSEELMATDSAFDVLGFTSEEKAGVYKLTGAIMHYGNMKFKQKQREEQAEPDGTEDADKSAYLMGLNSADLLKGLCHPRVKVGNEYVTKGQSVQQVYYSIGALAKAVYEKMFNWMVTRINATLETKQPRQYFIGVLDIAGFEIFDFNSFEQLCINFTNEKLQQFFNHHMFVLEQEEYKKEGIEWTFIDFGMDLQACIDLIEKPMGIMSILEEECMFPKATDMTFKAKLYDNHLGKSNNFQKPRNIKGKQEAHFSLIHYAGTVDYNILGWLEKNKDPLNETVVALYQKSSLKLMATLFSSYATADTGDSGKSKGGKKKGSSFQTVSALHRENLNKLMTNLRTTHPHFVRCIIPNERKAPGVMDNPLVMHQLRCNGVLEGIRICRKGFPNRILYGDFRQRYRILNPVAIPEGQFIDSRKGTEKLLSSLDIDHNQYKFGHTKVFFKAGLLGLLEEMRDERLSRIITRMQAQARGQLMRIEFKKIVERRDALLVIQWNIRAFMGVKNWPWMKLYFKIKPLLKSAETEKEMATMKEEFGRIKETLEKSEARRKELEEKMVSLLQEKNDLQLQVQAEQDNLNDAEERCDQLIKNKIQLEAKVKEMNERLEDEEEMNAELTAKKRKLEDECSELKKDIDDLELTLAKVEKEKHATENKVKNLTEEMAGLDEIIAKLTKEKKALQEAHQQALDDLQVEEDKVNSLSKSKVKLEQQVDDLEGSLEQEKKVRMDLERAKRKLEGDLKLTQESIMDLENDKLQLEEKLKKKEFDINQQNSKIEDEQALALQLQKKLKENQARIEELEEELEAERTARAKVEKLRSDLSRELEEISERLEEAGGATSVQIEMNKKREAEFQKMRRDLEEATLQHEATAAALRKKHADSVAELGEQIDNLQRVKQKLEKEKSEFKLELDDVTSNMEQIIKAKANLEKVSRTLEDQANEYRVKLEEAQRSLNDFTTQRAKLQTENGELARQLEEKEALISQLTRGKLSYTQQMEDLKRQLEEEGKAKNALAHALQSARHDCDLLREQYEEETEAKAELQRVLSKANSEVAQWRTKYETDAIQRTEELEEAKKKLAQRLQDAEEAVEAVNAKCSSLEKTKHRLQNEIEDLMVDVERSNAAAAALDKKQRNFDKILAEWKQKYEESQSELESSQKEARSLSTELFKLKNAYEESLEHLETFKRENKNLQEEISDLTEQLGEGGKNVHELEKVRKQLEVEKLELQSALEEAEASLEHEEGKILRAQLEFNQIKAEIERKLAEKDEEMEQAKRNHQRVVDSLQTSLDAETRSRNEVLRVKKKMEGDLNEMEIQLSHANRMAAEAQKQVKSLQSLLKDTQIQLDDAVRANDDLKENIAIVERRNNLLQAELEELRAVVEQTERSRKLAEQELIETSERVQLLHSQNTSLINQKKKMEADLTQLQSEVEEAVQECRNAEEKAKKAITDAAMMAEELKKEQDTSAHLERMKKNMEQTIKDLQHRLDEAEQIALKGGKKQLQKLEARVRELEGELEAEQKRNAESVKGMRKSERRIKELTYQTEEDKKNLLRLQDLVDKLQLKVKAYKRQAEEAEEQANTNLSKFRKVQHELDEAEERADIAESQVNKLRAKSRDIGAKQKMHDEE

SEQ ID NO: 5684 - protein, 1941 aa, Homo sapiens
MSSDSELAVFGEAAPFLRKSERERIEAQNRPFDAKTSVFVAEPKESFVKGTIQSREGGKVTVKTEGGATLTVKDDQVFPMNPPKYDKIEDMAMMTHLHEPAVLYNLKERYAAWMIYTYSGLFCVTVNPYKWLPVYKPEVVTAYRGKKRQEAPPHIFSISDNAYQFMLTDRENQSILITGESGAGKTVNTKRVIQYFATIAVTGEKKKEEITSGKIQGTLEDQIISANPLLEAFGNAKTVRNDNSSRFGKFIRIHFGTTGKLASADIETYLLEKSRVVFQLKAERSYHIFYQITSNKKPELIEMLLITTNPYDYPFVSQGEISVASIDDQEELMATDSAIDILGFTNEEKVSIYKLTGAVMHYGNLKFKQKQREEQAEPDGTEVADKAAYLQSLNSADLLKALCYPRVKVGNEYVTKGQTVEQVSNAVGALAKAVYEKMFLWMVARINQQLDTKQPRQYFIGVLDIAGFEIFDFNSLEQLCINFTNEKLQQFFNHHMFVLEQEEYKKEGIEWTFIDFGMDLAACIELIEKPMGIFSILEEECMFPKATDTSFKNKLYDQHLGKSANFQKPKVVKGKAEAHFALIHYAGVVDYNITGWLEKNKDPLNETVVGLYQKSAMKTLAQLFSGAQTAEGEGAGGGAKKGGKKKGSSFQTVSALFRENLNKLMTNLRSTHPHFVRCIIPNETKTPGAMEHELVLHQLRCNGVLEGIRICRKGFPSRILYADFKQRYKVLNASAIPEGQFIDSKKASEKLLASIDIDHTQYKFGHTKVFFKAGLLGLLEEMRDDKLAQLITRTQARCRGFLARVEYQRMVERREAIFCIQYNIRSFMNVKHWPWMKLFFKIKPLLKSAETEKEMATMKEEFQKIKDELAKSEAKRKELEEKMVTLLKEKNDLQLQVQAEAEGLADAEERCDQLIKTKIQLEAKIKEVTERAEDEEEINAELTAKKRKLEDECSELKKDIDDLELTLAKVEKEKHATENKVKNLTEEMAGLDETIAKLTKEKKALQEAHQQTLDDLQAEEDKVNTLTKAKIKLEQQVDDLEGSLEQEKKLRMDLERAKRKLEGDLKLAQESIMDIENEKQQLDEKLKKKEFEISNLQSKIEDEQALGIQLQKKIKELQARIEELEEEIEAERASRAKAEKQRSDLSRELEEISERLEEAGGATSAQIEMNKKREAEFQKMRRDLEEATLQHEATAATLRKKHADSVAELGEQIDNLQRVKQKLEKEKSEMKMEIDDLASNVETVSKAKGNLEKMCRTLEDQLSELKSKEEEQQRLINDLTAQRGRLQTESGEFSRQLDEKEALVSQLSRGKQAFTQQIEELKRQLEEEIKAKNALAHALQSSRHDCDLLREQYEEEQESKAELQRALSKANTEVAQWRTKYETDAIQRTEELEEAKKKLAQRLQAAEEHVEAVNAKCASLEKTKQRLQNEVEDLMLDVERTNAACAALDKKQRNFDKILAEWKQKCEETHAELEASQKEARSLGTELFKIKNAYEESLDQLETLKRENKNLQQEISDLTEQIAEGGKRIHELEKIKKQVEQEKCELQAALEEAEASLEHEEGKILRIQLELNQVKSEVDRKIAEKDEEIDQLKRNHIRIVESMQSTLDAEIRSRNDAIRLKKKMEGDLNEMEIQLNHANRMAAEALRNYRNTQGILKDTQIHLDDALRSQEDLKEQLAMVERRANLLQAEIEELRATLEQTERSRKIAEQELLDASERVQLLHTQNTSLINTKKKLETDISQMQGEMEDILQEARNAEEKAKKAITDAAMMAEELKKEQDTSAHLERMKKNMEQTVKDLQLRLDEAEQLALKGGKKQIQKLEARVRELEGEVESEQKRNAEAVKGLRKHERRVKELTYQTEEDRKNILRLQDLVDKLQAKVKSYKRQAEEAEEQSNTNLAKFRKLQHELEEAEERADIAESQVNKLRVKSREVHTKVISEE

SEQ ID NO: 5685 - protein, 1939 aa, Homo sapiens
MSSDSEMAIFGEAAPFLRKSEKERIEAQNKPFDAKTSVFVVDPKESYVKAIVQSREGGKVTAKTEAGATVTVKEDQVFSMNPPKYDKIEDMAMMTHLHEPAVLYNLKERYAAWMIYTYSGLFCVTVNPYKWLPVYNPEVVTAYRGKKRQEAPPHIFSISDNAYQFMLTDRENQSILITGESGAGKTVNTKRVIQYFATIAVTGEKKKEEPASGKMQGTLEDQIISANPLLEAFGNAKTVRNDNSSRFGKFIRIHFGATGKLASADIETYLLEKSRVTFQLKAERSYHIFYQILSNKKPELIEMLLITTNPYDFAFVSQGEITVPSIDDQEELMATDSAVDILGFTADEKVAIYKLTGAVMHYGNMKFKQKQREEQAEPDGTEVADKAAYLTSLNSADLLKSLCYPRVKVGNEFVTKGQTVQQVYNAVGALAKAIYEKMFLWMVTRINQQLDTKQPRQYFIGVLDIAGFEIFDFNSLEQLCINFTNEKLQQFFNHHMFVLEQEEYKKEGIEWEFIDFGMDLAACIELIEKPMGIFSILEEECMFPKATDTSFKNKLYEQHLGKSNNFQKPKPAKGKPEAHFSLVHYAGTVDYNIAGWLDKNKDPLNETVVGLYQKSAMKTLAFLFSGAQTAEAEGGGGKKGGKKKGSSFQTVSALFRENLNKLMTNLRSTHPHFVRCIIPNETKTPGAMEHELVLHQLRCNGVLEGIRICRKGFPSRILYADFKQRYKVLNASAIPEGQFIDSKKASEKLLGSIEIDHTQYKFGHTKVFFKAGLLGTLEEMRDEKLAQLITRTQAICRGFLMRVEFRKMMERRESIFCIQYNIRAFMNVKHWPWMKLYFKIKPLLKSAETEKEMANMKEEFEKTKEELAKTEAKRKELEEKMVTLMQEKNDLQLQVQAEADALADAEERCDQLIKTKIQLEAKIKEVTERAEDEEEINAELTAKKRKLEDECSELKKDIDDLELTLAKVEKEKHATENKVKNLTEEMAGLDETIAKLTKEKKALQEAHQQTLDDLQMEEDKVNTLTKAKTKLEQQVDDLEGSLEQEKKLCMDLERAKRKLEGDLKLAQESTMDTENDKQQLNEKLKKKEFEMSNLQGKIEDEQALAMQLQKKIKELQARIEELEEEIEAERASRAKAEKQRSDLSRELEEISERLEEAGGATSAQIELNKKREAEFQKMRRDLEESTLQHEATAAALRKKHADSVAELGKQIDSLQRVKQKLEKEKSELKMEINDLASNMETVSKAKANFEKMCRTLEDQLSEIKTKEEEQQRLINELSAQKARLHTESGEFSRQLDEKDAMVSQLSRGKQAFTQQIEELKRQLEEETKAKSTLAHALQSARHDCDLLREQYEEEQEAKAELQRGMSKANSEVAQWRTKYETDAIQRTEELEEAKKKLAQRLQDAEEHVEAVNSKCASLEKTKQRLQNEVEDLMIDVERSNAACIALDKKQRNFDKVLAEWKQKYEETQAELEASQKESRSLSTELFKVKNAYEESLDHLETLKRENKNLQQEISDLTEQIAEGGKHIHELEKVKKQLDHEKSELQTSLEEAEASLEHEEGKILRIQLELNQVKSEIDRKIAEKDEELDQLKRNHLRVVESMQSTLDAEIRSRNDALRIKKKMEGDLNEMEIQLNHANRQAAEALRNLRNTQGILKDTQLHLDDAIRGQDDLKEQLAMVERRANLMQAEVEELRASLERTERGRKMAEQELLDASERVQLLHTQNTSLINTKKKLETDISQIQGEMEDIVQEARNAEEKAKKAITDAAMMAEELKKEQDTSAHLERMKKNMEQTVKDLQLRLGEAEQLALKGGKKQIQKLEARVRELESEVESEQKHNVEAVKGLRKHERRVKELTYQTEEDRKNILRLQDLVDKLQTKVKAYKRQAEEAEEQSNVNLAKFRKLQHELEEAEERADIAESQVNKLRVKSREVHTKVISEE

SEQ ID NO: 5686 - protein, 742 aa, Homo sapiens
  VARIANT 33, 64, 228, 293, 295, 349, 606: Xaa = Any Amino Acid
MNQQQQQQQKVGKQQLSEPEDVEMEAGDTDDPXRITQNAVINGNVALRDGHNNKEEGMEDETSXRSEATFQFTVELFSRLSESVISPPCFVRNLPWKIMVVPRFYPERPHQKSVGFFLQSNAESDSTSRTCHAQAMLKIINYGDDGKSFSRRISHLFFHKENDWGFSNFMAWSEVTDPEKGFIEDDKNQRAICYINSLLQTFFFTNQLRKSVYMMQTEGDDSSKSVPXALQRVFYELQRSDKPVGKKKLTKSFGWEILDSFMQHDVQQLCGVLLDNVEKKVKGTCVEGTIPRXFXGKMVSYIQRKEVDYRSDRREDYYDIQLSIEGNKNIFESFVNYMAEEQLSGDNKXEAGEHGSQEAEKVLVHSRDNHGRHYVVYLNPKGDGKWCKFDDDVVSSWWNDSKKRKGSTLRRWTEWQEVHLYMQAQVASEDQFCGHQGNDMYDEEKVKYTVFKVLKNSSLAEFVQNLSQIMEFPQDQIQLWPMQARSNGTKRPAMLDNEADGNKAMIEVSDNENSWTIFLETVDLELAASGVTLPKFDKAHDVMFFLKMYDPKMRSLNYCGHIYTPISCEIRDLLPVMCNRAGFIQDTSLILYEEVKLNLTERIQDXDVSLEKALDELMDGPNLSQSHSSPWRKKFHFLPCKNLVMGKCRDERALREHFERTLWRRKSWEPLSHGIDQESFVAKLNGKVRTLQEACVTELAGTDADITSHHKFQHIQSKDEQVLGAGVERGQSCSCRRQKVVL

SEQ ID NO: 5687 - protein, 285 aa, Homo sapiens
MSDDFLWFEGIAFPTMGFRSETLRKVRDEFVIRDEDVIILTYPKSGTNWLAEILCLMHSKGDAKWIQSVPIWERSPWVESEIGYTALSETESPRLFSSHLPIQLFPKSFFSSKAKVIYLMRNPRDVLVSGYFFWKNMKFIKKPKSWEEYFEWFCQGTVLYGSWFDHIHGWMPMREEKNFLLLSYEELKQDTGRTIEKICQFLGKTLEPEELNLILKNSSFQSMKENKMSNYSLLSVDYVVDKAQLLRKGVSGDWKNHFTVAQAEDFDKLFQEKMADLPRELFPWE

SEQ ID NO: 5688 - protein, 3027 aa, Homo sapiens
  VARIANT 2862: Xaa = Any Amino Acid
MNLHQVLTGAVNPGDHCFSVGSIGDQRFTAYASGCDIVILGSDFERLQIIPGAKHGNIQVGCVDCSMQQGKIAASYGNVISIFEPVNLPKQKKNLELYSQWQKSGQFFLESIAHNITWDPTGSRLLTGSSYLQLWSNTNLEKPTEDENLNKTDLNFGDWKCIWHCKTASQVHLMKFSPDGEFFATAGKDDCLLKVWYNVENWRTAVTSPDGSSEKQSQGEIDFSFVYLAHPRAVNGFSWRKTSKYMPRASVCNVLLTCCKDNVCRLWVETFLPNDCLLYGGDCSHWTESINLTNNFKRNASSKERVQNALEVNLRHFRRGRRRSLALVAHTGYLPHQQDPHHVHRNTPLHANALCHFHIAASINPATDIPLLPSITSLSLNENEEKTGPFVVHWLNNKELHFTLSMEVFLQQLRKSFEQPSSEASVEDSNQADVKSDEETDDGVDDLKINPEKKELGCDKMVPNSSFTSLSSAAIDHQIEVLLSEWSKNADMLFSIHPMDGSLLVWHVDWLDEYQPGMFRQVQVSFVSRIPVAFPTGDANSLCKSIMMYACTKNVDLAIQQGKQKPSGLTRSTSMLISSGHNKSSNSLKLSIFTPNVMMISKHADGSLNQWLVSFAEESAFSTVLSISHKSRYCGHRFHLNDLACHSVLPLLLTTSHHNALRTPDVDNPEQPFDALNIEECSLTQQNKSTVDVAFQDPSAVYSELILWRVDPVGPLSFSGGVSELARINSLHVSAFSNVAWLPTLIPSYCLGAYCNSPSACFVASDGQYLRLYEAVIDAKKLLSELSNPEISKYVGEVFNIVSQQSTARPGCIIALDPITKLHGRKTQLLHVFEEDFILNNLEKKSLGKDSILSNAGSSPNGFSEKFYLIVIECTQDNRSLLHMWNLHLKSIPVSLDEKVDTKLSEAVWQPEEHYSSSPEKILSPFSQKYQACRANLQSTSRLTLFSEMVYSQELHLPEGVEIISIKPSAGHLSSSSIYPACSAPYLLATSCSDEKVRFWRCRVTDGESATSKNGKIDLAYIWEEWPLLIEDGLQSNSSITVPGRPVEVSCAHTNRLAVAYKQPASNSRSSQDFVMHVSIFECESTGGSCWVLEQTIHLDELSTVLDSGISVDSNLVAYNKQDMYLSSKENITSNTKHLVHLDWMSREDGSHILTVGIGSKLFMYGPLAGKVQDQTGKETLAFPLWESTKVVPLSKFVLLRSVDLVSSVDGSPPFPVSLSWVRDGILVVGMDCEMHVYCQWQPSSKQEPVITDSYSGSTPSITSLIKQSNSSSGLHPPKKTLTRSMTSLAQKICGKKTAFDPSVDMEDSGLFEAAHVLSPTLPQYHPLQLLELMDLGKVRRAKAILSHLVKCIAGEVVALNEAESNHERRLRSLTISASGSTTRDPQAFNKAENTDYTEIDSVPPLPLYALLAADDDSCYSSLEKSSNESTLSKSNQLSKESYDELFQTQLLMTDTHMLETDEENTKPRVIDLSQYSPTYFGPEHAQVLSGHLLHSSLPGLSRMEQMSLMALADTIATTSTDIGESRDRSQGGETLDECGLKFLLAVRLHTFLTTSLPAYRAQLLHQGLSTSHFAWAFHSVAEEELLNMLPAMQKDDPTWSELRAMGVGWWVRNTRILRKCIEKVAKAAFYRKNDPLDAAIFYLAMKKKAVIWGLYRAEKNTRMTQFFGHNFEDERWRKAALKNAFSLLGKQRFEHSAAFFLLAGCLRDAIEVCLEKLNDIQLALVIARLYESEFDTSAAYKSILRKKVLGIDSPVSELCSLNINMHHDPFLRSMAYWILEDYSGALETLIKQPIRENDDQVLSASNPTVFNFYNYLRTHPLLLRRHFGSSDTFSTHMSLTGKSGLAGTINLSERRLFFTTASAHLKAGCPMLALEVLSKMPKVIKKTRPFYRASSFLDTSKDCSPSSPLKLDAREDKSSAVDWSQSLINGFGSSSEGSSEKQSNSTLSFDWSQPSVVFQDDSLELKWDSDNDEENEDVPISMKELKPLQRKTDKKLDDISSNYTESFSTLDENDLLNPSEDIIAVQLKFRACLKILTVELRTLSTGYEIDGGKLRYQLYHWLEKEVIALQRTCDFCSDAEELQSAFGRNEDEFGLNEDAEDLPHQTKVKQLRENFQEKRQWLLKYQSLLRMFLSYCILHGSHGGGLASVRMELILLLQESQQETSEPLFSSLLSEQTSVPLLFACTANAKTVVANPLLHLSNLTHDILHAIINFDSPPHPDIQSNKVYVMHTLAASLSACIYQCLCGSHNYSSFQTNQFTGMVYQTVLLPHRPSLKTGSLDEALTPNTSPAQWPGITCLIRLLNSSGEEAQSGLTVLLCEILTAVYLSLFIHGLATHSSNELFRIVAHPLNEKMWSAVFGGGAHVPSKEQTHSKTLPVSSLVEEGEKQNKRFRPSKMSCRESAPLTPSSAPVSQESLAVKEKFIPPELSIWDYFIAKPFLPSSQSRAEYDSZESLGSDDDDNDDDDDVLASDFHLQEHSNSNSYSWSLMRLAMVQLVLNNLKTFYPFAGHDLAELPVSSPLCHAVLKTLQCWEQVLLRRLEIHGGPPQNYIASHTAEESLSAGPAILRHKALLEPTNTPFKSKHHLALSVKRLWQYLVKQEEIQETFIKNIFTKKRCLNEIEADLGYPGGKARIIHKESDIITAFAVNKANRNCIAIASSHDVQELDVSGILATQVYTWVDDDIEVETKGSEDFLVIHARDDLTAVQGTTPYTHSNPGTPINMPWLGSTQTGRGASVMIKKAINNVRRMTSHPTLPYYLTGAQDGSVRMFEWGHSQQITCFRSGGNSRVTRMRFNYQGNKFGIVDADGYLSLYQTNWKCCPVTGSMPKPYLTWQCHNKTANDFVFVSSSSLIATAGLSTDXRNVCLWDTLVAPADSLVHAFTCHDSGATVLAYAPKHQLLISGGRKGFTYVFDLCQRQQRQLFQSHDSPVKAVAVDPTEEYFVTGSAEGNIKIWSLSTFGLLHTFVSEHARQSIFRNIGTGVMQIETGPANHIFSCGADGTMKMRILPDQFSPLNEVLKNDVKFML

SEQ ID NO: 5689 - protein, 164 aa, Homo sapiens
VNPTVFFDIAVDGEPLGRVSFELFADKVPKTAENFRALSTGEKGFGYKGSCFHRIIPGFMCQGGDFTRHNGTGGKSIYGEKFEDENFILKHTGPGILSMANAGPNTNGSQFFICTAKTEWLDGKHVVFGKVKEGMNIVEAMERFGSRNGKTSKKITIADCGQLE

SEQ ID NO: 5690 - protein, 167 aa, Homo sapiens
LAMVNPTVFFDIAVDGEPLGRVSFELLADKVPKTAENFHALSTGEKGFGYKGSCFHRIIPGFMCQGGDFTRHNGTSGKSIYGEKFEDENFILKHTGPGILSMANAGPNTNGSQFFICTAKTEWLDGMHVICGKVKEGMNIVEVMECFGSRNGKTSKKITIADCGQLE

SEQ ID NO: 5691 - protein, 179 aa, Homo sapiens
MSGVWEGRSPVVSAIVNPTVFFNIAINGEPLGCISFELFADKFPKTAENLRVLGMGEKGFGCKGSRFHRIIPGFMCQGGDFTRHNGTGGKSIYGEKFDDENFILKHTGPGILSMANAGPNTNGSQFFICTAKSEWLDGKHVVFGKMKEGINIVEATGRFGSRNGKTSKKITIADCGQLE

SEQ ID NO: 5692 - protein, 446 aa, Homo sapiens
MEGQENKVSKTAENFRALSTGEKGFGCKGSCFHRIIPGFMCQGGDFTCHNGTGGKSIYWEKFDDENFILKHTGPGILSMANAGPNTNGSQFFICTAKTKWLDGKHVAFGKVSAFISSSVLLDPYDVRYGLGDVLFPLADGSLQTLRGPQAWNVRNLLGLPILGPKWPKPVGFSQIKEKVGTKGVKSKESCRKERKSLGSKMTSGEVKTSLKNAYSSAKRLSPKMEEEGEEEDYCTPGAFELERLFWKGSPQYTHVNEVWPKLYIGDEATALDRYRLQKAGFTHVLNAAHGRWNVDTGPDYYRDMDIQYHGVEADDLPTFDLSVFFYPAAAFIDRALSDDHSRKRDVRVRNLCRKAGPLGLLVAEGKGKILVHCVMGRSRSATLVLAYLMIHKDMTLVDAIQQVAKNRCVLPNRGFLKQLRELDKQLVQQRRRSQRQDGEEEDGREL

SEQ ID NO: 5693 - protein, 214 aa, Homo sapiens
MTFLLIHFSGQQQKHRYASGQYLRLNEFSHFAPPQEAKNAAVGSSVLPAMVNPTVFFHISVDGESLGRISFELFADKFPKTAENFCALNTGEKGFGYKGCCFHRIIPGFMCHGGDFTHHNGTGGKSIYGEKVDDDNFILKHTGPGILSMANAGPNTNGSQFFICTAKSEWLDSKHVVIGKVKEGMNIVEAMEHFGSRNGKTSKKVTIPDFGQLE

SEQ ID NO: 5694 - protein, 172 aa, Homo sapiens
MVNPTVFFDIAVDGEPLGRVSFEVGRAAACGNGAQKVGRGRENFRALSTGEKGFGYKGSCFHRIIPGFMCQGGDFTRHNGTGGKSIYGEKFEDENFILKHTGPGILSMANAGPNTNGSQFFICTAKTEWLDGKHVVFGKVKEGMNIVEAMERFGSRNGKTSKKITIADCGQL

SEQ ID NO: 5695 - protein, 141 aa, Homo sapiens
LFADKFPKTAENFRALSTGEKGFSYKGSCFHRIIPGFMYQGRDFTRHNGTGGKSIYGEKFEDENFILKHTGPGILSMANAGPNTNGSQFFICTAKTEWLDGKHVVFGKVKEGMNIMEAMERFGSRNGKTSKKITIADCGQL

SEQ ID NO: 5696 - protein, 189 aa, Homo sapiens
MSQRAGHEENPVENYDKKFTTELKQLLGFADAAAEENRVLLAMVNPTVFFDIAVDGEPLGRVSFELFADKVPKTAGFHRIIPGFMCQGGDFTRHNGTGGKSIYGEKFEDENFILKHTGPGILSMANAGPNTNGSQFFICTAKTEWLDGKHVVFGKVKEGMNIVEAMERFGSRNGKTSKKITIADCGQLE

SEQ ID NO: 5697 - protein, 167 aa, Homo sapiens
LAMVNPTVFFDIAVDGEPLGRVSFELFADKVPKTAENFRALSTGEKGFGYKGSCFHRIIPGFMCQGGDFTRHNGTGGKSIYGEKFEDENFILKHTGPGILSMANAGPNTNGSQFFICTAKTEWLDGKHVVFGKVKEGMNIVEAMERFGSRNGKTSKKITIADCGQLE

SEQ ID NO: 5698 - protein, 1419 aa, Homo sapiens
MDGGGVCVGRGDLLSSPQALGQLLRKESRPRRAMKPRKAEPHSFREKVFRKKPPVCAVCKVTIDGTGVSCRVCKVATHRKCEAKVTSACQALPPVELRRNTAPVRRIEHLGSTKSLNHSKQRSTLPRSFSLDPLMERRWDLDLTYVTERILAAAFPARPDEQRHRGHLRELAHVLQSKHRDKYLLFNLSEKRHDLTRLNPKVQDFGWPELHAPPLDKLCSICKAMETWLSADPQHVVVLYCKGNKGKLGVIVSAYMHYSKISAGADQALATLTMRKFCEDKVATELQPSQRRYISYFSGLLSGSIRMNSSPLFLHYVLIPMLPAFEPGTGFQPFLKIYQSMQLVYTSGVYHIAGPGPQQLCISLEPALLLKGDVMVTCYHKGGRGTDRTLVFRVQFHTCTIHGPQLTFPKDQLDEAWTDERFPFQASVEFVFSSSPEKIKGSTPRNDPSVSVDYNTTEPAVRWDSYENFNQHHEDSVDGSLTHTRGPLDGSPYAQVQRPPRQTPPAPSPEPPPPPMLSVSSDSGHSSTLTTEPAAESPGRPPPTAAERQELDRLLGGCGVASGGRGAGRETAILDDEEQPTVGGGPHLGVYPGHRPGLSRHCSCRQGYREPCGVPNGGYYRPEGTLERRRLAYGGYEGSPQGYAEASMEKRRLCRSLSEGLYPYPPEMGKPATGDFGYRAPGYREVVILEDPGLPALYPCPACEEKLALPTAALYGLRLEREAGEGWASEAGKPLLHPVRPGHPLPLLLPACGHHHAPMPDYSCLKPPKAGEEGHEGCSYTMCPEGRYGHPGYPALVTYSYGGAVPSYCPAYGRVPHSCGSPGEGRGYPSPGAHSPRAGSISPGSPPYPQSRKLSYEIPTEEGGDRYPLPGHLASAGPLASAESLEPVSWREGPSGHSTLPRSPRDAPCSASSELSGPSTPLHTSSPVQGKESTRRQDTRSPTSAPTQRLSPGEALPPVSQAGTGKAPELPSGSGPEPLAPSPVSPTFPPSSPSDWPQERSPGGHSDGASPRSPVPTTLPGLRHAPWQGPRGPPDSPDGSPLTPVPSQMPWLVASPEPPQSSPTPAFPLAASYDTNGLSQPPLPEKRHLPGPGQQPGPWGPEQASSPARGISHHVTFAPLLSDNVPQTPEPPTQESQSNVKFVQDTSKFWYKPHLSRDQAIALLKDKDPGAFLIRDSHSFQGAYGLALKVATPPPSAQPWKGDPVEQLVRHFLIETGPKGVKIKGCPSEPYFGSLSALVSQHSISPISLPCCLRILSKDPLEETPEAPVPTNMSTAADLLRQGAACSVLYLTSVETESLTGPQAVARASSAALSCSPRPTPAVVHFKVSAQGITLTDNQRKLFFRRHYPVNSITFSSTDPQDRRWTNPDGTTSKIFGFVAKKPGSPWENVCHLFAELDPDQPAGAIVTFITKVLLGQRK

SEQ ID NO: 5699 - protein, 1285 aa, Homo sapiens
MERRWDLDLTYVTERILAAAFPARPDEQRHRGHLRELAHVLQSKHRDKYLLFNLSEKRHDLTRLNPKVQDFGWPELHAPPLDKLCSICKAMETWLSADPQHVVVLYCKGNKGKLGVIVSAYMHYSKISAGADQALATLTMRKFCEDKVATELQPSQRRYISYFSGLLSGSIRMNSSPLFLHYVLIPMLPAFEPGTGFQPFLKIYQSMQLVYTSGVYHIAGPGPQQLCISLEPALLLKGDVMVTCYHKGGRGTDRTLVFRVQFHTCTIHGPQLTFPKDQLDEAWTDERFPFQASVEFVFSSSPEKIKGSTPRNDPSVSVDYNTTEPAVRWDSYENFNQHHEDSVDGSLTHTRGPLDGSPYAQVQRPPRQTPPAPSPEPPPPPMLSVSSDSGHSSTLTTEPAAESPGRPPPTAAERQELDRLLGGCGVASGGRGAGRETAILDDEEQPTVGGGPHLGVYPGHRPGLSRHCSCRQGYREPCGVPNGGYYRPEGTLERRRLAYGGYEGSPQGYAEASMEKRRLCRSLSEGLYPYPPEMGKPATGDFGYRAPGYREVVILEDPGLPALYPCPACEEKLALPTAALYGLRLEREAGEGWASEAGKPLLHPVRPGHPLPLLLPACGHHHAPMPDYSCLKPPKAGEEGHEGCSYTMCPEGRYGHPGYPALVTYSYGGAVPSYCPAYGRVPHSCGSPGEGRGYPSPGAHSPRAGSISPGSPPYPQSRKLSYEIPTEEGGDRYPLPGHLASAGPLASAESLEPVSWREGPSGHSTLPRSPRDAPCSASSELSGPSTPLHTSSPVQGKESTRRQDTRSPTSAPTQRLSPGEALPPVSQAGTGKAPELPSGSGPEPLAPSPVSPTFPPSSPSDWPQERSPGGHSDGASPRSPVPTTLPGLRHAPWQGPRGPPDSPDGSPLTPVPSQMPWLVASPEPPQSSPTPAFPLAASYDTNGLSQPPLPEKRHLPGPGQQPGPWGPEQASSPARGISHHVTFAPLLSDNVPQTPEPPTQESQSNVKFVQDTSKFWYKPHLSRDQAIALLKDKDPGAFLIRDSHSFQGAYGLALKVATPPPSAQPWKGDPVEQLVRHFLIETGPKGVKIKGCPSEPYFGSLSALVSQHSISPISLPCCLRILSKDPLEETPEAPVPTNMSTAADLLRQGAACSVLYLTSVETESLTGPQAVARASSAALSCSPRPTPAVVHFKVSAQGITLTDNQRKLFFRRHYPVNSITFSSTDPQDRRWTNPDGTTSKIFGFVAKKPGSPWENVCHLFAELDPDQPAGAIVTFITKVLLGQRK

SEQ ID NO: 5700 - protein, 949 aa, Homo sapiens
VMVTCYHKGGRGTDRTLVFRVQFHTCTIHGPQLTFPKDQLDEAWTDERFPFQASVEFVFSSSPEKIKGSTPRNDPSVSVDYNTTEPAVRWDSYENFNQHHEDSVDGSLTHTRGPLDGSPYAQVQRPPRQTPPAPSPEPPPPPMLSVSSDSGHSSTLTTEPAAESPGRPPPTAAERQELDRLLGGCGVASGGRGAGRETAILDDEEQPTVGGGPHLGVYPGHRPGLSRHCSCRQGYREPCGVPNGGYYRPEGTLERRRLAYGGYEGSPQGYAEASMEKRRLCRSLSEGLYPYPPEMGKPATGDFGYRAPGYREVVILEDPGLPALYPCPACEEKLALPTVALYGLRLEREAGEGWASEAGKPLLHPVRPGHPLPLLLPACGHHHAPMPDYSCLKPPKAGEEGHEGCSYTMCPEESLEPVSWREGPSGHSTLPRSPRDAQCSASSELSGPSTPLHTSSPVQGKESTRRQDTRSPTSAPTQRLSPGEALPPVSQAGTGKAPELPSGSGPEPLAPSPVSPTFPPSSPSDWPQERSPGGHSDGASPRSPVPTTLPGLRHAPWQGPRGPPDSPDGSPLTPVPSQMPWLVASPEPPQSSPTPAFPLAASYDTNGLSQPPLPEKRHLPGPGQQPGPWGPEQASSPARGISHHVTFAPLLSDNVPQTSEPPTQESQSNVKFVQDTSKFWYKPHLSRGQAIALLKDKDPGAFLIRDSHSFQGAYGLALKVATPPPSAQPWKGDPVEQLVRHFLIETGPKGVKIKGCPSEPYFGSLSALVSQHSISPISLPCCLRIPSKDPLEETPEAPVPTNMSTAADLLRQGAACSVLYLTSVETESLTGPQAVARASSAALSCSPRPTPAVVHFKVSAQGITLTDNQRKLFFRRHYPVNSITFSSTDPQDRRWTNPDGTTSKIFGFVAKKPGSPWENVCHLFAELDPDQPAGAIVTFITKVLLGQRK

SEQ ID NO: 5701 - protein, 1409 aa, Homo sapiens
MKSSGPVERLLRALGRRDSSRAASRPRKAEPHSFREKVFRKKPPVCAVCKVTIDGTGVSCRVCKVATHRKCEAKVTSACQALPPVELRRNTAPVRRIEHLGSTKSLNHSKQRSTLPRSFSLDPLMERRWDLDLTYVTERILAAAFPARPDEQRHRGHLRELAHVLQSKHRDKYLLFNLSEKRHDLTRLNPKVQDFGWPELHAPPLDKLCSICKAMETWLSADPQHVVVLYCKGNKGKLGVIVSAYMHYSKISAGADQALATLTMRKFCEDKVATELQPSQRRYISYFSGLLSGSIRMNSSPLFLHYVLIPMLPAFEPGTGFQPFLKIYQSMQLVYTSGVYHIAGPGPQQLCISLEPALLLKGDVMVTCYHKGGRGTDRTLVFRVQFHTCTIHGPQLTFPKDQLDEAWTDERFPFQASVEFVFSSSPEKIKGSTPRNDPSVSVDYNTTEPAVRWDSYENFNQHHEDSVDGSLTHTRGPLDGSPYAQVQRPPRQTPPAPSPEPPPPPMLSVSSDSGHSSTLTTEPAAESPGRPPPTAAERQELDRLLGGCGVASGGRGAGRETAILDDEEQPTVGGGPHLGVYPGHRPGLSRHCSCRQGYREPCGVPNGGYYRPEGTLERRRLAYGGYEGSPQGYAEASMEKRRLCRSLSEGLYPYPPEMGKPATGDFGYRAPGYREVVILEDPGLPALYPCPACEEKLALPTAALYGLRLEREAGEGWASEAGKPLLHPVRPGHPLPLLLPACGHHHAPMPDYSCLKPPKAGEEGHEGCSYTMCPEGRYGHPGYPALVTYSYGGAVPSYCPAYGRVPHSCGSPGEGRGYPSPGAHSPRAGSISPGSPPYPQSRKLSYEIPTEEGGDRYPLPGHLASAGPLASAESLEPVSWREGPSGHSTLPRSPRDAPCSASSELSGPSTPLHTSSPVQGKESTRRQDTRSPTSAPTQRLSPGEALPPVSQAGTGKAPELPSGSGPEPLAPSPVSPTFPPSSPSDWPQERSPGGHSDGASPRSPVPTTLPGLRHAPWQGPRGPPDSPDGSPLTPVPSQMPWLVASPEPPQSSPTPAFPLAASYDTNGLSQPPLPEKRHLPGPGQQPGPWGPEQASSPARGISHHVTFAPLLSDNVPQTPEPPTQESQSNVKFVQDTSKFWYKPHLSRDQAIALLKDKDPGAFLIRDSHSFQGAYGLALKVATPPPSAQPWKGDPVEQLVRHFLIETGPKGVKIKGCPSEPYFGSLSALVSQHSISPISLPCCLRILSKDPLEETPEAPVPTNMSTAADLLRQGAACSVLYLTSVETESLTGPQAVARASSAALSCSPRPTPAVVHFKVSAQGITLTDNQRKLFFRRHYPVNSITFSSTDPQDRRWTNPDGTTSKIFGFVAKKPGSPWENVCHLFAELDPDQPAGAIVTFITKVLLGQRK

SEQ ID NO: 5702 - protein, 399 aa, Homo sapiens [sequence omitted]

SEQ ID NO: 5703 - protein, 399 aa, Homo sapiens
MSLQYGAEETPLAGSYGAADSFPKDFGYGVEEEEEEAAAAGGGVGAGAGGGCGPGGADSSKPRILLMGLRRSGKSSIQKVVFHKMSPNETLFLESTNKIYKDDISNSSFVNFQIWDFPGQMDFFDPTFDYEMIFRGTGALIYVIDAQDDYMEALTRLHITVSKAYKVNPDMNFEVFIHKVDGLSDDHKIETQRDIHQRANDDLADAGLEKLHLSFYLTSIYDHSIFEAFSKVVQKLIPQLPTLENLLNIFISNSGIEKAFLFDVVSKIYIATDSSPVDMQSYELCCDMIDVVIDVSCIYGLKEDGSGSAYDKESMAIIKLNNTTVLYLKEVTKFLALVCILREESFERKGLIDYNFHCFRKAIHEVFEVGVTSHRSCGHQTSASSLKALTHNGTPRNAI

SEQ ID NO: 5704 - protein, 270 aa, Homo sapiens [sequence omitted]

SEQ ID NO: 5705 - protein, 511 aa, Homo sapiens [sequence omitted]

SEQ ID NO: 5706 - protein, 895 aa, Homo sapiens
MNKSENLLFAGSSLASQVHAAAVNGDKGALQRLIVGNSALKDKEDQFGRTPLMYCVLADRLDCADALLKAGADVNKTDHSQRTALHLAAQKGNYRFMKLLLTRRANWMQKDLEEMTPLHLTTRHRSPKCLALLLKFMAPGEVDTQDKNKQTALHWSAYYNNPEHVKLLIKHDSNIGIPDVEGKIPLHWAANHKDPSAVHTVRCILDAAPTESLLNWQDYEGRTPLHFAVADGNVTVVDVLTSYESCNITSYDNLFRTPLHWAALLGHAQIVHLLLERNKSGTIPSDSQGATPLHYAAQSNFAETVKVFLKHPSVKDDSDLEGRTSFMWAAGKGSDDVLRTMLSLKSDIDINMADKYGGTALHAAALSGHVSTVKLLLENNAQVDATDVMKHTPLFRACEMGHKDVIQTLIKGGARVDLVDQDGHSLLHWAALGGNADVCQILIENKINPNVQDYAGRTPLQCAAYGGYINCMAVLMENNADPNIQDKEGRTALHWSCNNGYLDAIKLLLDFAAFPNQMENNEERYTPLDYALLGERHEVIQFMLEHGALSIAAIQDIAAFKIQAVYKGYKVRKAFRDRKNLLMKHEQLRKDAAAKKREEENKRKEAEQQKGRRSPDSCRPQALPCLPSTQDVPSRQSRAPSKQPPAGNVAQGPEPRDSRGSPGGSLGGALQKEQHVSSDLQGTNSRRPNETAREHSKGQSACVHFRPNEGSDGSRHPGVPSVEKSRELRLQIIQRERRRKELFRKKNKAAAVIQRAWRSYQLRKHLSHLRHMKQLGAGDVDRWRQESTALLLQVWRKELELKFPQTTAVSKAPKSPSKGTSGTKSTKHSVLKQIYGCSHEGKIHHPTRSVKASSVLRLNSVSNLQCIHLLENSGRSKNFSYNLQSATQPKNKTKP

SEQ ID NO: 5707 - protein, 1065 aa, Homo sapiens [sequence omitted]

SEQ ID NO: 5708 - protein, 311 aa, Homo sapiens
MTGGGNITEITYFILLGFSDFPRIIKVLFTIFLVIYITSLAWNLSLIVLIRMDSHLHTPMYFFLSNLSFIDVCYISSTVPKMLSNLLQEQQTITFVGCIIQYFIFSTMGLSESCLMTAMAYDRYAAICNPLLYSSIMSPTLCVWMVLGAYMTGLTASLFQIGALLQLHFCGSNVIRHFFCDMPQLLILSCTDTFFVQVMTAILTMFFGIASALVIMISYGYIGISIMKITSAKGRSKAFNTCASHLTAVSLFYTSGIFVYLSSSSGGSSSFDRFASVFYTVVIPMLNPLIYSLRNKEIKDALKRLQKRKCC

SEQ ID NO: 5709 - protein, 292 aa, Homo sapiens
MAKDFQDIQQLSSEENDHPFHQGPPPAQPLAQRLCSMVCFSLLALSFNILLLVVICVTGSQSEGHRGAQLQAELRSLKEAFSNFSSSTLTEVQAISTHGGSVGDKITSLGAKLEKQQQDLKADHDALLFHLKHFPVDLRFVACQMELLHSNGSQRTCCPVNWVEHQGSCYWFSHSGKAWAEAEKYCQLENAHLVVINSWEEQKFIVQHTNPFNTWIGLTDSDGSWKWVDGTDYRHNYKNWAVTQPDNWHGHELGGSEDCVEVQPDGRWNDDFCLQVYRWVCEKRRNATGEVA

SEQ ID NO: 5710 - protein, 287 aa, Homo sapiens
MAKDFQDIQQLSSEENDHPFHQGPPPAQPLAQRLCSMVCFSLLALSFNILLLVVICVTGSQSAQLQAELRSLKEAFSNFSSSTLTEVQAISTHGGSVGDKITSLGAKLEKQQQDLKADHDALLFHLKHFPVDLRFVACQMELLHSNGSQRTCCPVNWVEHQGSCYWFSHSGKAWAEAEKYCQLENAHLVVINSWEEQKFIVQHTNPFNTWIGLTDSDGSWKWVDGTDYRHNYKNWAVTQPDNWHGHELGGSEDCVEVQPDGRWNDDFCLQVYRWVCEKRRNATGEVA

SEQ ID NO: 5711 - protein, 311 aa, Homo sapiens
MAKDFQDIQQLSSEENDHPFHQGEGPGTRRLNPRRGNPFLKGPPPAQPLAQRLCSMVCFSLLALSFNILLLVVICVTGSQSEGHRGAQLQAELRSLKEAFSNFSSSTLTEVQAISTHGGSVGDKITSLGAKLEKQQQDLKADHDALLFHLKHFPVDLRFVACQMELLHSNGSQRTCCPVNWVEHQGSCYWFSHSGKAWAEAEKYCQLENAHLVVINSWEEQKFIVQHTNPFNTWIGLTDSDGSWKWVDGTDYRHNYKNWAVTQPDNWHGHELGGSEDCVEVQPDGRWNDDFCLQVYRWVCEKRRNATGEVA

SEQ ID NO: 5712 - protein, 359 aa, Homo sapiens [sequence omitted]

SEQ ID NO: 5713 - protein, 359 aa, Homo sapiens
MILNSSTEDGIKRIQDDCPKAGRHNYIFVMIPTLYSIIFVVGIFGNSLVVIVIYFYMKLKTVASVFLLNLALADLCFLLTLPLWAVYTAMEYRWPFGNYLCKIASASVSFNLYASVFLLTCLSIDRYLAIVHPMKSRLRRTMLVAKVTCIIIWLLAGLASLPAIIHRNVFFIENTNITVCAFHYESRNSTLPIGLGLTKNILGSCFPFLIILTSYTLIWKALKKAYEIQKNNPRNDDIFRIIMAIVLFFFFSWIPHQIFTFLDVLIQQGIIRDCRIADIVDTAMPITIWIAYFNNCLNPLFYGFLGKKFKKDILQLLKYIPPKAKSHSNLSTKMSTLSYRPSDNVSSSTKKPAPCFEVE

SEQ ID NO: 5714 - protein, 271 aa, Homo sapiens
MAPRALPGSAVLAAAVFVGGAVSSPLVAPDNGSSRTLHSRTETTPSPSNDTGNGHPEYIAYALVPVFFIMGLFGVLICHLLKKKGYRCTTEAEQDIEEEKVEKIELNDSVNENSDTVGQIVHYIMKNEANADVLKAMVADNSLYDPESPVTPSTPGSPPVSPGPLSPGGTPGKHVCGHHLHTVGGVVERDVCHRCRHKRWHFIKPTNKSRESRPRRQGEVTVLSVGRFRVTKVEHKSNQKERRSLMSVSGAETVNGEVPATPVKRERSGTE

SEQ ID NO: 5715 - protein, 412 aa, Homo sapiens
MQPSSLLPLALCLLAAPASALVRIPLHKFTSIRRTMSEVGGSVEDLIAKGPVSKYSQAVPAVTEGPIPEVLKNYMDAQYYGEIGIGTPPQCFTVVFDTGSSNLWVPSIHCKLLDIACWIHHKYNSDKSSTYVKNGTSFDIHYGSGSLSGYLSQDTVSVPCQSASSASALGGVKVERQVFGEATKQPGITFIAAKFDGILGMAYPRISVNNVLPVFDNLMQQKLVDQNIFSFYLSRDPDAQPGGELMLGGTDSKYYKGSLSYLNVTRKAYWQVHLDQVEVASGLTLCKEGCEAIVDTGTSLMVGPVDEVRELQKAIGAVPLIQGEYMIPCEKVSTLPAITLKLGGKGYKLSPEDYTLKVSQAGKTLCLSGFMGMDIPPPSGPLWILGDVFIGRYYTVFDRDNNRVGFAEAARL

SEQ ID NO: 5716 - protein, 766 aa, Homo sapiens
MKTPWKVLLGLLGAAALVTIITVPVVLLNKGTDDATADSRKTYTLTDYLKNTYRLKLYSLRWISDHEYLYKQENNILVFNAEYGNSSVFLENSTFDEFGHSINDYSISPDGQFILLEYNYVKQWRHSYTASYDIYDLNKRQLITEERIPNNTQWVTWSPVGHKLAYVWNNDIYVKIEPNLPSYRITWTGKEDIIYNGITDWVYEEEVFSAYSALWWSPNGTFLAYAQFNDTEVPLIEYSFYSDESLQYPKTVRVPYPKAGAVNPTVKFFVVNTDSLSSVTNATSIQITAPASMLIGDHYLCDVTWATQERISLQWLRRIQNYSVMDICDYDESSGRWNCLVARQHIEMSTTGWVGRFRPSEPHFTLDGNSFYKIISNEEGYRHICYFQIDKKDCTFITKGTWEVIGIEALTSDYLYYISNEYKGMPGGRNLYKIQLSDYTKVTCLSCELNPERCQYYSVSFSKEAKYYQLRCSGPGLPLYTLHSSVNDKGLRVLEDNSALDKMLQNVQMPSKKLDFIILNETKFWYQMILPPHFDKSKKYPLLLDVYAGPCSQKADTVFRLNWATYLASTENIIVASFDGRGSGYQGDKIMHAINRRLGTFEVEDQIEAARQFSKMGFVDNKRIAIWGWSYGGYVTSMVLGSGSGVFKCGIAVAPVSRWEYYDSVYTERYMGLPTPEDNLDHYRNSTVMSRAENFKQVEYLLIHGTADDNVHFQQSAQISKALVDVGVDFQAMWYTDEDHGIASSTAHQHIYTHMSHFIKQCFSLP

SEQ ID NO: 5717 - protein, 529 aa, Homo sapiens
MARFPKADLAAAGVMLLCHFFTDQFQFADGKPGDQILDWQYGVTQAFPHTEEEVEVDSHAYSHRWKRNLDFLKAVDTNRASVGQDSPEPRSFTDLLLDDGQDNNTQIEEDTDHNYYISRIYGPSDSASRDLWVNIDQMEKDKVKIHGILSNTHRQAARVNLSFDFPFYGHFLREITVATGGFIYTGEVVHRMLTATQYIAPLMANFDPSVSRNSTVRYFDNGTALVVQWDHVHLQDNYNLGSFTFQATLLMDGRIIFGYKEIPVLVTQISSTNHPVKVGLSDAFVVVHRIQQIPNVRRRTIYEYHRVELQMSKITNISAVEMTPLPTCLQFNRCGPCVSSQIGFNCSWCSKLQRCSSGFDRHRQDWVDSGCPEESKEKMCENTEPVETSSRTTTTIGATTTQFRVLTTTRRAVTSQFPTSLPTEDDTKIALHLKDNGASTDDSAAEKKGGTLHAGLIVGILILVLIVATAILVTVYMYHHPTSAASIFFIERRPSRWPAMKFRRGSGHPAYAEVEPVGEKEGFIVSEQC

SEQ ID NO: 5718 - protein, 480 aa, Homo sapiens
MARFPKADLAAAGVMLLCHFFTDQFQFADGKPGDQILDWQYGVTQAFPHTEEEVEVDSHAYSHRWKRNLDFLKAVDTNRASVGQDSPEPRSFTDLLLDDGQDNNTQIERVNLSFDFPFYGHFLREITVATGGFIYTGEVVHRMLTATQYIAPLMANFDPSVSRNSTVRYFDNGTALVVQWDHVHLQDNYNLGSFTFQATLLMDGRIIFGYKEIPVLVTQISSTNHPVKVGLSDAFVVVHRIQQIPNVRRRTIYEYHRVELQMSKITNISAVEMTPLPTCLQFNRCGPCVSSQIGFNCSWCSKLQRCSSGFDRHRQDWVDSGCPEESKEKMCENTEPVETSSRTTTTVGATTTQFRVLTTTRRAVTSQFPTSLPTEDDTKIALHLKDNGASTDDSAAEKKGGTLHAGLIIGILILVLIVATAILVTVYMYHHPTSAASIFFIERRPSRWPAMKFRRGSGHPAYAEVEPVGEKEGFIVSEQC

SEQ ID NO: 5719 - protein, 428 aa, Homo sapiens
MQELHLLWWALLLGLAQACPEPCDCGEKYGFQIADCAYRDLESVPPGFPANVTTLSLSANRLPGLPEGAFREVPLLQSLWLAHNEIRTVAAGALASLSHLKSLDLSHNLISDFAWSDLHNLSALQLLKMDSNELTFIPRDAFRSLRALRSLQLNHNRLHTLAEGTFTPLTALSHLQINENPFDCTCGIVWLKTWALTTAVSIPEQDNIACTSPHVLKGTPLSRLPPLPCSAPSVQLSYQPSQDGAELRPGFVLALHCDVDGQPAPQLHWHIQIPSGIVEITSPNVGTDGRALPGTPVASSQPRFQAFANGSLLIPDFGKLEEGTYSCLATNELGSAESSVDVALATPGEGGEDTLGRRFHGKAVEGKGCYTVDNEVQPSGPEDNVVIIYLSRAGNPEAAVAEGVPGQLPPGLLLLGQSLLLFFFLTSF

SEQ ID NO: 5720 - protein, 577 aa, Homo sapiens
MCKEQKATKKSKVGFLDPLATDNQKECEAWPDLRTSEEDSKSCSGALSTALEELAKVSEELCSFQEEIRKRSNHRRMKSDSFLQEMPNVTNIPHGDPMINNDQCILPISLEKEKQKNRKNLSCTNVLQSNSTKKCGIDTIDLKRNETPPVPPPRSTSRNFPSSDSEQAYERWKERLDHNSWVPHEGRSKRNYNPHFPLRQQEMSMLYPNEGKTSKDGIIFSSLVPEVKIDSKPPSNEDVGLSMWSCDIGIGAKRSPSTSWFQKTCSTPSNPKYEMVIPDHPAKSHPDLHVSNDCSSSVAESSSPLRNFSCGFERTTRNEKLAAKTDEFNRTVFRTDRNCQAIQQNHSCSKSSEDLKPCDTSSTHTGSISQSNDVSGIWKTNAHMPVPMENVPDNPTKKSTTGLVRQMQGHLSPRSYRNMLHEHDWRPSNLSGRPRSADPRSNYGVVEKLLKTYETATESALQNSKCFQDNWTKCNSDVSGGATLSQHLEMLQMEQQFQQKTAVWGGQEVKQGIDPKKITEESMSVNASHGKGFSRPARPANRRLPSRWASRSPSAPPALRRTTHNYTISLRSEALMV

SEQ ID NO: 5721 - protein, 86 aa, Homo sapiens
MVRHPYSVQTQLSTEAKAIWRSMQQQETNLLANLTTNDARDNSKDFQNSKVGAAATSRDEGCNCPIIGEIVISCYWLFEIPPLISE

SEQ ID NO: 5722 - protein, 109 aa, Homo sapiens
DILLTQTPLSLSITPGEPASISCRSSRSLLHSNGNTYLHCDGYTYSYWFLQKPGQSPQLLIYFVSNRASGVPDRFNGSGSGTDFTLKISRVEEDVGVYYCMQALQLPPT

SEQ ID NO: 5723 - protein, 118 aa, Homo sapiens
MRLPAQLLGLLMLWVPGSSGDIVIAQTPLSWPVTSGETHISCRSSQSLLSSDGYTYSYWFLQKPGQSPQLLIYFVSNRASGVPDRFNGSGSGTDFTLKISRVAEDVGVYYCMQALQLP

SEQ ID NO: 5724 - protein, 986 aa, Homo sapiens
CKKKIDVMPIQILANEEMKVMCDNNPVSLNCCSQGNVNWSKVEWKQEGKINIPGTPETDIDSSCSRYTLKADGTQCPSGSSGTTVIYTCEFISAYGARGSANIKVTFISVANLTITPDPISVSEGQNFSIKCISDVSNYDEVYWNTSAGIKIYQRFYTTRRYLDGAESVLTVKTSTREWNGTYHCIFRYKNSYSIATKDVIVHPLPLKLNIMVDPLEATVSCSGSHHIKCCIEEDGDYKVTFHMGSSSLPAAKEVNKKQVCYKHNFNASSVSWCSKTVDVCCHFTNAANNSVWSPSMKLNLVPGENITCQDPVIGVGEPGKVIQKLCRFSNVPSSPESPIGGTITYKCVGSQWEEKRNDCISAPINSLLQMAKALIKSPSQDEMLPTYLKDLSISIDKAEHEISSSPGSLGAIINILDLLSTVPTQVNSEMMTHVLSTVNVILGKPVLNTWKVLQQQWTNQSSQLLHSVERFSQALQSGDSPPLSFSQTNVQMSSTVIKSSHPETYQQRFVFPYFDLWGNVVIDKSYLENLQSDSSIVTMAFPTLQAILAQDIQENNFAESLVMTTTVSHNTTMPFRISMTFKNNSPSGGETKCVFWNFRLANNTGGWDSSGCYVEEGDGDNVTCICDHLTSFSILMSPDSPDPSSLLGILLDIISYVGVGFSILSLAACLVVEAVVWKSVTKNRTSYMRHTCIVNIAASLLVANTWFIVVAAIQDNRYILCKTACVAATFFIHFFYLSVFFWMLTLGLMLFYRLVFILHETSRSTQKAIAFCLGYGCPLAISVITLGATQPREVYTRKNVCWLNWEDTKALLAFAIPALIIVVVNITITIVVITKILRPSIGDKPCKQEKSSLFQISKSIGVLTPLLGLTWGFGLTTVFPGTNLVFHIIFAILNVFQGLFILLFGCLWDLKVQEALLNKFSLSRWSSQHSKSTSLGSSTPVFSMSSPISRRFNNLFGKTGTYNVSTPEATSSSLENSSSASSLLN

SEQ ID NO: 5725 - protein, 1301 aa, Homo sapiens
MKSPRRTTLCLMFIVIYSSKAALNWNYESTIHPLSLHEHEPAGEEALRQKRAVATKSPTAEEYTVNIEISFENASFLDPIKAYLNSLSFPIHGNNTDQITDILSINVTTVCRPAGNEIWCSCETGYGWPRERCLHNLICQERDVFLPGHHCSCLKELPPNGPFCLLQEDVTLNMRVRLNVGFQEDLMNTSSALYRSYKTDLETAFRKGYGILPGFKGVTVTGFKSGSVVVTYEVKTTPPSLELIHKANEQVVQSLNQTYKMDYNSFQAVTINESNFFVTPEIIFEGDTVSLVCEKEVLSSNVSWRYEEQQLEIQNSSRFSIYTALFNNMTSVSKLTIHNITPGDAGEYVCKLILDIFEYECKKKIDVMPIQILANEEMKVMCDNNPVSLNCCSQGNVNWSKVEWKQEGKINIPGTPETDIDSSCSRYTLKADGTQCPSGSSGTTVIYTCEFISAYGARGSANIKVTFISVANLTITPDPISVSEGQNFSIKCISDVSNYDEVYWNTSAGIKIYQRFYTTRRYLDGAESVLTVKTSTREWNGTYHCIFRYKNSYSIATKDVIVHPLPLKLNIMVDPLEATVSCSGSHHIKCCIEEDGDYKVTFHTGSSSLPAAKEVNKKQVCYKHNFNASSVSWCSKTVDVCCHFTNAANNSVWSPSMKLNLVPGENITCQDPVIGVGEPGKVIQKLCRFSNVPSSPESPIGGTITYKCVGSQWEEKRNDCISAPINSLLQMAKALIKSPSQDEMLPTYLKDLSISIDKAEHEISSSPGSLGAIINILDLLSTVPTQVNSEMMTHVLSTVNVILGKPVLNTWKVLQQQWTNQSSQLLHSVERFSQALQSGDSPPLSFSQTNVQMSSMVIKSSHPETYQQRFVFPYFDLWGNVVIDKSYLENLQSDSSIVTMAFPTLQAILAQDIQENNFAESLVMTTTVSHNTTMPFRISMTFKNNSPSGGETKCVFWNFRLANNTGGWDSSGCYVEEGDGDNVTCICDHLTSFSILMSPDSPDPSSLLGILLDIISYVGVGFSILSLAACLVVEAVVWKSVTKNRTSYMRHTCIVNIAASLLVANTWFIVVAAIQDNRYILCKTACVAATFFIHFFYLSVFFWMLTLGLMLFYRLVFILHETSRSTQKAIAFCLGYGCPLAISVITLGATQPREVYTRKNVCWLNWEDTKALLAFAIPALIIVVVNITITIVVITKILRPSIGDKPCKQEKSSLFQISKSIGVLTPLLGLTWGFGLTTVFPGTNLVFHIIFAILNVFQGLFILLFGCLWDLKSTSLGSSTPVFSMSSPISRRFNNLFGKTG

SEQ ID NO: 5726 - protein, 429 aa, Homo sapiens
MATEQRPFHLVVFGASGFTGQFVTEEVAREQVDPERSSRLPWAVAGRSREKLQRVLEKAALKLGRPTLSSEVGIIICDIANPASLDEMAKQATVVLNCVGPYRFYGEPVIKACIENGASCIDISGEPQFLELMQLKYHEKAADKGVYIIGSSGFDSIPADLGVIYTRNKMNGTLTAVESFLTIHSGPEGLSIHDGTWKSAIYGFGDQSNLRKLRNVSNLKPVPLIGPKLKRRWPISYCRELKGYSIPFMGSDVSVVRRTQRYLYENLEESPVQYAAYVTVGGITSVIKLMFAGLFFLFFVRFGIGRQLLIKFPWFFSFGYFSKQGPTQKQIDAASFTLTFFGQGYSQGTGTDKNKPNIKICTQVKGPEAGYVATPIAMVQAAMTLLSDASHLPKAGGVFTPGAAFSKTKLIDRLNKHGIEFSVISSSEV

SEQ ID NO: 5727 - protein, 973 aa, Homo sapiens
MGESLGHHGYHGNGTDGESSERRGYHGNGTDGESLERRGYHGNGTDRESLERRGDHGNGTDGESSERRGYHGNGTDGESLERRGYHGSDTDRESLERRGYHGNGTDGESSEHRGYHGNGTDGESLGRPGYHRNGTDGENSERRGYHGNGTDGESSERRGYHGNGTDGESSGRRGYHGNGTDGESSGRRGYHGNGTDGESSGCRGYHGNGTDGESSEMAPTGRVQNTSLEHRGYHGSGTDGESSGRRGYHGNGTDGESSGRRGYHGNGTDGESSGRRGYHGNGTDGESSGRRGYHGNGTDGESSGRPGYHGNGTDGESSGRRGYHGNGTDGESSGRRGYHGNGTDGESSGRRGYHGNGTDGESSGRRGYHGNGTDGESSGRRGYHGNGTDGESSGRRGYHGNGTDGESSEMAPTGRVQNTSLEHRGYHGSGTDGESLECRGYHGNGTDRESLERRAYHGNGTDGESLEHHGYHGNGTDGESLERHGYHGNGTDGESLGHCGYHGNGTDSESLECCGYHGNGTDGESLGRRGYHGNGTDGESLECHGYHGNGTDGESLERRGYYGNGTDGESLERRGYHGNVTDGESLERHGYHGNGTDGESLERRGYHGNGTDRESLERRGYHGNGTHSESLEHHGYHGNGTDRESLERHGYHGNGTDRESLERRGYHGNGTNRESLEHRGYHGNGTHSESLEHRGYHGNGTHSESLEHHGYHGNGTDRESLERRGYHGNGTNRESLEHRGYHGNGTHSESLEHRGYHGNGTDSESLEHRGYHGNGTDSESLEHRGYHGNGTNRESLEHCGYHGNGTHSESLEHRGYHGNGTDSESLEHRGYHGNGTDSESLERCGYHGNGTHSESLEHRGYHGNGTDGESLERRGYHGNGTNGESLEHHGYRGNGTDGESLEHRGYHGNGTHSESLEHHGYHGNGTDRETQGLCPSSLLVDQSSQGKRPIPALPPASFAPLNLWEIEGIIFGP

SEQ ID NO: 5728 - protein, 1234 aa, Homo sapiens
GNTQLPPRNPVKANAMFGAGDEDDTDFLSPSGGARLASLFGLDQAAAGHGNEFFQYTAPKQPKKGQGTAATGNQATPKTAPATMSTPTILVATAVHAYRYTNGQYVKQGKFGAAVLGNHTAREYRILLYISQQQPVTVARIHVNFELMVRPNNYSTFYDDQRQNWSIMFESEKAAVEFNKQVCIAKCNSTSSLDAVLSQDLIVADGPAVEVGDSLEVAYTGWLFQNHVLGQVFDSTANKDKLLRLKLGSGKVIKGWEDGMLGMKKGGKRLLIVPPACAVGSEGVIGWTQATDSILVFEVEVRRVKFARDSGSDGHSVSSRDSAAPSPIPGADNLSADPVVSPPTSIPFKSGEPALRTKSNSLSEQLAINTSPDAVKAKLISRMAKMGQPMLPILPPQLDSNDSEIEDVNTLQGGGQPVVTPSVQPSLQPAHPALPQMTSQAPQPSVTGLQAPSAALMQVSSLDSHSAVSGNAQSFQPYAGMQAYAYPQASAVTSQLQPVRPLYPAPLSQPPHFQGSGDMASFLMTEARQHNTEIRMAVSKVADKMDHLMTKVEELQKHSAGNSMLIPSMSVTMETSMIMSNIQRIIQENERLKQEILEKSNRIEEQNDKISELIERNQRYVEQSNLMMEKRNNSLQTATENTQARVLHAEQEKAKVTEELAAATAQVSHLQLKMTAHQKKETELQMQLTESLKETDLLRGQLTKVQAKLSELQETSEQAQSKFKSEKQNRKQLELKVTSLEEELTDLRVEKESLEKNLSERKKKSAQERSQAEEEIDEIRKSYQEELDKLRQLLKKTRVSTDQAAAEQLSLVQAELQTQWEAKCEHLLASAKDEHLQQYQEVCAQRDAYQQKLVQLQEKCLALQAQITALTKQNEQHIKELEKNKSQMSGVEAAASDPSEKVKKIMNQVFQSLRREFELEESYNGRTILGTIMNTIKMVTLQLLNQQEQEKEESSSEEEEEKAEERPRRPSQEQSASASSGQPQAPLNRERPESPMVPSEQVVEEAVPLPPQALTTSQDGHRRKGDSEAEALSEIKDGSLPPELSCIPSHRVLGPPTSIPPEPLGPVSMDSECEESLAASPMAAKPDNPSGKVCVREVAPDGPLQESSTRLSLTSDPEEGDPLALGPESPGEPQPPQLKKDDVTSSTGPHKELSSTEAGSTVAGAALRPSHHSQRSSLSGDEEDELFKGATLKALRPKAQPEEEDEDEVSMKGRPPPTPLFGDDDDDDDIDWLG

SEQ ID NO: 5729 - protein, 923 aa, Homo sapiens
MDSIGSSGLRQGEETLSCSEEGLPGPSDSSELVQECLQQFKVTRAQLQQIQASLLGSMEQALRGQASPAPAVRMLPTYVGSTPHGTEQGDFVVLELGATGASLRVLWVTLTGIEGHRVEPRSQEFVIPQEVMLGAGQQLFDFAAHCLSEFLDAQPVNKQGLQLGFSFSFPCHQTGLDRSTLISWTKGFRCSGVEGQDVVQLLRDAIRRQGAYNIDVVAVVNDTVGTMMGCEPGVRPCEVGLVVDTGTNACYMEEARHVAVLDEDRGRVCVSVEWGSLSDDGALGPVLTTFDHTLDHESLNPGAQRFEKMIGGLYLGELVRLVLAHLARCGVLFGGCTSPALLSQGSILLEHVAEMEDPSTGAARVHAILQDLGLSPGASDVELVQHVCAAVCTRAAQLCAAALAAVLSCLQHSREQQTLQVAVATGGRVCERHPRFCSVLQGTVMLLAPECDVSLIPSVDGGGRGVAMVTAVAARLAAHRRLLEETLAPFRLNHDQLAAVQAQMRKAMAKGLRGEASSLRMLPTFVRATPDGSERGDFLALDLGGTNFRVLLVRVTTGVQITSEIYSIPETVAQGSGQQLFDHIVDCIVDFQQKQGLSGQSLPLGFTFSFPCRQLGLDQGILLNWTKGFKASDCEGQDVVSLLREAITRRQAVELNVVAIVNDTVGTMMSCGYEDPRCEIGLIVGTGTNACYMEELRNVAGVPGDSGRMCINMEWGAFGDDGSLAMLSTRFDASVDQASINPGKQRFEKMISGMYLGEIVRHILLHLTSLGVLFRGQQIQRLQTRDIFKTKFLSEIESDSLALRQVRAILEDLGLPLTSDDALMVLEVCQAVSQRAAQLCGAGVAAVVEKIRGNRGLEELAVSVGVDGTLYKLHPRFSSLVAATVRELAPRCVVTFLQSEDGSGKGAALVTAVACRLAQLTRV

SEQ ID NO: 5730 - protein, 657 aa, Homo sapiens
MAARETVKAAAAPEAAQRPEPGGTGRADWLGGRRGDAAAHRRLLRPPGRGGVPGGPVRRERGGRWLGALRWRDRGGCAAAVGADHLDVVRSLLRRGASVNRTTRTNSTPLRAACFEGLLEVVPYLVGEHQANLEVANRHGHTCLMISCYKGHREIARYLLEQGAQVNWRSAKGNTALHNCAETSSLEILQLLLGCKASRERDSYGMTPLLPARVTGHTNIVEYLIQEQPGQEQVTGVEAQPGLPQEGSSTSQGCRQPQGAPCCIFSPEVLNRESYQSCCPTSREAAVEALELLGSTYVDKKRDLLGALKHWRRAMELRHQRVEYLPKLEPPQLVLAYDYSREVNTTEELEALITDPDEMRMQALLIRERILSPSHPDSSYCIRYRGAVYADSGNIECYIRLWKYALDMQQSNLEPLSPMTASSFLSFAELFSYVLQDPAAKGSLGTQIGFADFMGVLTKGVWEVEWALQLLREPRDSAQFNKALAIILHLLYLLEKVECTPSREHLKHQTIYRLLKCAPRGKNGFTPLHMAVDKDTTNVGRYSVGRFPSLHVVKVLFDCGADRDSRDFDNTPLHIAAQNNCPAIVNALIEAGAHMDATNAFKKTAYELLEEKLLARGTMQPFNYVTLQCLAAQALDKNKIPYKGFIPEDLKAFIELH

SEQ ID NO: 5731 - protein, 669 aa, Homo sapiens
MDLRTAVYNAARDGKLQLLQKLLSGRSREELDELTGEVAGGGTPLLIAARYGHLDVVEYLVDRCGASVEAGGSVHFDGETIEGAPPLWAASAAGHLDVVRSLLRRGASVNRTTRTNSTPLRAACFDGHLEVVRYLVGEHQADLEVANRHGHTCLMISCYKGHREIARYLLEQGAQVNRRSAKGNTALHDCAESGSLEILQLLLGCKARMERDGYGMTPLLAASVTGHTNIVEYLIQEQPGQEQVAGGEAQPGLPQEDPSTSQGCAQPQGAPCCSSSPEEPLNGESYESCCPTSREAAVEALELLGATYVDKKRDLLGALKHWRRAMELRHQGGEYLPKPEPPQLVLAYDYSREVNTTEELEALITDPDEMRMQALLIRERILGPSHPDTSYYIRYRGAVYADSGNFERCIRLWKYALDMQQSNLEPLSPMTASSFLSFAELFSYVLQDRAAKGSLGTQIGFADLMGVLTKGVREVERALQLPREPGDSAQFTKALAIILHLLYLLEKVECTPSQEHLKHQTVYRLLKCAPRGKNGFTPLHMAVDKDTTNVGRYPVGRFPSLHVVKVLLDCGADPDSRDFDNNTPLHIAAQNNCPAIMNALIEAGAHMDATNAFKKTAYELLDEKLLARGTMQPFNYVTLQCLAARALDKNKIPYKGFIPEDLEAFIELH

SEQ ID NO: 5732 - protein, 572 aa, Homo sapiens
GGTPLLIAACYGHLDVVEYLVDRCGASVEAGGSVHFDGETVEGAPPLWARHLDVVRSLLRRGASVNRTTRTNSTPLRAACFEGLLEVVPYLVGEHQANLEVANRHGHTCLMISCYKGHREIARYLLEQGAQVNWRSAKGNTALHNCAETSSLEILQLLLGCKASNVDSYGMTPLLPARVTGHTNIVEESYQSCCPTSREAAVEALELLGSTYVDKKRDLLGALKHWRRAMELRHQRVEYLPKLEPPQLVLAYDYSREVNTTEELEALITDPDEMRMQALLIRERILSPSHPDSSYCIRYRGAVYADSGNIECYIRLWKYALDMQQSNLEPLSPMTASSFLSFAELFSYVLQDPAAKGSLGTQIGFADFMGVLTKGVWEVEWALQLLREPRDSAQFNKALAIILHLLYLLEKVECTPSREHLKHQTIYRLLKCAPRGKNGFTPLHMAVDKDTTNVGRYSVGRFPSLHVVKVLFDCGADRDSRDFDNTPLHIAAQNNCPAIVNALIEAGAHMDATNAFKKTAYELLEEKLLARGTMQPFNYVTLQCLAAQALDKNKIPYKGFIPEDLKAFIELH

SEQ ID NO: 5733 - protein, 992 aa, Homo sapiens
MRKLFSFGRRLGQALLSSMDQEYAGPGYDIRDWELRKIHRAAIKGDAAEVERCLTRRFRDLDARDRKDRTVLHLACAHGRVQVVTLLLHRRCQIDICDRLNRTPLMKAVHSQEEACAIVLLECGANPNIKDIYGNTALHYAVYNKGTSLAERLLSHHANIEALNKEGNTPLLFAINSRRQHMVEFLLKNQANIHAVDNFKRTALILAVQHNLSSIVTLLLQQNIRISSQDMFGQTAEDYALCSDLRSIRQQILEHKNKMLKNHLRNDNQETAAMKPANLKKRKERAKAEHNLKVASEEKQERLQRSENKQPQDSQSYGKKKDAMYGNFMLKKDIAMLKEELYAIKNDSLRKEKKYIQEIKSITEINANFEKSVRLNEKMITKTVARYSQQLNDLKAENARLNSELEKEKHNKERLEAEVESLHSSLATAINEYNEIVERKDLELVLWRADDVSRHEKMGSNISQLTDKNELLTEQVHKARVKFNTLKGKLRETRDALREKTLALGSVQLDLRQAQHRIKEMKQMHPNGEAKESQSIGKQNSLEERIRQQELENLLLERQLEDARKEGDNKEIVINIHRDCLENGKEDLLEERNKELMKEYNYLKEKLLQCEKEKAEREVIVREFQEELVDHLKTFSISESPLEGTSHCHINLNETWTSKKKLFQVEIQPEEKHEEFRKLFELISLLNYTADQIRKKNRELEEEATGYKKCLEMTINMLNAFANEDFNCHGDLNTDQLKMDILFKKLKQKFNDLVAEKEAVSSECVNLAKDNEVLHQELLSMRNVQEKCEKLEKDKKMLEEEVLNLKTHMEKDMVELGKLQEYKSELDERAVQEIEKLEEIHLQKQAEYEKQLEQLNKDNTASLKKKELTLKDVECKFSKMKTAYEEVTTELEEFKEVFAAAVKANNSMSKKLMKSDKKIAVISTKLFTEKQRMKYFLSTLPTRPEPELPCVENLNSIELNRKYIPKTAIRIPTSNPQTSNNCKNFLTEVLLC

SEQ ID NO: 5734 - protein, 657 aa, Homo sapiens
MAEGSGEVVAVSATGAANGLNNGAGGTSATTCNPLSRKLHKILETRLDNDKEMLEALKALSTFFVENSLRTRRNLRGDIERKSLAINEEFVSIFKEVKEELESISEDVQAMSNCCQDMTSRLQAAKEQTQDLIVKTTKLQSESQKLEIRAQVADAFLSKFQLTSDEMSLLRGTREGPITEDFFKALGRVKQIHNDVKVLLRTNQQTAGLEIMEQMALLQETAYERLYRWAQSECRTLTQESCDVSPVLTQAMEALQDRPVLYKYTLDEFGTARRSTVVRGFIDALTRGGPGGTPRPIEMHSHDPLRYVGDMLAWLHQATASEKEHLEALLKHVTTQGVEENIQEVVGHITEGVCRPLKVRIEQVIVAEPGAVLLYKISNLLKFYHHTISGIVGNSATALLTTIEEMHLLSKKIFFNSLSLHASKLMDKVELPPPDLGPSSALNQTLMLLREVLASHDSSVVPLDARQADFVQVLSCVLDPLLQMCTVSASNLGTADMATFMVNSLYMMKTTLALFEFTDRRLEMLQFQIEAHLDTLINEQASYVLTRVGLSYIYNTVQQHKPEQGSLANMPNLDSVTLKAAMVQFDRYLSAPDNLLIPQLNFLLSATVKEQIVKQSTELVCRAYGEVYAAVMNPINEYKDPENILHRSPQQVQTLLS

SEQ ID NO: 5735 - protein, 1391 aa, Homo sapiens
MAHSKTRTNDGKITYPPGVKEISDKISKEEMVRRLKMVVKTFMDMDQDSEEEKELYLNLALHLASDFFLKHPDKDVRLLVACCLADIFRIYAPEAPYTSPDKLKDIFMFITRQLKGLEDTKSPQFNRYFYLLENIAWVKSYNICFELEDSNEIFTQLYRTLFSVINNGHNQKVHMHMVDLMSSIICEGDTVSQELLDTVLVNLVPAHKNLNKQAYDLAKALLKRTAQAIEPYITNFFNQVLMLGKTSISDLSEHVSDLILELYNIDSHLLLSVLPQLEFKLKSNDNEERLQVVKLLAKMFGAKDSELASQNKPLWQCYLGRFNDIHVPIRLECVKFASHCLMNHPDLAKDLTEYLKVRSHDPEEAIRHDVIVSIVTAAKKDILLVNDHLLNFVGERTLDKRWRVRKEAMMGLAQIYKKYALQSAAGKDAAKQIAWIKDKLLHIYYQNSIDDRLLVERIFAQYMVPHNLETTERMKCLYYLYATLDLNAVKALNEMWKCQNLLRHQVKDLLDLIKQPKTDASVKAIFSKVMVITRSLPDPGKAQDFMKKFTQVLEDDEKIRKQLEVLVSPTCSCKQAEGCVREITKKLGNPKQPTNPFLEMIKFLLERIAPVHIDTESISALIKQVNKSIDGTADDEDEGVPTDQAIRAGLELLKVLSFTHPISFHSAETFESLLACLKMDDEKVAEAALQIFKNTGSKIEEDFPHIRSALLPVLHHKSKKGPPRQAKYAIHCIHAIFSSKEAQFAQIFEPLHKSLDPSNLEHLITPLVTIGHIALLAPDQFAAPLKSLVATFIVKDLLMNDRLPGKKTTKLWVPDEEVSPETMVKIQAIKMMVRWLLGMKNNHSKSGTSTLRLLTTILHSDGDLTEQGKISKPDMSRLRLAAGSAIVKLAQEPCYHEIITLEQYQLCALAINDECYQVRQVFAQKLHKGLSRLRLPLEYMAICALCAKDPVKERRAHARQCLVKNINVRREYLKQHAAVSEKLLSLLPEYVVPYTIHLLAHDPDYVKVQDIEQLKDVKECLWFVLEILMAKNENNSHAFIRKMVENIKQTKDAQGPDDAKMNEKLYTVCDVAMNIIMSKSTTYSLESPKDPVLPARFFTQPDKNFSNTKNYLPPGMKSFFTPGKPKTTNVLGAVNKPLSSAGKQSQTKSSRMETVGNASSSSNPSSPGRIKGRLDSSEMDHSENEDYTMSSPLPGKRSDKRDDSDLVRSELEKPRGRKKTPVTEREEKLGMDDLTKLVQEQRPKGSQRSRKRGHTASESDEQQWPEEKRLKEDILENEDEQNSPPKKGKRGRPPKPLGGGTPKEEPTMKTSKKGSKKKSGPPAPEEEEEEERQSGNTEQKSKSKQHRVSRRAQQRAESSESSAIESTQSTPQKGRGRPSKTPSPSQPKKNV

SEQ ID NO: 5736 - protein, 379 aa, Homo sapiens
MEQLSSANTRFALDLFLALSENNPAGNIFISPFSISSAMAMVFLGTRGNTAAQLSKTFHFNTVEEVHSRFQSLNADINKRGASYILKLANRLYGEKTYNFLPEFLVSTQKTYGADLASVDFQHASEDARKTINQWVKGQTEGKIPELLASGMVDNMTKLVLVNAIYFKGNWKDKFMKEATTNAPFRLNKKDRKTVKMMYQKKKFAYGYIEDLKCRVLELPYQGEELSMVILLPDDIEDESTGLKKIEEQLTLEKLHEWTKPENLDFIEVNVSLPRFKLEESYTLNSDLARLGVQDLFNSSKADLSGMSGARDIFISKIVHKSFVEVNEEGTEAAAATAGIATFCMLMPEENFTADHPFLFFIRHNSSGSILFLGRFSSP

SEQ ID NO: 5737 - protein, 190 aa, Homo sapiens
MEAETKTLPLENASILSEGSLQEGHRLWIGNLDPKITEYHLLKLLQKFGKVKQFDFLFHKSGALEGQPRGYCFVNFETKQEAEQAIQCLNGKLALSKKLVVRWAHAQVKRYDHNKNDKILPISLEPSSSTEPTQSNLSVTAKIKAIEAKLKMMAENPDAEYPAAPVYSYFKPPDKKRTTPYSRTAWKSRR

SEQ ID NO: 5738 - protein, 690 aa, Homo sapiens
MEKILQMAEGIDIGEMPSYDLVLSKPSKGQKRHLSTCDGQNPPKKQAGSKFHARPRFEPVHFVASSSKDERQEDPYGPQTKEVNEQTHFASMPRDIYQDYTQDSFSIQDGNSQYCDSSGFILTKDQPVTANMYFDSGNPAPSTTSQQANSQSTPEPSPSQTFPESVVAEKQYFIEKLTATIWKNLSNPEMTSGSDKINYTYMLTRCIQACKTNPEYIYAPLKEIPPADIPKNKKLLTDGYACEVRCQNIYLTTGYAGSKNGSRDRATELAVKLLQKRIEVRVVRRKFKHTFGEDLVVCQIGMSSYEFPPALKPPEDLVVLGKDASGQPIFNASAKHWTNFVITENANDAIGILNNSASFNKMSIEYKYEMMPNRTWRCRVFLQDHCLAEGYGTKKTSKHAAADEALKILQKTQPTYPSVKSSQCHTGSSPRGSGKKKDIKDLVVYENSSNPVCTLNDTAQFNRMTVEYVYERMTGLRWKCKVILESEVIAEAVGVKKTVKYEAAGEAVKTLKKTQPTVINNLKKGAVEDVISRNEIQGRSAEEAYKQQIKEDNIGNQLLRKMGWTGGGLGKSGEGIREPISVKEQHKREGLGLDVERVNKIAKRDIEQIIRNYARSESHTDLTFSRELTNDERKQIHQIAQKYGLKSKSHGVGHDRYLVVGRKRRKEDLLDQLKQEGQVGHYELVMPQAN

SEQ ID NO: 5739 - protein, 467 aa, Homo sapiens
MPGRWRWQRDMHPARKLLSLLFLILMGTELTQVLPTNPEESWQVYSSAQDSEGRCICTVVAPQQTMCSRDARTKQLRQLLEKVQNMSQSIEVLDRRTQRDLQYVEKMENQMKGLESKFKQVEESHKQHLARQFKAIKAKMDELRPLIPVLEEYKADAKLVLQFKEEVQNLTSVLNELQEEIGAYDYDELQSRVSNLEERLRACMQKLACGKLTGISDPVTVKTSGSRFGSWMTDPLAPEGDNRVWYMDGYHNNRFVREYKSMVDFMNTDNFTSHRLPHPWSGTGQVVYNGSIYFNKFQSHIIIRFDLKTETILKTRSLDYAGYNNMYHYAWGGHSDIDLMVDESGLWAVYATNQNAGNIVVSRLDPVSLQTLQTWNTSYPKRSAGEAFIICGTLYVTNGYSGGTKVHYAYQTNASTYEYIDIPFQNKYSHISMLDYNPKDRALYAWNNGHQILYNVTLFHVIRSDEL

SEQ ID NO: 5740 - protein, 485 aa, Homo sapiens
MSVPLLKIGVVLSTMAMITNWMSQTLPSLVGLNTTRLSAASGGTLDRSTGVLPTNPEESWQVYSSAQDSEGRCICTVVAPQQTMCSRDARTKQLRQLLEKVQNMSQSIEVLDRRTQRDLQYVEKMENQMKGLESKFKQVEESHKQHLARQFKAIKAKMDELRPLIPVLEEYKADAKLVLQFKEEVQNLTSVLNELQEEIGAYDYDELQSRVSNLEERLRACMQKLACGKLTGISDPVTVKTSGSRFGSWMTDPLAPEGDNRVWYMDGYHNNRFVREYKSMVDFMNTDNFTSHRLPHPWSGTGQVVYNGSIYFNKFQSHIIIRFDLKTETILKTRSLDYAGYNNMYHYAWGGHSDIDLMVDESGLWAVYATNQNAGNIVVSRLDPVSLQTLQTWNTSYPKRSAGEAFIICGTLYVTNGYSGGTKVHYAYQTNASTYEYIDIPFQNKYSHISMLDYNPKDRALYAWNNGHQILYNVTLFHVIRSDEL

SEQ ID NO: 5741 - protein, 390 aa, Homo sapiens
MPPSGLRLLLLLLPLLWLLVLTPGRPAAGLSTCKTIDMELVKRKRIEAIRGQILSKLRLASPPSQGEVPPGPLPEAVLALYNSTRDRVAGESAEPEPEPEADYYAKEVTRVLMVETHNEIYDKFKQSTHSIYMFFNTSELREAVPEPVLLSRAELRLLRLKLKVEQHVELYQKYSNNSWRYLSNRLLAPSDSPEWLSFDVTGVVRQWLSRGGEIEGFRLSAHCSCDSRDNTLQVDINGFTTGRRGDLATIHGMNRPFLLLMATPLERAQHLQSSRHRRALDTNYCFSSTEKNCCVRQLYIDFRKDLGWKWIHEPKGYHANFCLGPCPYIWSLDTQYSKVLALYNQHNPGASAAPCCVPQALEPLPIVYYVGRKPKVEQLSNMIVRSCKCS

SEQ ID NO: 5742 - protein, 292 aa, Homo sapiens
MALAALMIALGSLGLHTWQAQAVPTILPLGLAPDTFDDTYVGCAEEMEEKAAPLLKEEMAHHALLRESWEAAQETWEDKRRGLTLPPGFKAQNGIAIMVYTNSSNTLYWELNQAVRTGGGSRELYMRHFPFKALHFYLIRALQLLRGSGGCSRGPGEVVFRGVGSLRFEPKRLGDSVRLGQFASSSLDKAVAHRFGNATLFSLTTCFGAPIQAFSVFPKEREVLIPPHEVFLVTRFSQDGAQSLVTLWSYNQTCSHFNCAYLGGEKRRGCVSAPGALGTGDLHMTKRHLQQP

SEQ ID NO: 5743 - protein, 292 aa, Homo sapiens
MALAALMIALGSLGLHTWQAQAVPTILPLGLAPDTFDDTYVGCVEEMEEKAAPLLKEEMAHHALLRESWEAAQETWEDKRRGLTLPPGFKAQNGIAIMVYTNSSNTLYWELNQAVRTGGGSRELYMRHFPFKALHFYLIRALQLLRGSGGCSRGPGEVVFRGVGSLRFEPKRLGDSVRLGQFASSSLDKAVAHRFGNATLFSLTTCFGAPIQAFSVFPKEREVLIPPHEVFLVTRFSQDGAQSLVTLWSYNQTCSHFNCAYLGGEKRRGCVSAPGALGTGDLHMTKRHLQQP

SEQ ID NO: 5744 - protein, 1177 aa, Homo sapiens
MVSSGCRMRSLWFIIVISFLPNTEGFSRAALPFGLVRRELSCEGYSIDLRCPGSDVIMIESANYGRTDDKICDADPFQMENTDCYLPDAFKIMTQRCNNRTQCIVVTGSDVFPDPCPGTYKYLEVQYECVPYIFVCPGTLKAIVDSPCIYEAEQKAGAWCKDPLQAADKIYFMPWTPYRTDTLIEYASLEDFQNSRQTTTYKLPNRVDGTGFVVYDGAVFFNKERTRNIVKFDLRTRIKSGEAIINYANYHDTSPYRWGGKTDIDLAVDENGLWVIYATEQNNGMIVISQLNPYTLRFEATWETVYDKRAASNAFMICGVLYVVRSVYQDNESETGKNSIDYIYNTRLNRGEYVDVPFPNQYQYIAAVDYNPRDNQLYVWNNNFILRYSLEFGPPDPAQVPTTAVTITSSAELFKTIISTTSTTSQKGPMSTTVAGSQEGSKGTKPPPAVSTTKIPPITNIFPLPERFCEALDSKGIKWPQTQRGMMVERPCPKGTRGTASYLCMISTGTWNPKGPDLSNCTSHWVNQLAQKIRSGENAASLANELAKHTKGPVFAGDVSSSVRLMEQLVDILDAQLQELKPSEKDSAGRSYNKAIVDTVDNLLRPEALESWKHMNSSEQAHTATMLLDTLEEGAFVLADNLLEPTRVSMPTENIVLEVAVLSTEGQIQDFKFPLGIKGAGSSIQLSANTVKQNSRNGLAKLVFIIYRSLGQFLSTENATIKLGADFIGRNSTIAVNSHVISVSINKESSRVYLTDPVLFTLPHIDPDNYFNANCSFWNYSERTMMGYWSTQGCKLVDTNKTRTTCACSHLTNFAILMAHREIAYKDGVHELLLTVITWVGIVISLVCLAICIFTFCFFRGLQSDRNTIHKNLCINLFIAEFIFLIGIDKTKYAIACPIFAGLLHFFFLAAFAWMCLEGVQLYLMLVEVFESEYSRKKYYYVAGYLFPATVVGVSAAIDYKSYGTEKACWLHVDNYFIWSFIGPVTFIILLNIIFLVITLCKMVKHSNTLKPDSSRLENIKSWVLGAFALLCLLGLTWSFGLLFINEETIVMAYLFTIFNAFQGVFIFIFHCALQKKVRKEYGKCFRHSYCCGGLPTESPHSSVKASTTRTSARYSSGTQSRIRRMWNDTVRKQSESSFISGDINSTSTLNQGLTSHGLRAHLQDLYHLELLLGQIA

SEQ ID NO: 5745 - protein, 314 aa, Homo sapiens
MDQINHTNVKEFFFLELTRSRELEFFLFVVFFAVYVATVLGNALIVVTITCESRLHTPMYFLLRNKSVLDIVFSSITVPKFLVDLLSDRKTISYNDCMAQIFFFHFAGGADIFFLSVMAYDRYLAIAKPLHYVTMMRKEVWVALVVASWVSGGLHSIIQVILMLPFPFCGPNTLDAFYCYVLQVVKLACTDTFALELFMISNNGLVTLLWFLLLLGSYTVILVMLRSHSGEGRNKALSTCTSHMLVVTLHFVPCVYIYCRPFMTLPMDTTISINNTVITPMLNPIIYSLRNQEMKSAMQRLQRRLGPSESRKWG

SEQ ID NO: 5746 - protein, 1733 aa, Homo sapiens
MMEGNGTENSCSRTRGWLQQDNDAKPWLWKFSNCFSRPEQTLPHSPQTKEYMENKKVAVELKDVPSPLHAGSKLFPAVPLPDIRSLQQPKIQLSSVPKVSCCAHCPNEPSTSPMRFGGGGGGSGGTSSLIHPGALLDSQSTRTITCQVGSGFAFQSASSLQNASARNNLAGIASDFPSMCLESNLSSCKHLPCCGKLHFQSCHGNVHKLHQFPSLQGCTSAGYFPCSDFTSGAPGHLEEHISQSELTPHLCTNSLHLNVVPPVCLKGSLYCEDCLNKPARNSIIDAAKVWPNIPPPNTQPAPLAVPLCNGCGTKGTGKETTLLLATSLGKAASKFGSPEVAVAGQVLENLPPIGVFWDIENCSVPSGRSATAVVQRIREKFFKGHREAEFICVCDISKENKEVIQELNNCQVTVAHINATAKNAADDKLRQSLRRFANTHTAPATVVLVSTDVNFALELSDLRHRHGFHIILVHKNQASEALLHHANELIRFEEFISDLPPRLPLKMPQCHTLLYVYNLPANKDGKSVSNRLRRLSDNCGGKVLSITGCSAILRFINQDSAERAQKRMENEDVFGNRIIVSFTPKNRELCETKSSNAIADKVKSPKKLKNPKLCLIKDASEQSSSAKATPGKGSQANSGSATKNTNVKSLQELCRMESKTGHRNSEHQQGHLRLVVPTHGNSSAAVSTPKNSGVAEPVYKTSQKKENLSARSVTSSPVEKKDKEETVFQVSYPSAFSKLVASRQVSPLLASQSWSSRASPLAFNIANSSSEADCPDPFANGADVQVSNIDYRLSRKELQQLLQEAFARHGKVKSVELSPHTDYQLKAVVQMENLQDAIGAVNSLHRYKIGSKKILVSLATGAASKSLSLLSAETMSVLQDAPACCLPLFKFTDIYEKKFGHKLNVSDLYKLTDTVAIREQGNGRLVCLLPSSQARQSPLGSSQSHDGSSTNCSPIIFEELEYHEPVCRQHCSNKDFSEHEFDPDSYKIPFVILSLKTFAPQVHSLLQTHEGTVPLLSFPDCYIAEFGDLEVVQENQGGVPLEHFITCVPGVNIATAQNGIKVVKWIHNKPPPPNTDPWLLRSKSPVGNPQLIQFSREVIDLLKSQPSCVIPISHFIPSYHHHFAKQCRVSDYGYSKLIELLEAVPHVLQILGMGSKRLLTLTHRAQVKRFTQDLLKLLKSQASKQVIVREFSQAYHWCFSKDWDVTEYGVCELIDIVSEIPDTTICLSQQDNEMVICIPKRERTQDEIERTKQFSKDVVDLLRHQPHFRMPFNKFIPSYHHHFGRQCKLAYYGFTKLLELFEAIPDTLQVLECGEEKILTLTEVERFKALAAQFVKLLRSQKDNCLMMTDLLTEYAKTFGYTFRLQDYDVSSISALTQKLCHVVKVADIESGRQIQLINRKSLRSLTAQLLVLLMSWEGTTHLSVEELKRHYESTHNTPLNPCEYGFMTLTELLKSLPYLVEVFTNDKMEECVKLTSLYLFAKNVRSLLHTYHYQQIFLHEFSMAYTKYVGETLQPKTYGHSSVEELLGAIPQVVWIKGHGHKRIVVLKNDMKSRLSSLSLSPANHENQPSEGERILEVPESHTASELKLGADGSGPSHTEQELLRLTDDSPVDLLCAPVPSCLPSPQLRPDPVILQSADLIQFEERPQEPSEIMILNQEEKMEIPIPGKSKTLTSDSSSSCISAAVPVPPCPSSETSESLLSKDPVESPAKKQPKNRVKLAANFSLAPITKL

SEQ ID NO: 5747 - protein, 1199 aa, Homo sapiens
MQVTVAHINATAKNAADDKLRQSLRRFANTHTAPATVVLVSTDVNFALELSDLRHRHGFHIILVHKNQASEALLHHANELIRFEEFISDLPPRLPLKMPQCHTLLYVYNLPANKDGKSVSNRLRRLSDNCGGKVLSITGCSAILRFINQDSAERAQKRMENEDVFEKKDKEETVFQVSYPSAFSKLVASRQVSPLLASQSWSSRASPLAFNIANSSSEADCPDPFANGADVQVSNIDYRLSRKELQQLLQEAFARHGKVKSVELSPHTDYQLKAVVQMENLQDAIGAVNSLHRYKIGSKKILVSLATGAASKSLSLLRFGHKLNVSDLYKLTDTVAIREQGNGRLVCLLPSSQARQSPLGSSQSHDGSSTNCSPIIFEELEYHEPVCRQHCSNKDFSFPDCYIAEFGDLEVVQENQGGVPLEHFITCVPGVNIATAQNGIKVVKWIHNKPPPPNTDPWLLRSKSPVGNPQLIQFSREVIDLLKSQPSCVIPISHFIPSYHHHFAKQCRVSDYGYSKLIELLEAVPHVLQILGMGSKRLLTLTHRAQVKRFTQDLLKLLKSQASKQVIVREFSQAYHWCFSKDWDVTEYGVCELIDIVSEIPDTTICLSQQDNEMVICIPKRERTQDEIERTKQFSKDVVDLLRHQPHFRMPFNKFIPSYHHHFGRQCKLAYYGFTKLLELFEAIPDTLQVLECGEEKILTLTEVERFKALAAQFVKLLRSQKDNCLMMTDLLTEYAKTFGYTFRLQDYDVSSISALTQKLCHVVKVADIESGRQIQLINRKSLRSLTAQLLVLLMSWEGTTHLSVEELKRHYESTHNTPLNPCEYGFMTLTELLKSLPYLVETAAAFDLQIELKFAGGYSLLLEEILEYIPPPFLSPLPSFLPPPPFFFFVFFVIFIFFIFVFVQFVVFVFFIVVFVFFIVVFVFTNDKMEECVKLTSLYLFAKNVRSLLHTYHYQQIFLHEFSMAYTKYVGETLQPKTYGHSSVEELLGAIPQVVVQFLQKNGKELSCENYLNLYAKAGRLSSLSLSPANHENQPSEGERILEVPESHTASELKLGADGSGPSHTEQELLRLTDDSPVDLLCAPVPSCLPSPQLRPDPVILQSADLIQFEERPQEPSEIMILNQEEKMEIPIPGKSKTLTSDSSSSCISAAVPVPPCPSSETSESLLSKDPVESPAKKQPKNRVKLAANFSLAPITKL

SEQ ID NO: 5748 - protein, 1403 aa, Homo sapiens
MVSSGCRMRSLWFIIVISFLPNTEGFSRAALPFGLVRRELSCEGYSIDLRCPGSDVIMIESANYGRTDDKICDADPFQMENTDCYLPDAFKIMTQRCNNRTQCIVVTGSDVFPDPCPGTYKYLEVQYECVPYIFVCPGTLKAIVDSPCIYEAEQKAGAWCKDPLQAADKIYFMPWTPYRTDTLIEYASLEDFQNSRQTTTYKLPNRVDGTGFVVYDGAVFFNKERTRNIVKFDLRTRIKSGEAIINYANYHDTSPYRWGGKTDIDLAVDENGLWVIYATEQNNGMIVISQLNPYTLRFEATWETVYDKRAASNAFMICGVLYVVRSVYQDNESETGKNSIDYIYNTRLNRGEYVDVPFPNQYQYIAAVDYNPRDNQLYVWNNNFILRYSLEFGPPDPAQVPTTAVTITSSAELFKTIISTTSTTSQKGPMSTTVAGSQEGSKGTKPPPAVSTTKIPPITNIFPLPERFCEALDSKGIKWPQTQRGMMVERPCPKGTRGTASYLCMISTGTWNPKGPDLSNCTSHWVNQLAQKIRSGENAASLANELAKHTKGPVFAGDVSSSVRLMEQLVDILDAQLQELKPSEKDSAGRSYNKAIVDTVDNLLRPEALESWKHMNSSEQAHTATMLLDTLEEGAFVLADNLLEPTRVSMPTENIVLEVAVLSTEGQIQDFKFPLGIKGAGSSIQLSANTVKQNSRNGLAKLVFIIYRSLGQFLSTENATIKLGADFIGRNSTIAVNSHVISVSINKESSRVYLTDPVLFTLPHIDPDNYFNANCSFWNYSERTMMGYWSTQGCKLVDTNKTRTTCACSHLTNFAILMAHREIAYKDGVHELLLTVITWVGIVISLVCLAICIFTFCFFRGLQSDRNTIHKNLCINLFIAEFIFLIGIDKTKYAIACPIFAGLLHFFFLAAFAWMCLEGVQLYLMLVEVFESEYSRKKYYYVAGYLFPATVVGVSAAIDYKSYGTEKACWLHVDNYFIWSFIGPVTFIILLNIIFLVITLCKMVKHSNTLKPDSSRLENIKSWVLGAFALLCLLGLTWSFGLLFINEETIVMAYLFTIFNAFQGVFIFIFHCALQKKVRKEYGKCFRHSYCCGGLPTESPHSSVKASTTRTSARYSSGTQSRIRRMWNDTVRKQSESSFISGDINSTSTLNQGHSLNNARDTSAMDTLPLNGNFNNSYSLHKGDYNDSVQVVDCGLSLNDTAFEKMIISELVHNNLRGSSKTHNLELTLPVKPVIGGSSSEDDAIVADASSLMHSDNPGLELHHKELEAPLIPQRTHSLLYQPQKKVKSEGTDSYVSQLTAEAEDHLQSPNRDSLYTSMPNLRDSPYPESSPDMEEDLSPSRRSENEDIYYKSMPNLGAGHQLQMCYQISRGNSDGYIIPINKEGCIPEGDVREGQMQLVTSL

SEQ ID NO: 5749 - protein, 1021 aa, Homo sapiens
EGSKGTKPPPAVSTTKIPPITNIFPLPERFCEALDSKGIKWPQTQRGMMVERPCPKGTRGTASYLCMISTGTWNPKGPDLSNCTSHWVNQLAQKIRSGENAASLANELAKHTKGPVFAGDVSSSVRLMEQLVDILDAQLQELKPSEKDSAGRSYNKLQKREKTCRAYLKAIVDTVDNLLRPEALESWKHMNSSEQAHTATMLLDTLEEGAFVLADNLLEPTRVSMPTENIVLEVAVLSTEGQIQDFKFPLGIKGAGSSIQLSANTVKQNSRNGLAKLVFIIYRSLGQFLSTENATIKLGADFIGRNSTIAVNSHVISVSINKESSRVYLTDPVLFTLPHIDPDNYFNANCSFWNYSERTMMGYWSTQGCKLVDTNKTRTTCACSHLTNFAILMAHREIAYKDGVHELLLTVITWVGIVISLVCLAICIFTFCFFRGLQSDRNTIHKNLCINLFIAEFIFLIGIDKTKYAIACPIFAGLLHFFFLAAFAWMCLEGVQLYLMLVEVFESEYSRKKYYYVAGYLFPATVVGVSAAIDYKSYGTEKACWLHVDNYFIWSFIGPVTFIILLNIIFLVITLCKMVKHSNTLKPDSSRLENIKSWVLGAFALLCLLGLTWSFGLLFINEETIVMAYLFTIFNAFQGVFIFIFHCALQKKVRKEYGKCFRHSYCCGGLPTESPHSSVKASTTRTSARYSSGTQSRIRRMWNDTVRKQSESSFISGDINSTSTLNQGMTGNYLLTNPLLRPHGTNNPYNTLLAETVVCNAPSAPVFNSPGHSLNNARDTSAMDTLPLNGNFNNSYSLHKGDYNDSVQVVDCGLSLNDTAFEKMIISELVHNNLRGSSKTHNLELTLPVKPVIGGSSSEDDAIVADASSLMHSDNPGLELHHKELEAPLIPQRTHSLLYQPQKKVKSEGTDSYVSQLTAEAEDHLQSPNRDSLYTSMPNLRDSPYPESSPDMEEDLSPSRRSENEDIYYKSMPNLGAGHQLQMCYQISRGNSDGYIIPINKEGCIPEGDVREGQMQLVTSL

SEQ ID NO: 5750 - protein, 759 aa, Homo sapiens
MDPGALEMKNFNKIISFLYSTVGALNKIGTDGTQVAMVQFTDDPRTEFKLNAYKTKETLLDAIKHISYKGGNTKTGKAIKYVRDTLFTAESGTRRGIPKVIVVITDGRSQDDVNKISREMQLDGYSIFAIGVADADYSELVSIGSKPSARHVFFVDDFDAFKKIEDELITFVCETASATCPVVHKDGIDLAGFKMMEMFGLVEKDFSSVEGVSMEPGTFNVFPCYQLHKDALVSQPTRYLHPEGLPSDYTISFLFRILPDTPQEPFALWEILNKNSDPLVGVILDNGGKTLTYFNYDQSGDFQTLTFEGPEIRKIFYGSFHKLHIVVSETLVKVVIDCKQVGEKAMNASANITSDGVEVLGKMVRSRGPGGNSAPFQLQMFDIVCSTSWANTDKCCELPGLRDDESCPDLPHSCSCSETNEVALGPAGPPGGPGLRGPKGQQGEPGPKGPDGPRGEIGLPGPQGPPGPQGPSGLSIQGMPGMPGEKGEKGDTGLPGPQGIPGGVGSPGRDGSPGQRGLPGKDGSSGPPGPPGPIGIPGTPGVPGITGSMGPQGALGPPGVPGAKGERGERGDLQSQAMVRSVARQVCEQLIQSHMARYTAILNQIPSHSSSIRTVQGPPGEPGRPGSPGAPGEQGPPGTPGFPGNAGVPGTPGERGLTGIKGEKGNPGVGTQGPRGPPGPAGPSGESRPGSPGPPGSPGPRGPPGHLGVPGPQGPSGQPGYCDPSSCSAYGVRAPHPDQPEFTPVQDELEAMELWGPGV

SEQ ID NO: 5751 - protein, 220 aa, Homo sapiens
MAGLSRGSARALLAALLASTLLALLVSPARGRGGRDHGDWDEASRLPPLPPREDAARVARFVTHVSDWGALATISTLEAVRGRPFADVLSLSDGPPGAGSGVPYFYLSPLQLSVSNLQENPYATLTMTLAQTNFCKKHGFDPQSPLCVHIMLSGTVTKVNETEMDIAKHSLFIRHPEMKTWPSSHNWFFAKLNITNIWVLDYFGGPKIVTPEEYYNVTVQ

SEQ ID NO: 5752 - protein, 1306 aa, Homo sapiens
MGAASGRRGPGLLLPLPLLLLLPPQPALALDPGLQPGNFSADEAGAQLFAQSYNSSAEQVLFQSVAASWAHDTNITAENARRQEEAALLSQEFAEAWGQKAKELYEPIWQNFTDPQLRRIIGAVRTLGSANLPLAKRQQYNALLSNMSRIYSTAKVCLPNKTATCWSLDPDLTNILASSRSYAMLLFAWEGWHNAAGIPLKPLYEDFTALSNEAYKQDGFTDTGAYWRSWYNSPTFEDDLEHLYQQLEPLYLNLHAFVRRALHRRYGDRYINLRGPIPAHLLGDMWAQSWENIYDMVVPFPDKPNLDVTSTMLQQGWNATHMFRVAEEFFTSLELSPMPPEFWEGSMLEKPADGREVVCHASAWDFYNRKDFRIKQCTRVTMDQLSTVHHEMGHIQYYLQYKDLPVSLRRGANPGFHEAIGDVLALSVSTPEHLHKIGLLDRVTNDTESDINYLLKMALEKIAFLPFGYLVDQWRWGVFSGRTPPSRYNFDWWYLRTKYQGICPPVTRNETHFDAGAKFHVPNVTPYIRYFVSFVLQFQFHEALCKEAGYEGPLHQCDIYRSTKAGAKLRKVLQAGSSRPWQEVLKDMVGLDALDAQPLLKYFQPVTQWLQEQNQQNGEVLGWPEYQWHPPLPDNYPEGIDLVTDEAEASKFVEEYDRTSQVVWNEYAEANWNYNTNITTETSKILLQKNMQIANHTLKYGTQARKFDVNQLQNTTIKRIIKKVQDLERAALPAQELEEYNKILLDMETTYSVATVCHPNGSCLQLEPDLTNVMATSRKYEDLLWAWEGWRDKAGRAILQFYPKYVELINQAARLNGYVDAGDSWRSMYETPSLEQDLERLFQELQPLYLNLHAYVRRALHRHYGAQHINLEGPIPAHLLGNMWAQTWSNIYDLVVPFPSAPSMDTTEAMLKQGWTPRRMFKEADDFFTSLGLLPVPPEFWNKSMLEKPTDGREVVCHASAWDFYNGKDFRIKQCTTVNLEDLVVAHHEMGHIQYFMQYKDLPVALREGANPGFHEAIGDVLALSVSTPKHLHSLNLLSSEGGSDEHDINFLMKMALDKIAFIPFSYLVDQWRWRVFDGSITKENYNQEWWSLRLKYQGLCPPVPRTQGDFDPGAKFHIPSSVPYIRYFVSFIIQFQFHEALCQAAGHTGPLHKCDIYQSKEAGQRLATAMKLGFSRPWPEAMQLITGQPNMSASAMLSYFKPLLDWLRTENELHGEKLGWPQYNWTPNSARSEGPLPDSGRVSFLGLDLDAQQARVGQWLLLFLGIALLVATLGLSQRLFSIRHRSLHRHSHGPQFGSEVELRHS

SEQ ID NO: 5753 - protein, 4544 aa, Homo sapiens
MLTPPLLLLLPLLSALVAAAIDAPKTCSPKQFACRDQITCISKGWRCDGERDCPDGSDEAPEICPQSKAQRCQPNEHNCLGTELCVPMSRLCNGVQDCMDGSDEGPHCRELQGNCSRLGCQHHCVPTLDGPTCYCNSSFQLQADGKTCKDFDECSVYGTCSQLCTNTDGSFICGCVEGYLLQPDNRSCKAKNEPVDRPPVLLIANSQNILATYLSGAQVSTITPTSTRQTTAMDFSYANETVCWVHVGDSAAQTQLKCARMPGLKGFVDEHTINISLSLHHVEQMAIDWLTGNFYFVDDIDDRIFVCNRNGDTCVTLLDLELYNPKGIALDPAMGKVFFTDYGQIPKVERCDMDGQNRTKLVDSKIVFPHGITLDLVSRLVYWADAYLDYIEVVDYEGKGRQTIIQGILIEHLYGLTVFENYLYATNSDNANAQQKTSVIRVNRFNSTEYQVVTRVDKGGALHIYHQRRQPRVRSHACENDQYGKPGGCSDICLLANSHKARTCRCRSGFSLGSDGKSCKKPEHELFLVYGKGRPGIIRGMDMGAKVPDEHMIPIENLMNPRALDFHAETGFIYFADTTSYLIGRQKIDGTERETILKDGIHNVEGVAVDWMGDNLYWTDDGPKKTISVARLEKAAQTRKTLIEGKMTHPRAIVVDPLNGWMYWTDWEEDPKDSRRGRLERAWMDGSHRDIFVTSKTVLWPNGLSLDIPAGRLYWVDAFYDRIETILLNGTDRKIVYEGPELNHAFGLCHHGNYLFWTEYRSGSVYRLERGVGGAPPTVTLLRSERPPIFEIRMYDAQQQQVGTNKCRVNNGGCSSLCLATPGSRQCACAEDQVLDADGVTCLANPSYVPPPQCQPGEFACANSRCIQERWKCDGDNDCLDNSDEAPALCHQHTCPSDRFKCENNRCIPNRWLCDGDNDCGNSEDESNATCSARTCPPNQFSCASGRCIPISWTCDLDDDCGDRSDESASCAYPTCFPLTQFTCNNGRCININWRCDNDNDCGDNSDEAGCSHSCSSTQFKCNSGRCIPEHWTCDGDNDCGDYSDETHANCTNQATRPPGGCHTDEFQCRLDGLCIPLRWRCDGDTDCMDSSDEKSCEGVTHVCDPSVKFGCKDSARCISKAWVCDGDNDCEDNSDEENCESLACRPPSHPCANNTSVCLPPDKLCDGNDDCGDGSDEGELCDQCSLNNGGCSHNCSVAPGEGIVCSCPLGMELGPDNHTCQIQSYCAKHLKCSQKCDQNKFSVKCSCYEGWVLEPDGESCRSLDPFKPFIIFSNRHEIRRIDLHKGDYSVLVPGLRNTIALDFHLSQSALYWTDVVEDKIYRGKLLDNGALTSFEVVIQYGLATPEGLAVDWIAGNIYWVESNLDQIEVAKLDGTLRTTLLAGDIEHPRAIALDPRDGILFWTDWDASLPRIEAASMSGAGRRTVHRETGSGGWPNGLTVDYLEKRILWIDARSDAIYSARYDGSGHMEVLRGHEFLSHPFAVTLYGGEVYWTDWRTNTLAKANKWTGHNVTVVQRTNTQPFDLQVYHPSRQPMAPNPCEANGGQGPCSHLCLINYNRTVSCACPHLMKLHKDNTTCYEFKKFLLYARQMEIRGVDLDAPYYNYIISFTVPDIDNVTVLDYDAREQRVYWSDVRTQAIKRAFINGTGVETVVSADLPNAHGLAVDWVSRNLFWTSYDTNKKQINVARLDGSFKNAVVQGLEQPHGLVVHPLRGKLYWTDGDNISMANMDGSNRTLLFSGQKGPVGLAIDFPESKLYWISSGNHTINRCNLDGSGLEVIDAMRSQLGKATALAIMGDKLWWADQVSEKMGTCSKADGSGSVVLRNSTTLVMHMKVYDESIQLDHKGTNPCSVNNGDCSQLCLPTSETTRSCMCTAGYSLRSGQQACEGVGSFLLYSVHEGIRGIPLDPNDKSDALVPVSGTSLAVGIDFHAENDTIYWVDMGLSTISRAKRDQTWREDVVTNGIGRVEGIAVDWIAGNIYWTDQGFDVIEVARLNGSFRYVVISQGLDKPRAITVHPEKGYLFWTEWGQYPRIERSRLDGTERVVLVNVSISWPNGISVDYQDGKLYWCDARTDKIERIDLETGENREVVLSSNNMDMFSVSVFEDFIYWSDRTHANGSIKRGSKDNATDSVPLRTGIGVQLKDIKVFNRDRQKGTNVCAVANGGCQQLCLYRGRGQRACACAHGMLAEDGASCREYAGYLLYSERTILKSIHLSDERNLNAPVQPFEDPEHMKNVIALAFDYRAGTSPGTPNRIFFSDIHFGNIQQINDDGSRRITIVENVGSVEGLAYHRGWDTLYWTSYTTSTITRHTVDQTRPGAFERETVITMSGDDHPRAFVLDECQNLMFWTNWNEQHPSIMRAALSGANVLTLIEKDIRTPNGLAIDHRAEKLYFSDATLDKIERCEYDGSHRYVILKSEPVHPFGLAVYGEHIFWTDWVRRAVQRANKHVGSNMKLLRVDIPQQPMGIIAVANDTNSCELSPCRINNGGCQDLCLLTHQGHVNCSCRGGRILQDDLTCRAVNSSCRAQDEFECANGECINFSLTCDGVPHCKDKSDEKPSYCNSRRCKKTFRQCSNGRCVSNMLWCNGADDCGDGSDEIPCNKTACGVGEFRCRDGTCIGNSSRCNQFVDCEDASDEMNCSATDCSSYFRLGVKGVLFQPCERTSLCYAPSWVCDGANDCGDYSDERDCPGVKRPRCPLNYFACPSGRCIPMSWTCDKEDDCEHGEDETHCNKFCSEAQFECQNHRCISKQWLCDGSDDCGDGSDEAAHCEGKTCGPSSFSCPGTHVCVPERWLCDGDKDCADGADESIAAGCLYNSTCDDREFMCQNRQCIPKHFVCDHDRDCADGSDESPECEYPTCGPSEFRCANGRCLSSRQWECDGENDCHDQSDEAPKNPHCTSPEHKCNASSQFLCSSGRCVAEALLCNGQDDCGDSSDERGCHINECLSRKLSGCSQDCEDLKIGFKCRCRPGFRLKDDGRTCADVDECSTTFPCSQRCINTHGSYKCLCVEGYAPRGGDPHSCKAVTDEEPFLIFANRYYLRKLNLDGSNYTLLKQGLNNAVALDFDYREQMIYWTDVTTQGSMIRRMHLNGSNVQVLHRTGLSNPDGLAVDWVGGNLYWCDKGRDTIEVSKLNGAYRTVLVSSGLREPRALVVDVQNGYLYWTDWGDHSLIGRIGMDGSSRSVIVDTKITWPNGLTLDYVTERIYWADAREDYIEFASLDGSNRHVVLSQDIPHIFALTLFEDYVYWTDWETKSINRAHKTTGTNKTLLISTLHRPMDLHVFHALRQPDVPNHPCKVNNGGCSNLCLLSPGGGHKCACPTNFYLGSDGRTCVSNCTASQFVCKNDKCIPFWWKCDTEDDCGDHSDEPPDCPEFKCRPGQFQCSTGICTNPAFICDGDNDCQDNSDEANCDIHVCLPSQFKCTNTNRCIPGIFRCNGQDNCGDGEDERDCPEVTCAPNQFQCSITKRCIPRVWVCDRDNDCVDGSDEPANCTQMTCGVDEFRCKDSGRCIPARWKCDGEDDCGDGSDEPKEECDERTCEPYQFRCKNNRCVPGRWQCDYDNDCGDNSDEESCTPRPCSESEFSCANGRCIAGRWKCDGDHDCADGSDEKDCTPRCDMDQFQCKSGHCIPLRWRCDADADCMDGSDEEACGTGVRTCPLDEFQCNNTLCKPLAWKCDGEDDCGDNSDENPEECARFVCPPNRPFRCKNDRVCLWIGRQCDGTDNCGDGTDEEDCEPPTAHTTHCKDKKEFLCRNQRCLSSSLRCNMFDDCGDGSDEEDCSIDPKLTSCATNASICGDEARCVRTEKAAYCACRSGFHTVPGQPGCQDINECLRFGTCSQLCNNTKGGHLCSCARNFMKTHNTCKAEGSEYQVLYIADDNEIRSLFPGHPHSAYEQAFQGDESVRIDAMDVHVKAGRVYWTNWHTGTISYRSLPPAAPPTTSNRHRRQIDRGVTHLNISGLKMPRGIAIDWVAGNVYWTDSGRDVIEVAQMKGENRKTLISGMIDEPHAIVVDPLRGTMYWSDWGNHPKIETAAMDGTLRETLVQDNIQWPTGLAVDYHNERLYWADAKLSVIGSIRLNGTDPIVAADSKRGLSHPFSIDVFEDYIYGVTYINNRVFKIHKFGHSPLVNLTGGLSHASDVVLYHQHKQPEVTNPCDRKKCEWLCLLSPSGPVCTCPNGKRLDNGTCVPVPSPTPPPDAPRPGTCNLQCFNGGSCFLNARRQPKCRCQPRYTGDKCELDQCWEHCRNGGTCAASPSGMPTCRCPTGFTGPKCTQQVCAGYCANNSTCTVNQGNQPQCRCLPGFLGDRCQYRQCSGYCENFGTCQMAADGSRQCRCTAYFEGSRCEVNKCSRCLEGACVVNKQSGDVTCNCTDGRVAPSCLTCVGHCSNGGSCTMNSKMMPECQCPPHMTGPRCEEHVFSQQQPGHIASILIPLLLLLLLVLVAGVVFWYKRRVQGAKGFQHQRMTNGAMNVEIGNPTYKMYEGGEPDDVGGLLDADFALDPDKPTNFTNPVYATLYMGGHGSRHSLASTDEKRELLGRGPEDEIGDPLA

SEQ ID NO: 5754 - protein, 3086 aa, Homo sapiens
GKASDTERGGVLTSNNSSDSPTGSGYNTDVSDDNLPCDRTSPSSDLNGNSVSDEQDEGVESDDLKKDLPLMPPPPDSCSMKLTIKEIWFSFAAPTNVRSHTHAFSRQLNLLSTATPAVGAWLVPIDQLKSSLNKLETEGTLRICAVMGCIMTEALENKSVHFPLRSKYNRLTKVARFLQENPSCLLCNILHHYLHQANYSIIDDATMSDGLPALVTLKKGLVALARQWMKFIVVTPAFKGVSLHRPAQPLKPQIAMDHEHEDGLGLDNGGGLQSDTSADGAEFEFDAATVSEHTMLLEGTANRPPPGSSGPVTGAEIMRKLSKTHTHSDSALKIKGIHPYHSLSYTSGDTATDSPVHVGRAGMPVKDSPRKESLLSYLTGSFPSLHNLLEGTPQRSSAAVKSSSLTRTGNTVATDMLSEHPLLSEPSSVSFYNWMSNAVGNRGSVLQESPVTKSGHNSLPTGVAPNLPTIPSASDFNTVLSSDQNTLDGTHSQHSTSQDDVAGVEEANQGFPAVQLADAQVVFKPLLSHTGIQSQDTMPFCYRMYFGEHLSFSGTLDCLRADIVDSDTAKERKGKRARRQGHVNLPPLEFKPALMLGTFSISAVVMEKSVCTPQNSTSALSFHDLSKRYYNTFHCNFTISCQSISQHVDMALVRLIHQFSTMIDDIKATQTDIKLSRYTAGSASPTPTFKTRKHRDFRSSDFSRSSRGSLNGGNRVNNAKNKRTNNENNKKESRNKNSLGRSERRTSKVSRKGSKDVVDHMTIHMDDSDSITVSEQSEPSAECWQNMYKLLNFYSLISDPTGILEKSSETFGPAGVRSPTEPTCKVVFENEQDNSSLTKTQRKRSLVTSEPQHVTLIVFGIGMVNRTHLEADIGGLTMESELKRIHGSFTLKEKMKDVLHQKMTETCATAHIGGVNIVLLEGITPNIQLEDFPTSPTSTAKQEFLTVVKCSIAKSQALYSAQRGLKTNNAAVFKVGAISINIPQHPATLHSMMVRSSHQLSKQISDLIRQPSTAPQPVKEDIATPLPSEKTPTSVNQTPVETNEFPQLPEGLEKKPIVLKFSAMLDGIAIGAALLPSLKAEYKMGRMRSHGMTGAQTRFTFELPNHRLRFTSKVSATDMSTIPPSASLNLPPVTMSGKYIMEEHDSYSDQVWSIDELPSKQGYYLQGNYLRCVAEVGSFEHNLTTDLLNHLVFVQKVFMKEVNEVIQKVSGGEQPIPLWNEHDGTADGDKPKILLYSLNLQFKGIQVTATTPSMRAVRFETGLIELELSNRLQTKASPGSSSYLKLFGKCQVDLNLALGQIVKHQVYEEAGSDFHQVAYFKTRIGLRNALREEISGSSDREAVLITLNRPIVYAQPVAFDRAVLFWLNYKAAYDNWNEQRMALHKDIHMATKEVVDMLPGIQQTSAQAFGTLFLQLTVNDLGICLPITNTAQSNHTGDLDTGSALVLTIESTLITACSSESLVSKGHFKNFCIRFADGFETSWDDWKPEIHGDLVMNACVVPDGTYEVCSRTTGQAAAESSSAGTWTLNVLWKMCGIDVHMDPNIGKRLNALGNTLTTLTGEEDIDDIADLNSVNIADLSDEDEVDTMSPTIHTEATDYRRQAASASQPGELRGRKIMKRIVDIRELNEQAKVIDDLKKLGASEGTINQEIQRYQQLESVAVNDIRRDVRKKLRRSSMRAASLKDKWGLSYKPSYSRSKSISASGRPPLKRMERASSRVGETEELPEIRVDAASPGPRVTFNIQDTFPEETELDLLSVTIEGPSHYSSNSEGSCSVFSSPKTPGGFSPGIPFQTEEGRRDDSLSSTSEDSEKDEKDEDHERERFYIYRKPSHTSRKKATGFAAVHQLFTERWPTTPVNRSLSGTATERNIDFELDIRVEIDSGKCVLHPTTLLQEHDDISLRRSYDRSSRSLDQDSPSKKKKFQTNYASTTHLMTGKKVPSSLQTKPSDLETTVFYIPGVDVKLHYNSKTLKTESPNASRGSSLPRTLSKESKLYGMKDSATSPPSPPLPSTVQSKTNTLLPPQPPPIPAAKGKGSGGVKTAKLYAWVALQSLPEEMVISPCLLDFLEKALETIPITPVERNYTAVSSQDEDMGHFEIPDPMEESTTSLVSSSTSAYSSFPVDVVVYVRVQPSQIKFSCLPVSRVECMLKLPSLDLVFSSNRGELETLGTTYPAETLSPGGNATQSGTKTSASKTGIPGSSGLGSPLGRSRHSSSQSDLTSSSSSSSGLSFTACMSDFSLYVFHPYGAGKQKTAVSGLTPGSGGLGNVDEEPTSVTGRKDSLSINLEFVKVSLSRIRRSGGASFFESQSVSKSASKMDTTLINISAVCDIGSASFKYDMRRLSEILAFPRAWYRRSIARRLFLGDQTINLPTSGPGTPDSIEGVSQHLSPESSRKAYCKTWEQPSQSASFTHMPQSPNVFNEHMTNSTMSPGTVGQSLKSPASIRSRSVSDSSVPRRDSLSKTSTPFNKSNKAASQQGTPWETLVVFAINLKQLNVQMNMSNVMGNTTWTTSGLKSQGRLSVGSNRDREISMSVGLGRSQLDSKGGVVGGTIDVNALEMVAHISEHPNQQPSHKIQITMGSTEARVDYMGSSILMGIFSNADLKLQDEWKVNLYNTLDSSITDKSEIFVHGDLKWDIFQVMISRSTTPDLIKIGMKLQEFFTQQFDTSKRALSTWGPVPYLPPKTMTSNLEKSSQEQLLDAAHHRHWPGVLKVVSGCHISLFQIPLPEDGMQFGGSMSLHGNHMTLACFHGPNFRSKSWALFHLEEPNIAFWTEAQKIWEDGSSDHSTYIVQTLDFHLGHNTMVTKPCGALESPMATITKITRRRHENPPHGVASVKEWFNYVTATRNEELNLLRNVDANNTENSTTVKNSSLLSGFRGGSSYNHETETIFALPRMQLDFKSIHVQEPQEPSLQDASLKPKVECSVVTEFTDHICVTMDAELIMFLHDLVSAYLKEKEKAIFPPRILSTRPGQKSPIIIHDDNSSDKDREDSITYTTVDWRDFMCNTWHLEPTLRLISWTGRKIDPVGVDYILQKLGFHHARTTIPKWLQRGVMDPLDKVLSVLIKKLGTALQDEKEKKGKDKEEH

SEQ ID NO: 5755 - protein, 538 aa, Homo sapiens
MGGSLCAGVFICPSCQVGELRLHALSGSPCGICEQLDVFDTSVTAKKCKLRLLEELEDTWLPYLTPKDDEFYQQWQLKYPKLILREASSVSEELHKEVQEAFLTLHKHGCLFRDLVRIQGKDLLTPVSRILIGNPGCTYKYLNTRLFTVPWPVKGSNIKHTEAEIAAACETFLKLNDYLQIETIQALEELAAKEKANEDAVPLCMSADFPRVGMGSSYNGQDEVDIKSRAAYNVTLLNFMDPQKMPYLKEEPYFGMGKMAVSWHHDENLVDRSAVAVYSYSCEGPEEESEDDSHLEGRDPDIWHVGFKISWDIETPGLAIPLHQGDCYFMLDDLNATHQHCVLAGSQPRFSSTHRVAECSTGTLDYILQRCQLALQNVCDDVDNDDVSLKSFEPAVLKQGEEIHNEVEFEWLRQFWFQGNRYRKCTDWWCQPMAQLEALWKKMEGVTNAVLHEVKREGLPVEQRNEILTAILASLTARQNLRREWHARCQSRIARTLPADQKPECRPYWEKDDASMPLPFDLTDIVSELRGQLLEAKP

SEQ ID NO: 5756 - protein, 2414 aa, Homo sapiens
MAENVVEPGPPSAKRPKLSSPALSASASDGTDFGSLFDLEHDLPDELINSTELGLTNGGDINQLQTSLGMVQDAASKHKQLSELLRSGSSPNLNMGVGGPGQVMASQAQQSSPGLGLINSMVKSPMTQAGLTSPNMGMGTSGPNQGPTQSTGMMNSPVNQPAMGMNTGTNAGMNPGMLAAGNGQGIMPNQVMNGSIGAGRGRQDMQYPNPGMGSAGNLLTEPLQQGSPQMGGQTGLRGPQPLKMGMMNNPNPYGSPYTQNPGQQIGASGLGLQIQTKTVLSNNLSPFAMDKKAVPGGGMPNMGQQPAPQVQQPGLVTPVAQGMGSGAHTADPEKRKLIQQQLVLLLHAHKCQRREQANGEVRQCNLPHCRTMKNVLNHMTHCQSGKSCQVAHCASSRQIISHWKNCTRHDCPVCLPLKNAGDKRNQQPILTGAPVGLGNPSSLGVGQQSAPNLSTVSQIDPSSIERAYAALGLPYQVNQMPTQPQVQAKNQQNQQPGQSPQGMRPMSNMSASPMGVNGGVGVQTPSLLSDSMLHSAINSQNPMMSENASVPSLGPMPTAAQPSTTGIRKQWHEDITQDLRNHLVHKLVQAIFPTPDPAALKDRRMENLVAYARKVEGDMYESANNRAEYYHLLAEKIYKIQKELEEKRRTRLQKQNMLPNAAGMVPVSMNPGPNMGQPQPGMTSNGPLPDPSMIRGSVPNQMMPRITPQSGLNQFGQMSMAQPPIVPRQTPPLQHHGQLAQPGALNPPMGYGPRMQQPSNQGQFLPQTQFPSQGMNVTNIPLAPSSGQAPVSQAQMSSSSCPVNSPIMPPGSQGSHIHCPQLPQPALHQNSPSPVPSRTPTPHHTPPSIGAQQPPATTIPAPVPTPPAMPPGPQSQALHPPPRQTPTPPTTQLPQQVQPSLPAAPSADQPQQQPRSQQSTAASVPTPNAPLLPPQPATPLSQPAVSIEGQVSNPPSTSSTEVNSQAIAEKQPSQEVKMEAKMEVDQPEPADTQPEDISESKVEDCKMESTETEERSTELKTEIKEEEDQPSTSATQSSPAPGQSKKKIFKPEELRQALMPTLEALYRQDPESLPFRQPVDPQLLGIPDYFDIVKSPMDLSTIKRKLDTGQYQEPWQYVDDIWLMFNNAWLYNRKTSRVYKYCSKLSEVFEQEIDPVMQSLGYCCGRKLEFSPQTLCCYGKQLCTIPRDATYYSYQNRYHFCEKCFNEIQGESVSLGDDPSQPQTTINKEQFSKRKNDTLDPELFVECTECGRKMHQICVLHHEIIWPAGFVCDGCLKKSARTRKENKFSAKRLPSTRLGTFLENRVNDFLRRQNHPESGEVTVRVVHASDKTVEVKPGMKARFVDSGEMAESFPYRTKALFAFEEIDGVDLCFFGMHVQEYGSDCPPPNQRRVYISYLDSVHFFRPKCLRTAVYHEILIGYLEYVKKLGYTTGHIWACPPSEGDDYIFHCHPPDQKIPKPKRLQEWYKKMLDKAVSERIVHDYKDIFKQATEDRLTSAKELPYFEGDFWPNVLEESIKELEQEEEERKREENTSNESTDVTKGDSKNAKKKNNKKTSKNKSSLSRGNKKKPGMPNVSNDLSQKLYATMEKHKEVFFVIRLIAGPAANSLPPIVDPDPLIPCDLMDGRDAFLTLARDKHLEFSSLRRAQWSTMCMLVELHTQSQDRFVYTCNECKHHVETRWHCTVCEDYDLCITCYNTKNHDHKMEKLGLGLDDESNNQQAAATQSPGDSRRLSIQRCIQSLVHACQCRNANCSLPSCQKMKRVVQHTKGCKRKTNGGCPICKQLIALCCYHAKHCQENKCPVPFCLNIKQKLRQQQLQHRLQQAQMLRRRMASMQRTGVVGQQQGLPSPTPATPTTPTGQQPTTPQTPQPTSQPQPTPPNSMPPYLPRTQAAGPVSQGKAAGQVTPPTPPQTAQPPLPGPPPTAVEMAMQIQRAAETQRQMAHVQIFQRPIQHQMPPMTPMAPMGMNPPPMTRGPSGHLEPGMGPTGMQQQPPWSQGGLPQPQQLQSGMPRPAMMSVAQHGQPLNMAPQPGLGQVGISPLKPGTVSQQALQNLLRTLRSPSSPLQQQQVLSILHANPQLLAAFIKQRAAKYANSNPQPIPGQPGMPQGQPGLQPPTMPGQQGVHSNPAMQNMNPMQAGVQRAGLPQQQPQQQLQPPMGGMSPQAQQMNMNHNTMPSQFRDILRRQQMMQQQQQQGAGPGIGPGMANHNQFQQPQGVGYPPQPQQRMQHHMQQMQQGNMGQIGQLPQALGAEAGASLQAYQQRLLQQQMGSPVQPNPMSPQQHMLPNQAQSPHLQGQQIPNSLSNQVRSPQPVPSPRPQSQPPHSSPSPRMQPQPSPHHVSPQTSSPHPGLVAAQANPMEQGHFASPDQNSMLSQLASNPGMANLHGASATDLGLSTDNSDLNSNLSQSTLDIH

SEQ ID NO: 5757 - protein, 2327 aa, Homo sapiens
MAENVVEPGPPSAKRPKLSSPALSASASDGTDFGSLFDLEHDLPDELINSTELGLTNGGDINQLQTSLGMVQDAASKHKQLSELLRSGSSPNLNMGVGGPGQVMASQAQQSSPGLGLINSMVKSPMTQAGLTSPNMGMGTSGPNQGPTQSTGMMNSPVNQPAMGMNTGMNAGMNPGMLAAGNGQGIMPNQVMNGSIGAGRGRQNMQYPNPGMGSAGNLLTEPLQQGSPQMGGQTGLRGPQPLKMGMMNNPNPYGSPYTQNPGQQIGASGLGLQIQTKTVLSNNLSPFAMDKKAVPGGGMPNMVQQPGLVTPVAQGMGSGAHTADPEKRKLIQQQLVLLLHAHKCQRREQANGEVRQCNLPHCRTMKNVLNHMTHCQSGKSCQVAHCASSRQIISHWKNCTRHDCPVCLPLKNAGDKRNQQPILTGAPVGLGNPSSLGVGQQSAPNLSTVSQIDPSSIERAYAALGLPYQVNQMPTQPQVQAKNQQNQQPGQSPQGMRPMSNMSNPMMSENASVPSLGPMPTAAQPSTTGIRKQWHEDITQDLRNHLVHKLVQAIFPTPDPAALKDRRMENLVAYARKVEGDMYESANNRAEYYHLLAEKIYKIQKELEEKRRTRLQKQNMLPNAAGMVPVSMNPGPNMGQPQPGMTSSNQLFYNFLPSPLQPSSPILLSLAFLYLISLTLGAFDDFSYSRITIMKQFGDLCFFFQPMGYGPRMQQPSNQGQFLPQTQFPSQGMNVTNIPLAPSSGQAPVSSCPVNSPIMPPGSQGSHIHCPQLPQPALHQNSPSPVPSRTPTPHHTPPSIGAQQPPATTIPAPVPTPPAMPPGPQSQALHPPPRQTPTPPTTQLPQQVQPSLPAAPSADQPQQQPRSQQSTAASVPTPTAPLLPPQPATPLSQPAVSIEGQVSNPPSTSSTEVNSQAIAEKQPSQEVKMEAKMEVDQPEPADTQPEDISESKVEDCKMESTETEERSTELKTEIKEEEDQPSTSATQSSPAPGQSKKKIFKPEELRQALMPTLEALYRQDPESLPFRQPVDPQLLGIPDYFDIVKSPMDLSTIKRKLDTGQYQEPWQYVDDIWLMFNNAWLYNRKTSRVYKYCSKLSEVFEQEIDPVMQSLGYCCGRKLEFSPQTLCCYGKQLCTIPRDATYYSYQNRYHFCEKCFNEIQGESVSLGDDPSQPQTTINKEQFSKRKNDTLDPELFVECTECGRKMHQICVLHHEIIWPAGFVCDGCLKKSARTRKENKFSAKRLPSTRLGTFLENRVNDFLRRQNHPESGEVTVRVVHASDKTVEVKPGMKARFVDSGEMAESFPYRTKALFAFEEIDGVDLCFFGMHVQEYGSDCPPPNQRRVYISYLDSVHFFRPKCLRTAVYHEILIGYLEYVKKLGYTTGHIWACPPSEGDDYIFHCHPPDQKIPKPKRLQEWYKKMLDKAVSERIVHDYKDIFKQATEDRLTSAKELPYFEGDFWPNVLEESIKELEQEEEERKREENTSNESTDVTKGDSKNAKKKNNKKTSKNKSSLSRGNKKKPGMPNVSNDLSQKLYATMEKHKEVFFVIRLIAGPAANSLPPIVDPDPLIPCDLMDGRDAFLTLARDKHLEFSSLRRAQWSTMCMLVELHTQSQDRFVYTCNECKHHVETRWHCTVCEDYDLCITCYNTKNHDHKMEKLGLGLDDESNNQQAAATQSPGDSRRLSIQRCIQSLVHACQCRNANCSLPSCQKMKRVVQHTKGCKRKTNGGCPICKQLIALCCYHAKHCQENKCPVPFCLNIKQKLRQQQLQHRLQQAQMLRRRMASMQRTGVVGQQQGLPSPTPATPTTPTGQQPTTPQTPQPTSQPQPTPPNSMPPYLPRTQAAGPVSQGKAAGQVTPPTPPQTAQPPLPGPPPAAVEMAMQIQRAAETQRQMAHVQIFQRPIQHQMPPMTPMAPMGMNPPPMTRGPSGHLEPGMGPTGMQQQPPWSQGGLPQPQQLQSGMPRPAMMSVAQHGQPLNMAPQPGLGQVGISPLKPGTVSQQALQNLLRTLRSPSSPLQQQQVLSILHANPQLLAAFIKQRAAKYANSNPQPIPGQPGMPQGQPGLQPPTMPGQQGVHSNPAMQNMNPMQAGVQRAGLPQQQPQQQLQPPMGGMSPQAQQMNMNHNTMPSQFRDILRRQQMMQQQQQQGAGPGIGPGMANHNQFQQPQGVGYPPQQQQRMQHHMQQMQQGNMGQIGQLPQALGAEAGASLQAYQQRLLQQQMGSPVQPNPMSPQQHMLPNQAQSPHLQGQQIPNSLSNQVRSPQPVPSPRPQSQPPHSSPSPRMQPQPSPHHVSPQTSSPHPGLVAAQANPMEQGHFASPDQNSMLSQL

SEQ ID NO: 5758 - protein, 3419 aa, Homo sapiens
MPIGSKERPTFFEIFKTRCNKADLGPISLNWFEELSSEAPPYNSEPAEESEHKNNNYEPNLFKTPQRKPSYNQLASTPIIFKEQGLTLPLYQSPVKELDKFKLDLGRNVPNSRHKSLRTVKTKMDQADDVSCPLLNSCLSESPVVLQCTHVTPQRDKSVVCGSLFHTPKFVKGRQTPKHISESLGAEVDPDMSWSSSLATPPTLSSTVLIVRNEEASETVFPHDTTANVKSYFSNHDESLKKNDRFIASVTDSENTNQREAASHGFGKTSGNSFKVNSCKDHIGKSMPNVLEDEVYETVVDTSEEDSFSLCFSKCRTKNLQKVRTSKTRKKIFHEANADECEKSKNQVKEKYSFVSEVEPNDTDPLDSNVANQKPFESGSDKISKEVVPSLACEWSQLTLSGLNGAQMEKIPLLHISSCDQNISEKDLLDTENKRKKDFLTSENSLPRISSLPKSEKPLNEETVVNKRDEEQHLESHTDCILAVKQAISGTSPVASSFQGIKKSIFRIRESPKETFNASFSGHMTDPNFKKETEASESGLEIHTVCSQKEDSLCPNLIDNGSWPATTTQNSVALKNAGLISTLKKKTNKFIYAIHDETSYKGKKIPKDQKSELINCSAQFEANAFEAPLTFANADSGLLHSSVKRSCSQNDSEEPTLSLTSSFGTILRKCSRNETCSNNTVISQDLDYKEAKCNKEKLQLFITPEADSLSCLQEGQCENDPKSKKVSDIKEEVLAAACHPVQHSKVEYSDTDFQSQKSLLYDHENASTLILTPTSKDVLSNLVMISRGKESYKMSDKLKGNNYESDVELTKNIPMEKNQDVCALNENYKNVELLPPEKYMRVASPSRKVQFNQNTNLRVIQKNQEETTSISKITVNPDSEELFSDNENNFVFQVANERNNLALGNTKELHETDLTCVNEPIFKNSTMVLYGDTGDKQATQVSIKKDLVYVLAEENKNSVKQHIKMTLGQDLKSDISLNIDKIPEKNNDYMNKWAGLLGPISNHSFGGSFRTASNKEIKLSEHNIKKSKMFFKDIEEQYPTSLACVEIVNTLALDNQKKLSKPQSINTVSAHLQSSVVVSDCKNSHITPQMLFSKQDFNSNHNLTPSQKAEITELSTILEESGSQFEFTQFRKPSYILQKSTFEVPENQMTILKTTSEECRDADLHVIMNAPSIGQVDSSKQFEGTVEIKRKFAGLLKNDCNKSASGYLTDENEVGFRGFYSAHGTKLNVSTEALQKAVKLFSDIENISEETSAEVHPISLSSSKCHDSVVSMFKIENHNDKTVSEKNNKCQLILQNNIEMTTGTFVEEITENYKRNTENEDNKYTAASRNSHNLEFDGSDSSKNDTVCIHKDETDLLFTDQHNICLKLSGQFMKEGNTQIKEDLSDLTFLEVAKAQEACHGNTSNKEQLTATKTEQNIKDFETSDTFFQTASGKNISVAKESFNKIVNFFDQKPEELHNFSLNSELHSDIRKNKMDILSYEETDIVKHKILKESVPVGTGNQLVTFQGQPERDEKIKEPTLLGFHTASGKKVKIAKESLDKVKNLFDEKEQGTSEITSFSHQWAKTLKYREACKDLELACETIEITAAPKCKEMQNSLNNDKNLVSIETVVPPKLLSDNLCRQTENLKTSKSIFLKVKVHENVEKETAKSPATCYTNQSPYSVIENSALAFYTSCSRKTSVSQTSLLEAKKWLREGIFDGQPERINTADYVGNYLYENNSNSTIAENDKNHLSEKQDTYLSNSSMSNSYSYHSDEVYNDSGYLSKNKLDSGIEPVLKNVEDQKNTSFSKVISNVKDANAYPQTVNEDICVEELVTSSSPCKNKNAAIKLSISNSNNFEVGPPAFRIASGKIVCVSHETIKKVKDIFTDSFSKVIKENNENKSKICQTKIMAGCYEALDDSEDILHNSLDNDECSTHSHKVFADIQSEEILQHNQNMSGLEKVSKISPCDVSLETSDICKCSIGKLHKSVSSANTCGIFSTASGKSVQVSDASLQNARQVFSEIEDSTKQVFSKVLFKSNEHSDQLTREENTAIRTPEHLISQKGFSYNVVNSSAFSGFSTASGKQVSILESSLHKVKGVLEEFDLIRTEHSLHYSPTSRQNVSKILPRVDKRNPEHCVNSEMEKTCSKEFKLSNNLNVEGGSSENNHSIKVSPYLSQFQQDKQQLVLGTKVSLVENIHVLGKEQASPKNVKMEIGKTETFSDVPVKTNIEVCSTYSKDSENYFETEAVEIAKAFMEDDELTDSKLPSHATHSLFTCPENEEMVLSNSRIGKRRGEPLILVGEPSIKRNLLNEFDRIIENQEKSLKASKSTPDGTIKDRRLFMHHVSLEPITCVPFRTTKERQEIQNPNFTAPGQEFLSKSHLYEHLTLEKSSSNLAVSGHPFYQVSATRNEKMRHLITTGRPTKVFVPPFKTKSHFHRVEQCVRNINLEENRQKQNIDGHGSDDSKNKINDNEIHQFNKNNSNQAVAVTFTKCEEEPLDLITSLQNARDIQDMRIKKKQRQRVFPQPGSLYLAKTSTLPRISLKAAVGGQVPSACSHKQLYTYGVSKHCIKINSKNAESFQFHTEDYFGKESLWTGKGIQLADGGWLIPSNDGKAGKEEFYRALCDTPGVDPKLISRIWVYNHYRWIIWKLAAMECAFPKEFANRCLSPERVLLQLKYRQYDTEIDRSRRSAIKKIMERDDTAAKTLVLCVSDIISLSANISETSSNKTSSADTQKVAIIELTDGWYAVKAQLDPPLLAVLKNGRLTVGQKIILHGAELVGSPDACTPLEAPESLMLKISANSTRPARWYTKLGFFPDPRPFPLPLSSLFSDGGNVGCVDVIIQRAYPIQWMEKTSSGLYIFRNEREEEKEAAKYVEAQQKRLEALFTKIQEEFEEHEENTTKPYLPSRALTRQQVRALQDGAELYEAVKNAADPAYLEGYFSEEQLRALNNHRQMLNDKKQAQIQLEIRKAMESAEQKEQGLSRDVTTVWKLRIVSYSKKEKDSVILSIWRPSSDLYSLLTEGKRYRIYHLATSKSKSKSERANIQLAATKKTQYQQLPVSDEILFQIYQPREPLHFSKFLDPDFQPSCSEVDLIGFVVSVVKKTGLAPFVYLSDECYNLLAIKFWIDLNEDIIKPHMLIAASNLQWRPESKSGLLTLFAGDFSVFSASPKEGHFQETFNKMKNTVENIDILCNEAENKLMHILHANDPKWSTPTKDCTSGPYTAQIIPGTGNKLLMSSPNCEIYYQSPLSLCMAKRKSVSTPVSAQMTSKSCKGEKEIDDQKNCKKRRALDFLSRLPLPPPVSPICTFVSPAAQKAFQPPRSCGTKYETPIKKKELNSPQMTPFKKFNEISLLESNSIADEELALINTQALLSGSTGEKQFISVSESTRTAPTSSEDYLRLKRRCTTSLIKEQESSQASTEECEKNKQDTITTKKYI

SEQ ID NO: 5759 - protein, 331 aa, Homo sapiens
MAAGLARLLLLLGLSAGGPAPAGAAKMKVVEEPNAFGVNNPFLPQASRLQAKRDPSPVSDRFCAWTLGISVRSLPGPVHLFRLSGKCFSLVESTYKYEFCPFHNVTQHEQTFRWNAYSGILGIWHEWEIANNTFTGMWMRDGDACRSRSRQSKVELACGKSNRLAHVSEPSTCVYALTFETPLVCHPHALLVYPTLPEALQRQWDQVEQDLADELITPQGHEKLLRTLFEDAGYLKTPEENEPTQLEGGPDSLGFETLENCRKAHKELSKEIKRLKGLLTQHGIPYTRPTGEDWPPGVLAETSNLEHLGHETPRAKSPEQLRGDPGLRGSL

SEQ ID NO: 5760 - protein, 305 aa, Homo sapiens
MAAGLARLLLLLGLSAGGPAPAGAAKMKVVEEPNAFGVNNPFLPQASRLQAKRDPSPVSGPVHLFRLSGKCFSLVESTYKYEFCPFHNVTQHEQTFRWNAYSGILGIWHEWEIANNTFTGMWMRDGDACRSRSRQSKVELACGKSNRLAHVSEPSTCVYALTFETPLVCHPHALLVYPTLPEALQRQWDQVEQDLADELITPQGHEKLLRTLFEDAGYLKTPEENEPTQLEGGPDSLGFETLENCRKAHKELSKEIKRLKGLLTQHGIPYTRPTETSNLEHLGHETPRAKSPEQLRGDPGLRGSL

SEQ ID NO: 5761 - protein, 411 aa, Homo sapiens
MSPARLRPRLHFCLVLLLLLVVPAAWGCGPGRVVGSRRRPPRKLVPLAYKQFSPNVPEKTLGASGRYEGKIARSSERFKELTPNYNPDIIFKDEENTGADRLMTQRCKDRLNSLAISVMNQWPGVKLRVTEGWDEDGHHSEESLHYEGRAVDITTSDRDRNKYGLLARLAVEAGFDWVYYESKAHVHCSVKSEHSAAAKTGGCFPAGAQVRLESGARVALSAVRPGDRVLAMGEDGSPTFSDVLIFLDREPHRLRAFQVIETQDPPRRLALTPAHLLFTADNHTEPAARFRATFASHVQPGQYVLVAGVPGLQPARVAAVSTHVALGAYAPLTKHGTLVVEDVVASCFAAVADHHLAQLAFWPLRLFHSLAWGSWTPGEGVHWYPQLLYRLGRLLLEEGSFHPLGMSGAGS

SEQ ID NO: 5762 - protein, 6339 aa, Homo sapiens
GSKNQQRGQGVRTGVRGRARVCGGPAGTAGSARMSVFLGPGMPSASLLVNLLSALLILFVFGETEIRFTGQTEFVVNETSTTVIRLIIERIGEPANVTAIVSLYGEDAGDFFDTYAAAFIPAGETNRTVYIAVCDDDLPEPDETFIFHLTLQKPSANVKLGWPRTVTVTILSNDNAFGIISFNMLPSIAVSEPKGRNESMPLTLIREKGTYGMVMVTFEVEGGPNPPDEDLSPVKGNITFPPGRATVIYNLTVLDDEVPENDEIFLIQLKSVEGGAEINTSRNSIEIIIKKNDSPVRFLQSIYLVPEEDHILIIPVVRGKDNNGNLIGSDEYEVSISYAVTTGNSTAHAQQNLDFIDLQPNTTVVFPPFIHESHLKFQIVDDTIPEIAESFHIMLLKDTLQGDAVLISPSVVQVTIKPNDKPYGVLSFNSVLFERTVIIDEDRISRYEEITVVRNGGTHGNVSANWVLTRNSTDPSPVTADIRPSSGVLHFAQGQMLATIPLTVVDDDLPEEAEAYLLQILPHTIRGGAEVSEPAELLFYIQDSDDVYGLITFFPMENQKIESSPGERYLSLSFTRLGGTKGDVRLLYSVLYIPAGAVDPLQAKEGILNISRRNDLIFPEQKTQVTTKLPIRNDAFLQNGAHFLVQLETVELLNIIPLIPPISPRFGEICNISLLVTPAIANGEIGFLSNLPIILHEPEDFAAEVVYIPLHRDGTDGQATVYWSLKPSGFNSKAVTPDDIGPFNGSVLFLSGQSDTTINITIKGDDIPEMNETVTLSLDRVNVENQVLKSGYTSRDLIILENDDPGGVFEFSPASRGPYVIKEGESVELHIIRSRGSLVKQFLHYRVEPRDSNEFYGNTGVLEFKPGEREIVITLLARLDGIPELDEHYWVVLSSHGERESKLGSATIVNITILKNDDPHGIIEFVSDGLIVMINESKGDAIYSAVYDVVRNRGNFGDVSVSWVVSPDFTQDVFPVQGTVVFGDQEFSKNITIYSLPDEIPEEMEEFTVILLNGTGGAKVGNRTTATLRIRRNDDPIYFAEPRVVRVQEGETANFTVLRNGSVDVTCMVQYATKDGKATARERDFIPVEKGETLIFEVGSRQQSISIFVNEDGIPETDEPFYIILLNSTGDTVVYQYGVATVIIEANDDPNGIFSLEPIDKAVEEGKTNAFWILRHRGYFGSVSVSWQLFQNDSALQPGQEFYETSGTVNFMDGEEAKPIILHAFPDKIPEFNEFYFLKLVNISGGSPGPGGQLAETNLQVTVMVPFNDDPFGVFILDPECLEREVAEDVLSEDDMSYITNFTILRQQGVFGDVQLGWEILSSEFPAGLPPMIDFLLVGIFPTTVHLQQHMRRHHSGTDALYFTGLEGAFGTVNPKYHPSRNNTIANFTFSAWVMPNANTNGFIIAKDDGNGSIYYGVKIQTNESHVTLSLHYKTLGSNATYIAKTTVMKYLEESVWLHLLIILEDGIIEFYLDGNAMPRGIKSLKGEAITDGPGILRIGAGINGNDRFTGLMQDVRSYERKLTLEEIYELHAMPAKSDLHPISGYLEFRQGETNKSFIISARDDNDEEGEELFILKLVSVYGGARISEENTTARLTIQKSDNANGLFGFTGACIPEIAEEGSTISCVVERTRGALDYVHVFYTISQIETDGINYLVDDFANASGTITFLPWQRSEVLNIYVLDDDIPELNEYFRVTLVSAIPGDGKLGSTPTSGASIDPEKETTDITIKASDHPYGLLQFSTGLPPQPKDAMTLPASSVPHITVEEEDGEIRLLVIRAQGLLGRVTAEFRTVSLTAFSPEDYQNVAGTLEFQPGERYKYIFINITDNSIPELEKSFKVELLNLEGGVAELFRVDGSGSGDGDMEFFLPTIHKRASLGVASQILVTIAASDHAHGVFEFSPESLFVSGTEPEDGYSTVTLNVIRHHGTLSPVTLHWNIDSDPDGDLAFTSGNITFEIGQTSANITVEILPDEDPELDKAFSVSVLSVSSGSLGAHINATLTVLASDDPYGIFIFSEKNRPVKVEEATQNITLSIIRLKGLMGKVLVSYATLDDMEKPPYFPPNLARATQGRDYIPASGFALFGANQSEATIAISILDDDEPERSESVFIELLNSTLVAKVQSRSIPNSPRLGPKVETIAQLIIIANDDAFGTLQLSAPIVRVAENHVGPIINVTRTGGAFADVSVKFKAVPITAIAGEDYSIASSDVVLLEGETSKAVPIYVINDIYPELEESFLVQLMNETTGGARLGALTEAVIIIEASDDPYGLFGFQITKLIVEEPEFNSVKVNLPIIRNSGTLGNVTVQWVATINGQLATGDLRVVSGNVTFAPGETIQTLLLEVLADDVPEIEEVIQVQLTDASGGGTIGLDRIANIIIPANDDPYGTVAFAQMVYRVQEPLERSSCANITVRRSGGHFGRLLLFYSTSDIDVVALAMEEGQDLLSYYESPIQGVPDPLWRTWMNVSAVGEPLYTCATLCLKEQACSAFSFFSASEGPQCFWMTSWISPAVNNSDFWTYRKNMTRVASLFSGQAVAGSDYEPVTRQWAIMQEGDEFANLTVSILPDDFPEMDESFLISLLEVHLMNISASLKNQPTIGQPNISTVVIALNGDAFGVFVIYNISPNTSEDGLFVEVQEQPQTLVELMIHRTGGSLGQVAVEWRVVGGTATEGLDFIGAGEILTFAEGETKKTVILTILDDSEPEDDESIIVSLVYTEGGSRILPSSDTVRVNILANDNVAGIVSFQTASRSVIGHEGEILQFHVIRTFPGRGNVTVNWKIIGQNLELNFANFSGQLFFPEGSLNTTLFVHLLDDNIPEEKEVYQVILYDVRTQGVPPAGIALLDAQGYAAVLTVEASDEPHGVLNFALSSRFVLLQEANITIQLFINREFGSLGAINVTYTTVPGMLSLKNQTVGNLAEPEVDFVPIIGFLILEEGETAAAINITILEDDVPELEEYFLVNLTYVGLTMAASTSFPPRLDSEGLTAQVIIDANDGARGVIEWQQSRFEVNETHGSLTLVAQRSREPLGHVSLFVYAQNLEAQVGLDYIFTPMILHFADGERYKNVNIMILDDDIPEGDEKFQLILTNPSPGLELGKNTIALIIVLANDDGPGVLSFNNSEHFFLREPTALYVQESVAVLYIVREPAQGLFGTVTVQFIVTEVNSSNESKDLTPSKGYIVLEEGVRFKALQISAILDTEPEMDEYFVCTLFNPTGGARLGVHVQTLITVLQNQAPLGLFSISAVENRATSIDIEEANRTVYLNVSRTNGIDLAVSVQWETVSETAFGMRGMDVVFSVFQSFLDESASGWCFFTLENLIYGIMLRKSSVTVYRWQGIFIPVEDLNIENPKTCEAFNIGFSPYFVITHEERNEEKPSLNSVFTFTSGFKLFLVQTIIILESSQVRYFTSDSQDYLIIASQRDDSELTQVFRWNGGSFVLHQKLPVRGVLTVALFNKGGSVFLAISQANARLNSLLFRWSGSGFINFQEVPVSGTTEVEALSSANDIYLIFAENVFLGDQNSIDIFIWEMGQSSFRYFQSVDFAAVNRIHSFTPASGIAHILLIGQDMSALYCWNSERNQFSFVLEVPSAYDVASVTVKSLNSSKNLIALVGAHSHIYELAYISSHSDFIPSSGELIFEPGEREATIAVNILDDTVPEKEESFKVQLKNPKGGAEIGINDSVTITILSNDDAYGIVAFAQNSLYKQVEEMEQDSLVTLNVERLKGTYGRITIAWEADGSISDIFPTSGVILFTEGQVLSTITLTILADNIPELSEVVIVTLTRITTEGVEDSYKGATIDQDRSKSVITTLPNDSPFGLVGWRAASVFIRVAEPKENTTTLQLQIARDKGLLGDIAIHLRAQPNFLLHVDNQATENEDYVLQETIIIMKENIKEAHAEVSILPDDLPELEEGFIVTITEVNLVNSDFSTGQPSVRRPGMEIAEIMIEENDDPRGIFMFHVTRGAGEVITAYEVPPPLNVLQVPVVRLAGSFGAVNVYWKASPDSAGLEDFKPSHGILEFADKQVTAMIEITIIDDAEFELTETFNISLISVAGGGRLGDDVVVTVVIPQNDSPFGVFGFEEKTVMIDESLSSDDPDSYVTLTVVRSPGGKGTVRLEWTIDEKAKHNLSPLNGTLHFDETESQKTIVLHTLQDTVLEEDRRFTIQLISIDEVEISPVKGSASIIIRGDKRASGEVGIAPSSRHILIGEPSAKYNGTAIISLVRGPGILGEVTVFWRIFPPSVGEFAETSGKLTMRDEQSAVIVVIQALNDDIPEEKSFYEFQLTAVSEGGVLSESSSTANITVVASDSPYGRFAFSHEQLRVSEAQRVNITIIRSSGDFGHVRLWYKTMSGTAEAGLDFVPAAGELLFEAGEMRKSLHVEILDDDYPEGPEEFSLTITKVELQGRGYDFTIQENGLQIDQPPEIGNISIVRIIIMKNDNAEGIIEFDPKYTAFEVEEDVGLIMIPVVRLHGTYGYVTADFISQSSSASPGGVDYILHGSTVTFQHGQNLSFINISIIDDNESEFEEPIEILLTGATGGAVLGRHLVSRIIIAKSDSPFGVIRFLNQSKISIANPNSTMILSLVLERTGGLLGEIQVNWETVGPNSQEALLPQNRDIADPVSGLFYFGEGEGGVRTIILTIYPHEEIEVEETFIIKLHLVKGEAKLDSRAKDVTLTIQEFGDPNGVVQFAPETLSKKTYSEPLALEGPLLITFFVRRVKGTFGEIMVYWELSSEFDITEDFLSTSGFFTIADGESEASFDVHLLPDEVPEIEEDYVIQLVSVEGGAELDLEKSITWFSVYANDDPHGVFALYSDRQSILIGQNLIRSIQINITRLAGTFGDVAVGLRISSDHKEQPIVTENAERQLVVKDGATYKVDVVPIKNQVFLSLGSNFTLQLVTVMLVGGRFYGMPTILQEAKSAVLPVSEKAANSQVGFESTAFQLMNITAGTSHVMISRRGTYGALSVAWTTGYAPGLEIPEFIVVGNMTPTLGSLSFSHGEQRKGVFLWTFPSPGWPEAFVLHLSGVQSSAPGGAQLRSGFIVAEIEPMGVFQFSTSSRNIIVSEDTQMIRLHVQRLFGFHSDLIKVSYQTTAGSAKPLEDFEPVQNGELFFQKFQTEVDFEITIINDQLSEIEEFFYINLTSVEIRGLQKFDVNWSPRLNLDFSVAVITILDNDDLAGMDISFPETTVAVAVDTTLIPVETESTTYLSTSKTTTILQPTNVVAIVTEATGVSAIPEKLVTLHGTPAVSEKPDVATVTANVSIHGTFSLGPSIVYIEEEMKNGTFNTAEVLIRRTGGFTGNVSITVKTFGERCAQMEPNALPFRGIYGISNLTWAVEEEDFEEQTLTLIFLDGERERKVSVQILDDDEPEGQEFFYVFLTNPQGGAQIVEEKDDTGFAAFAMVIITGSDLHNGIIGFSEESQSGLELREGAVMRRLHLIVTRQPNRAFEDVKVFWRVTLNKTVVVLQKDGVNLVEELQSVSGTTTCTMGQTKCFISIELKPEKVPQVEVYFFVELYEATAGAAINNSARFAQIKILESDESQSLVYFSVGSRLAVAHKKATLISLQVARDSGTGLMMSVNFSTQELRSAETIGRTIISPAISGKDFVITEGTLVFEPGQRSTVLDVILTPETGSLNSFPKRFQIVLFDPKGGARIDKVYGTANITLVSDADSQAIWGLADQLHQPVNDDILNRVLHTISMKVATENTDEQLSAMMHLIEKITTEGKIQAFSVASRTLFYEILCSLINPKRKDTRGFSHFAEVTENFAFSLLTNVTCGSPGEKSKTILDSCPYLSILALHWYPQQINGHKFEGKEGDYIRIPERLLDVQDAEIMAGKSTCKLVQFTEYSSQQWFISGNNLPTLKNKVLSLSVKGQSSQLLTNDNEVLYRIYAAEPRIIPQTSLCLLWNQAAASWLSDSQFCKVVEETADYVECACSHMSVYAVYARTDNLSSYNEAFFTSGFICISGLCLAVLSHIFCARYSMFAAKLLTHMMAASLGTQILFLASAYASPQLAEESCSAMAAVTHYLYLCQFSWMLIQSVNFWYVLVMNDEHTERRYLLFFLLSWGLPAFVVILLIVILKGIYHQSMSQIYGLIHGDLCFIPNVYAALFTAALVPLTCLVVVFVVFIHAYQVKPQWKAYDDVFRGRTNAAEIPLILYLFALISVTWLWGGLHMAYRHFWMLVLFVIFNSLQGLYVFMVYFILHNQMCCPMKASYTVEMNGHPGPSTAFFTPGSGMPPAGGEISKSTQNLIGAMEEVPPDWERASFQQGSQASPDLKPSPQNGATFPSSGGYGQGSLIADEESQEFDDLIFALKTGAGLSVSDNESGQGSQEGGTLTDSQIVELRRIPIADTHL

SEQ ID NO: 5763 - protein, 1865 aa, Homo sapiens
MIEDKGPRVADYFVVAGLTDVSKPLEEEIHFNDACHKVAKPKEPITDVSVIIKSLGEEVPQDYICIDVTPTGLSADLNNGSLVGPQIYLCYRRGRDKPPLTDLGVLYDWKERLKQGCEIIQSTPYGRPANISGSTSSQRIYITYRRASENMTQNTLAVTDICIIIPSKGESPPHTFCKVDKNLNNSMWGSAVYLCYKKSVAKTNTVSYKAGLICRYPQEDYESFSLPESVPLFCLPMGATIECWPSNSKYPLPVFSTFVLTGASAEKVYGAAIQFYEPYSEENLTEKQRLLLGLTSADGKSDSSKTIHTNKCICLLSHWPFFDAFRKFLTFLYRYSISGPHVLPIEKHISHFMHKVPFPSPQRPRILVQLSPHDNLILSQPVSSPLPLSGGKFSTLLQNLGPENAVTLLVFAVTEHKILIHSLRPSVLTSVTEALVSMIFPFHWPCPYVPLCPLALADVLSAPCPFIVGIDSRYFDLYDPPPDVSCVDVDTNTISQIGDKKNVAWKILPKKPCKNLMNTLNNLHQQLAKLQQRPRDDGLMDLAINDYDFNSGKRLHMIDLEIQEAFLFFMASILKGYRSYLRPITQAPSETATDAASLFALQAFLRSRDRSHQKFYNMMTKTQMFIRFIEECSFVSDKDASLAFFDDCVDKVDMDKSGEVRLIELDESFKSEHTVFVTPPEIPHLPNGEEPPLQYSYNGFPVLRNNLFERPEGFLQAKKNKLPSKSSSPNSPLPMFRRTKQEIKSAHKIAKRYSSIPQMWSRCLLRHCYGLWFICLPAYVKVCHSKVRALKTAYDVLKKMQSKKMDPPDEVCYRILMQLCGQYDQPVLAVRVLFEMQKAGIDPNAITYGYYNKAVLESTWPSRSRSGYFLWTKVRNVVLGVTQFKRALKKHAHLSQTTLSGGQSDLGYNSLSKDEVRRGDTSTEDIQEEKDKKGSDCSSLSESESTKGSADCLPKLSYQNSSSIVRLTGTSNNSAGKISGESMGKESTPELLLISSLEDTNETRNIQSRCFRKRHKSDNETNLQQQVVWGNRNRNLSGGVLMGFMLNRINQEATPGDIVEKLGADAKILSNVISKSTRPNTLDIGKPPLRSKRDSLEKESSDDDTPFDGSNYLADKVDSPVIFDLEDLDSETDVSKAGCVATQNPKRIQRMNSSFSVKPFEKTDVATGFDPLSLLVAETEQQQKEEEEEDEDDSKSISTPSARRDLAEEIVMYMNNMSSPLTSRTPSIDLQRACDDKLNKKSPPLVKACRRSSLPPNSPKPVRLTKSKSYTKSEEKPRDRLWSSPAFSPTCPFREESQDTLTHSSPSFNLDTLLVPKLDVLRNSMFTAGKGVAEKASKWYSRFTMYTTSSKDQSSDRTSLSSVGAQDSESTSLTDEDVCHELEGPISSQETSATSGTKRIDLSRISLESSASLEGSLSKFALPGKSEVTSSFNASNTNIFQNYAMEVLISSCSRCRTCDCLVHDEEIMAGWTADDSNLNTTCPFCGNIFLPFLNIEIRDLRRPGRYFLKSSPSTENMHFPSSISSQTRQSCISTSASGLDTSALSVQGNFDLNSKSKLQENFCTRSIQIPANRSKTAMSKCPIFPMARSISTSGPLDKEDTGRQKLISTGSLPATLQGATDSLGLEWHLPSPDPVTVPYLSPLVVWKELESLLENEGDHAITVADFVDHHPIVFWNLVWYFRRLDLPSNLPGLILSSEHCNKYSKIPRHCMSEDSKYVLIQMLWDNMKLHQDPGQPLYILWNAHTQKYPMVHLLQKSDNSFNQELLKSMVKSIKMNDVYGPMSQILETLNKCPHFKRQRSLYREILFLSLVALGRENIDIDAFDKEYKMAYDRLTPSQVKSTHNCDRPPSTGVMECRKTFGEPYL

SEQ ID NO: 5764 - protein, 1906 aa, Homo sapiens
MIEDKGPRVADYFVVAGLTDVSKPLEEEIHFNDACHKVAKPKEPITDVSVIIKSLGEEVPQDYICIDVTPTGLSADLNNGSLVGPQIYLCYRRGRDKPPLTDLGVLYDWKERLKQGCEIIQSTPYGRPANISGSTSSQRIYITYRRASENMTQNTLAVTDICIIIPSKGESPPHTFCKVDKNLNNSMWGSAVYLCYKKSVAKTNTVSYKAGLICRYPQEDYESFSLPESVPLFCLPMGATIECWPSNSKYPLPVFSTFVLTGASAEKVYGAAIQFYEPYSEENLTEKQRLLLGLTSADGKSDSSKTIHTNKCICLLSHWPFFDAFRKFLTFLYRYSISGPHVLPIEKHISHFMHKVPFPSPQRPRILVQLSPHDNLILSQPVSSPLPLSGGKFSTLLQNLGPENAVTLLVFAVTEHKILIHSLRPSVLTSVTEALVSMIFPFHWPCPYVPLCPLALADVLSAPCPFIVGIDSRYFDLYDPPPDVSCVDVDTNTISQIGDKKNVAWKILPKKPCKNLMNTLNNLHQQLAKLQQRPRDDGLMDLAINDYDFNSGKRLHMIDLEIQEAFLFFMASILKGYRSYLRPITQAPSETATDAASLFALQAFLRSRDRSHQKFYNMMTKTQMFIRFIEECSFVSDKDASLAFFDDCVDKVDMDKSGEVRLIELDESFKSEHTVFVTPPEIPHLPNGEEPPLQYSYNGFPVLRNNLFERPEGFLQAKKNKLPSKSSSPNSPLPMFRRTKQEIKSAHKIAKRYSSIPQMWSRCLLRHCYGLWFICLPAYVKVCHSKVRALKTAYDVLKKMQSKKMDPPDEVCYRILMQLCGQYDQPVLAVRVLFEMQKAGIDPNAITYGYYNKAVLESTWPSRSRSGYFLWTKVRNVVLGVTQFKRALKKHAHLSQTTLSDGSDLDAVSHGSMDSGHGTHTVEQAPFNTGLIKVYATDDRSSTGGQSDLGYNSLSKDEVRRGDTSTEDIQEEKDKKGSDCSSLSESESTKGSADCLPKLSYQNSSSIVRLTGTSNNSAGKISGESMESTPELLLISSLEDTNETRNIQSRCFRKRHKSDNETNLQQQVVWGNRNRNLSGGVLMGFMLNRINQEATPGDIVEKLGADAKILSNVISKSTRPNTLDIGKPPLRSKRDSLEKESSDDDTPFDGSNYLADKVDSPVIFDLEDLDSETDVSKAGCVATQNPKRIQRMNSSFSVKPFEKTDVATGFDPLSLLVAETEQQQKEEEEEDEDDSKSISTPSARRDLAEEIVMYMNNMSSPLTSRTPSIDLQRACDDKLNKKSPPLVKACRRSSLPPNSPKPVRLTKSKSYTKSEEKPRDRLWSSPAFSPTCPFREESQDTLTHSSPSFNLDTLLVPKLDVLRNSMFTAGKGVAEKASKWYSRFTMYTTSSKDQSSDRTSLSSVGAQDSESTSLTDEDVCHELEGPISSQETSATSGTKRIDLSRISLESSASLEGSLSKFALPGKSEVTSSFNASNTNIFQNYAMEVLISSCSRCRTCDCLVHDEEIMAGWTADDSNLNTTCPFCGNIFLPFLNIEIRDLRRPGRYFLKSSPSTENMHFPSSISSQTRQSCISTSASGLDTSALSVQGNFDLNSKSKLQENFCTRSIQIPANRSKTAMSKCPIFPMARSISTSGPLDKEDTGRQKLISTGSLPATLQGATDSLGLEWHLPSPDPVTVPYLSPLVVWKELESLLENEGDHAITVADFVDHHPIVFWNLVWYFRRLDLPSNLPGLILSSEHCNKYSKIPRHCMSEDSKYVLIQMLWDNMKLHQDPGQPLYILWNAHTQKYPMVHLLQKSDNSFNQELLKSMVKSIKMNDVYGPMSQILETLNKCPHFKRQRSLYREILFLSLVALGRENIDIDAFDKEYKMAYDRLTPSQVKSTHNCDRPPSTGVMECRKTFGEPYL

SEQ ID NO: 5765 - protein, 226 aa, Homo sapiens
MSFAESGWRSALRRRGPGTPGPVARPSYSSFTQGDSWGEGEVDEEEGCDQVARDLRAEFSAGAWSEPRKRSVLPPDGNGSPVLPDKRNGIFPAAAGSRAQPRRWPVQVLSILCSLLFAILLAFLLAIAYLIVKELHAENLKNEDDVDTGLLGFWTLLIISLTAGFSCCSFSWTVTYFDSFEPGMFPPTPLSPARFKKLTGHSFHMGYSMAILNGIVAALTVAWCLM

SEQ ID NO: 5766 - protein, 1888 aa, Homo sapiens
MVPLVPALVMLGLVAGAHGDSKPVFIKVPEDQTGLSGGVASFVCQATGEPKPRITWMKKGKKVSSQRFEVIEFDDGAGSVLRIQPLRVQRDEAIYECTATNSLGEINTSAKLSVLEEEQLPPGFPSIDMGPQLKVVEKARTATMLCAAGGNPDPEISWFKDFLPVDPATSNGRIKQLRSGALQIESSEESDQGKYECVATNSAGTRYSAPANLYVRVRRVAPRFSIPPSSQEVMPGGSVNLTCVAVGAPMPYVKWMMGAEELTKEDEMPVGRNVLELSNVVRSANYTCVAISSLGMIEATAQVTVKALPKPPIDLVVTETTATSVTLTWDSGNSEPVTYYGIQYRAAGTEGPFQEVDGVATTRYSIGGLSPFSEYAFRVLAVNSIGRGPPSEAVRARTGEQAPSSPPRRVQARMLSASTMLVQWEPPEEPNGLVRGYRVYYTPDSRRPPNAWHKHNTDAGLLTTVGSLLPGITYSLRVLAFTAVGDGPPSPTIQVKTQQGVPAQPADFQAEVESDTRIQLSWLLPPQERIIMYELVYWAAEDEDQQHKVTFDPTSSYTLEDLKPDTLYRFQLAARSDMGVGVFTPTIEARTAQSTPSAPPQKVMCVSMGSTTVRVSWVPPPADSRNGVITQYSVAHEAVDGEDRGRHVVDGISREHSSWDLVGLEKWTEYRVWVRAHTDVGPGPESSPVLVRTDEDVPSGPPRKVEVEPLNSTAVHVYWKLPVPSKQHGQIRGYQVTYVRLENGEPRGLPIIQDVMLAEAQETTISGLTPETTYSVTVAAYTTKGDGARSKPKIVTTTGAVPGRPTMMISTTAMNTALLQWHPPKELPGELLGYRLQYCRADEARPNTIDFGKDDQHFTVTGLHKGTTYIFRLAAKNRAGLGEEFEKEIRTPEDLPSGFPQNLHVTGLTTSTTELAWDPPVLAERNGRIISYTVVFRDINSQQELQNITTDTRFTLTGLKPDTTYDIKVRAWTSKGSGPLSPSIQSRTMPVEQVFAKNFRVAAAMKTSVLLSWEVPDSYKSAVPFKILYNGQSVEVDGHSMRKLIADLQPNTEYSFVLMNRGSSAGGLQHLVSIRTAPDLLPHKPLPASAYIEDGRFDLSMPHVQDPSLVRWFYIVVVPIDRVGGSMLTPRWSTPEELELDELLEAIEQGGEEQRRRRRQAERLKPYVAAQLDVLPETFTLGDKKNYRGFYNRPLSPDLSYQCFVLASLKEPMDQKRYASSPYSDEIVVQVTPAQQQEEPEMLWVTGPVLAVILIILIVIAILLFKRKRTHSPSSKDEQSIGLKDSLLAHSSDPVEMRRLNYQTPGMRDHPPIPITDLADNIERLKANDGLKFSQEYESIDPGQQFTWENSNLEVNKPKNRYANVIAYDHSRVILTSIDGVPGSDYINANYIDGYRKQNAYIATQGPLPETMGDFWRMVWEQRTATVVMMTRLEEKSRVKCDQYWPARGTETCGLIQVTLLDTVELATYTVRTFALHKSGSSEKRELRQFQFMAWPDHGVPEYPTPILAFLRRVKACNPLDAGPMVVHCSAGVGRTGCFIVIDAMLERMKHEKTVDIYGHVTCMRSQRNYMVQTEDQYVFIHEALLEAATCGHTEVPARNLYAHIQKLGQVPPGESVTAMELEFKLLASSKAHTSRFISANLPCNKFKNRLVNIMPYELTRVCLQPIRGVEGSDYINASFLDGYRQQKAYIATQGPLAESTEDFWRMLWEHNSTIIVMLTKLREMGREKCHQYWPAERSARYQYFVVDPMAEYNMPQYILREFKVTDARDGQSRTIRQFQFTDWPEQGVPKTGEGFIDFIGQVHKTKEQFGQDGPITVHCSAGVGRTGVFITLSIVLERMRYEGVVDMFQTVKTLRTQRPAMVQTEDQYQLCYRAALEYLGSFDHYAT

SEQ ID NO: 5767 - protein, 1897 aa, Homo sapiens
MVPLVPALVMLGLVAGAHGDSKPVFIKVPEDQTGLSGGVASFVCQATGEPKPRITWMKKGKKVSSQRFEVIEFDDGAGSVLRIQPLRVQRDEAIYECTATNSLGEINTSAKLSVLEEEQLPPGFPSIDMGPQLKVVEKARTATMLCAAGGNPDPEISWFKDFLPVDPATSNGRIKQLRSGALQIESSEESDQGKYECVATNSAGTRYSAPANLYVRVRRVAPRFSIPPSSQEVMPGGSVNLTCVAVGAPMPYVKWMMGAEELTKEDEMPVGRNVLELSNVVRSANYTCVAISSLGMIEATAQVTVKALPKPPIDLVVTETTATSVTLTWDSGNSEPVTYYGIQYRAAGTEGPFQEVDGVATTRYSIGGLSPFSEYAFRVLAVNSIGRGPPSEAVRARTGEQAPSSPPRRVQARMLSASTMLVQWEPPEEPNGLVRGYRVYYTPDSRRPPNAWHKHNTDAGLLTTVGSLLPGITYSLRVLAFTAVGDGPPSPTIQVKTQQGVPAQPADFQAEVESDTRIQLSWLLPPQERIIMYELVYWAAEDEDQQHKVTFDPTSSYTLEDLKPDTLYRFQLAARSDMGVGVFTPTIEARTAQSTPSAPPQKVMCVSMGSTTVRVSWVPPPADSRNGVITQYSVAHEAVDGEDRGRHVVDGISREHSSWDLVGLEKWTEYRVWVRAHTDVGPGPESSPVLVRTDEDVPSGPPRKVEVEPLNSTAVHVYWKLPVPSKQHGQIRGYQVTYVRLENGEPRGLPIIQDVMLAEAQWRPEESEDYETTISGLTPETTYSVTVAAYTTKGDGARSKPKIVTTTGAVPGRPTMMISTTAMNTALLQWHPPKELPGELLGYRLQYCRADEARPNTIDFGKDDQHFTVTGLHKGTTYIFRLAAKNRAGLGEEFEKEIRTPEDLPSGFPQNLHVTGLTTSTTELAWDPPVLAERNGRIISYTVVFRDINSQQELQNITTDTRFTLTGLKPDTTYDIKVRAWTSKGSGPLSPSIQSRTMPVEQVFAKNFRVAAAMKTSVLLSWEVPDSYKSAVPFKILYNGQSVEVDGHSMRKLIADLQPNTEYSFVLMNRGSSAGGLQHLVSIRTAPDLLPHKPLPASAYIEDGRFDLSMPHVQDPSLVRWFYIVVVPIDRVGGSMLTPRWSTPEELELDELLEAIEQGGEEQRRRRRQAERLKPYVAAQLDVLPETFTLGDKKNYRGFYNRPLSPDLSYQCFVLASLKEPMDQKRYASSPYSDEIVVQVTPAQQQEEPEMLWVTGPVLAVILIILIVIAILLFKRKRTHSPSSKDEQSIGLKDSLLAHSSDPVEMRRLNYQTPGMRDHPPIPITDLADNIERLKANDGLKFSQEYESIDPGQQFTWENSNLEVNKPKNRYANVIAYDHSRVILTSIDGVPGSDYINANYIDGYRKQNAYIATQGPLPETMGDFWRMVWEQRTATVVMMTRLEEKSRVKCDQYWPARGTETCGLIQVTLLDTVELATYTVRTFALHKSGSSEKRELRQFQFMAWPDHGVPEYPTPILAFLRRVKACNPLDAGPMVVHCSAGVGRTGCFIVIDAMLERMKHEKTVDIYGHVTCMRSQRNYMVQTEDQYVFIHEALLEAATCGHTEVPARNLYAHIQKLGQVPPGESVTAMELEFKLLASSKAHTSRFISANLPCNKFKNRLVNIMPYELTRVCLQPIRGVEGSDYINASFLDGYRQQKAYIATQGPLAESTEDFWRMLWEHNSTIIVMLTKLREMGREKCHQYWPAERSARYQYFVVDPMAEYNMPQYILREFKVTDARDGQSRTIRQFQFTDWPEQGVPKTGEGFIDFIGQVHKTKEQFGQDGPITVHCSAGVGRTGVFITLSIVLERMRYEGVVDMFQTVKTLRTQRPAMVQTEDQYQLCYRAALEYLGSFDHYAT

SEQ ID NO: 5768 - protein, 348 aa, Homo sapiens
MLHSSFPTSHPHPYPIPSSRPLPPAPCSCPVLALPPHLPAASHRARKAGTQTLASAQAPVQTPAPTLPGPALPGPFPGGRVVRLHPVLLASTVDSYERRNKGAARVIGTLLGTVNKHSVEVTNCFSVSYNESDEVVVDMEFAKNMYELHKKVSPNELILGWYAAGHDITEHSVLIHEYYSREAPNPIHLTVDTSLQNGHMSIKAYVSTLMGVPGRTVGVFTPLTVKYAYYDTECIRVDLIMKTCFSPNRVVGLSSDLQQVGGASAHIQDALSIVLQYAEDILSAKVSADNTIRKVGHFLMSLVNQVPKIVPDDFETMLHSNINDLLMVAYLANLTQSQIALNEKRVNL

SEQ ID NO: 5769 - protein, 2351 aa, Homo sapiens
MFFKMKNEIDNDPESEKCIKDSTIMRREPQNILSPLMLPNLEIPFSVKDIISRIERAQLHRAREDIDMQLSEIMNNVHRIMTRYTLVFNSSSERNVSLTEHKKKQRTNFLEKMATYAKTIEIREKTLANILAWLEEWNDVLSEMTLMDVDEHHHWIAQMELLPDTLKAIENNVKILSRFSTSFLDEKKKQKKKILSRGTLWKSWKERVIKRPSTARALRPDQMISDQLATNTKVSEIQGMLQELIGTTMFSTLENNAIKYISSTIVNLSTALSMLNDELKCVNFQSSTVYAHETSEAEKELSLKIIRDLSNENEMLQQKLQDAEEKCEQLIRSKIVIEQLYAKLSTSSTLKVLPGPSPQSSRAIIKVGDTEDNMDNILDKELENIVDEVQRKETKDSGIKWDSTISYTAQAERTPDLTELRQQPVASEDISEDSTKDNVSLKKGDFYQEDETDEYQSWKRSHKKATYVYETSGPNLSDNKSGQKVSEAKPSQYYELQVLKKKRKEMKSFSEDKSKSPTEAKRKHLSLTETKSQGGKSGTSMMMLEQFRKVKRESPFDKRPTAAEIKVEPTTESLDKEGKGEIRSLVEPLSMIQFDDTAEPQKGKIKGKKHHISSGTITSKEEKTEEKEELTKQVKSHQLVKSLSRVAKETSESTRVLESPDGKSEQSNLEEFQEAIMAFLKQKIDNIGKAFDKKTVPKEEELLKRAEAEKLGIIKAKMEEYFQKVAETVTKILRKYKDTKKEEQVGEKPIKQKKVVSFMPGLHFQKSPISAKSESSTLLSYESTDPVINNLIQMILAEIESERDIPTVSTVQKDHKEKEKQRQEQYLQEGQEQMSGMSLKQQLLGERNLLKEHYEKISENWEEKKAWLQMKEGKQEQQSQKQWQEEEMWKEEQKQATPKQAEQEEKQKQRGQEEEELPKSSLQRLEEGTQKMKTQGLLLEKENGQMRQIQKEAKHLGPHRRREKGKEKQKPERGLEDLERQIKTKDQMQMKETQPKELEKMVIQTPMTLSPRWKSVLKDVQRSYEGKEFQRNLKTLENLPDEKEPISITPPPSLQYSLPGALPISGQPLTKCIHLTPQQAQEVGITLTPQQAQAQGITLTLQQAQELGIPLTPQQAQALEILFTPQQAQALGIPLTPQQTQVQGITLTPQQDQAPGISLTTQQAQKLGIPLTPQQAQALGIPLTPQQAQELGIPLTPQQAQALRVSLTPQQAQELGIPLTPQQAQALGITLTLQQAQQLGIPLTPQQAQALGITLTPKQVQELGIPLTPQQAQALGITLTPKQAQELGIPLNPQQAQTLGIPLTPKQAQALGIPFTPQQAQALGIPLTPQQAQTQEITLTPQQAQALGMPLTTQQAQELGIPLTPQHAQALGMPLTTQQAQELGIPLTPQQAQALGMPLTTQQAQELGIPLTPQQAQELGIPFTPQQAQAQEITLTPQQAQALGMPLTAQQAQELGITLTPQQAQELGIPLTPQQAQALGIPLIPPQAQELGIPLTPQQAQALGILLIPPQAQELGIPLTPQQAQALGIPLIPPQAQELGIPLTPQQVQALGIPLIPPQAQELEIPLTPQQAQALGIPLTPQQAQELGIPLTPQQAQELGIPLTPQQAQAQGIPLTPQQAQALGISLTPQQAQAQGITLTPQQAQALGVPITPVNAWVSAVTLTSEQTHALESPMNLEQAQEQLLKLGVPLTLDKAHTLGSPLTLKQVQWSHRPFQKSKASLPTGQSIISRLSPSLRLSLASSAPTAEKSSIFGVSSTPLQISRVPLNQGPFAPGKPLEMGILSEPGKLGAPQTLRSSGQTLVYGGQSTSAQFPAPQAPPSPGQLPISRAPPTPGQPFIAGVPPTSGQIPSLWAPLSPGQPLVPEASSIPGDLLESGPLTFSEQLQEFQPPATAEQSPYLQAPSTPGQHLATWTLPGRASSLWIPPTSRHPPTLWPSPAPGKPQKSWSPSVAKKRLAIISSLKSKSVLIHPSAPDFKVAQVPFTTKKFQMSEVSDTSEETQILRDTFAIESFRTFQSHFTKYRTPVYQTPYTDERALLTLMKPTTSPSSLTTLLRTSQISPLEWYQKSRFPPIDKPWILSSVSDTKKPKVMVPPSSPQELEEKRYFVDVEAQKKNLILLNQAIKTCGLPSQLHTMARTLIIEILHMDTVQLGYLFRKYIAYRLIQHARNNIMKRLKAIQNTGKGYEARNLHMMLSRLDDYGKKVMQVWTEKQKSLGQKRNQCLKKMIHVFNQLKKIHELNLSQPIPLIIEEKQIPASTTFVQKPFLKLLMEEDRTSDICKKFRQQEDQTEAIWNVDLSTSSYPIAEKTSMHSLWAQLGGYPDIPRLLQLEVQSTFRKSLASLQSRVKKIPK

SEQ ID NO: 5770 - protein, 141 aa, Homo sapiens
MACTYVSNLGKKQRSVSFLASGLMRVSTGPELRLHHSFVLTGDVGRRICRLLVGLFTKGDTSSKRVHPFSPGPCFLLCDLARVGSSPKINVSPFYQNQTSTQRSCTVFVWQRCSLVGPFQVTVFTMYFHHSLRSISRFSSG

SEQ ID NO: 5771 - protein, 461 aa, Homo sapiens
MEGSKTSNNSTMQVSFVCQRCSQPLKLDTSFKILDRVTIQELTAPLLTTAQAKPGETQEEETNSGEEPFIETPRQDGVSRRFIPPARMMSTESANSFTLIGEASDGGTMENLSRRLKASPTLTLPHFQVTGDLFDIMSGQTDVDHPLCEECTDTLLDQLDTQLNVTENECQNYKRCLEILEQMNEDDSEQLQMELKELALEEERLIQELEDVEKNRKIVAENLEKVQAEAERLDQEEAQYQREYSEFKRQQLELDDELKSVENQMRYAQTQLDKLKKTNVFNATFHIWHSGQFGTINNFRLGRLPSVPVEWNEINAAWGQTVLLLHALANKMGLKFQRYRLVPYGNHSYLESLTDKSKELPLYCSGGLRFFWDNKFDHAMVAFLDCVQQFKEEVEKGETRFCLPYRMDVEKGKIEDTGGSGGSYSIKTQFNSEEQWTKALKFMLTNLKWGLAWVSSQFYNK

SEQ ID NO: 5772 - protein, 548 aa, Homo sapiens
MATSSEEVLLIVKKVRQKKQDGALYLMAERIAWAPEGKDRFTISHMYADIKCQKISPEGKAKIQLQLVLHAGDTTNFHFSNESTAVKERDAVKDLLQQLLPKFKRKANKELEEKNRMLQEDPVLFQLYKDLVVSQVISAEEFWANRLNVNATDSSSTSNHKQDVGISAAFLADVRPQTDGCNGLRYNLTSDIIESIFRTYPAVKMKYAENVPHNMTEKEFWTRFFQSHYFHRDRLNTGSKDLFAECAKIDEKGLKTMVSLGVKNPLLDLTALEDKPLDEGYGISSVPSASNSKSIKENSNAAIIKRFNHHSAMVLAAGLRKQEAQNEQTSEPSNMDGNSGDADCFQPAVKRAKLQESIEYEDLGKNNSVKTIALNLKKSDRYYHGPTPIQSLQYATSQDIINSFQSIRQEMEAYTPKLTQVLSSSAASSTITALSPGGALMQGGTQQAINQMVPNDIQSELKHLYVAVGELLRHFWSCFPVNTPFLEEKVVKMKSNLERFQVTKLCPFQEKIRRQYLSTNLVSHIEEMLQTAYNKLHTWQSRRLMKKT

SEQ ID NO: 5773 - protein, 842 aa, Homo sapiens
MSRPLSDQEKRKQISVRGLAGVENVTELKKNFNRHLHFTLVKDRNVATPRDYYFALAHTVRDHLVGRWIRTQQHYYEKDPKRIYYLSLEFYMGRTLQNTMVNLALENACDEATYQLGLDMEELEEIEEDAGLGNGGLGRLAACFLDSMATLGLAAYGYGIRYEFGIFNQKISGGWQMEEADDWLRYGNPWEKARPEFTLPVHFYGHVEHTSQGAKWVDTQVVLAMPYDTPVPGYRNNVVNTMRLWSAKAPNDFNLKDFNVGGYIQAVLDRNLAENISRVLYPNDNFFEGKELRLKQEYFVVAATLQDIIRRFKSSKFGCRDPVRTNFDAFPDKVAIQLNDTHPSLAIPELMRILVDLERMDWDKAWDVTVRTCAYTNHTVLPEALERWPVHLLETLLPRHLQIIYEINQRFLNRVAAAFPGDVDRLRRMSLVEEGAVKRINMAHLCIAGSHAVNGVARIHSEILKKTIFKDFYELEPHKFQNKTNGITPRRWLVLCNPGLAEVIAERIGEDFISDLDQLRKLLSFVDDEAFIRDVAKVKQENKLKFAAYLEREYKVHINPNSLFDIQVKRIHEYKRQLLNCLHVITLYNRIKREPNKFFVPRTVMIGGKAAPGYHMAKMIIRLVTAIGDVVNHDPAVGDRLRVIFLENYRVSLAEKVIPAADLSEQISTAGTEASGTGNMKFMLNGALTIGTMDGANVEMAEEAGEENFFIFGMRVEDVDKLDQRGYNAQEYYDRIPELRQVIEQLSSGFFSPKQPDLFKDIVNMLMHHDRFKVFADYEDYIKCQEKVSALYKNPREWTRMVIRNIATSGKFSSDRTIAQYAREIWGVEPSRQRLPAPDEAI

SEQ ID NO: 5774 - protein, 126 aa, Homo sapiens
MVEISLKSVISHRASKGDCIPVVHSLQAAPQVSEPQSVVIGESSDCERWWRPLSMVEARGSLSTGSCVPSNSSHPAWFTPREPSDPTSNRSTFHPGDSQKPVKRPGATSISRTASLPLLQSPLCPS

SEQ ID NO: 5775 - protein, 1638 aa, Homo sapiens
SRSLQGPSIIECTASGIWDRAPPACHLVFCGEPPAIKDAVITGNNFTFRNTVTYTCKEGYTLAGLDTIECLADGKWSRSDQQCLAVSCDEPPIVDHASPETAHRLFGDIAFYYCSDGYSLADNSQLLCNAQGKWVPPEGQDMPRCIAHFCEKPPSVSYSILESVSKAKFAAGSVVSFKCMEGFVLNTSAKIECMRGGQWNPSPMSIQCIPVRCGEPPSIMNGYASGSNYSFGAMVAYSCNKGFYIKGEKKSTCEATGQWSSPIPTCHPVSCGEPPKVENGFLEHTTGRIFESEVRYQCNPGYKSVGSPVFVCQANRHWHSESPLMCVPLDCGKPPPIQNGFMKGENFEVGSKVQFFCNEGYELVGDSSWTCQKSGKWNKKSNPKCMPAKCPEPPLLENQLVLKELTTEVGVVTFSCKEGHVLQGPSVLKCLPSQQWNDSFPVCKIVLCTPPPLISFGVPIPSSALHFGSTVKYSCVGGFFLRGNSTTLCQPDGTWSSPLPECVPVECPQPEEIPNGIIDVQGLAYLSTALYTCKPGFELVGNTTTLCGENGHWLGGKPTCKAIECLKPKEILNGKFSYTDLHYGQTVTYSCNRGFRLEGPSALTCLETGDWDVDAPSCNAIHCDSPQPIENGFVEGADYSYGAIIIYSCFPGFQVAGHAMQTCEESGWSSSIPTCMPIDCGLPPHIDFGDCTKLKDDQGYFEQEDDMMEVPYVTPHPPYHLGAVAKTWENTKESPATHSSNFLYGTMVSYTCNPGYELLGNPVLICQEDGTWNGSAPSCISIECDLPTAPENGFLRFTETSMGSAVQYSCKPGHILAGSDLRLCLENRKWSGASPRCEAISCKKPNPVMNGSIKGSNYTYLSTLYYECDPGYVLNGTERRTCQDDKNWDEDEPICIPVDCSSPPVSANGQVRGDEYTFQKEIEYTCNEGFLLEGARSRVCLANGSWSGATPDCVPVRCATPPQLANGVTEGLDYGFMKEVTFHCHEGYILHGAPKLTCQSDGNWDAEIPLCKPVNCGPPEDLAHGFPNGFSFIHGGHIQYQCFPGYKLHGNSSRRCLSNGSWSGSSPSCLPCRCSTPVIEYGTVNGTDFDCGKAARIQCFKGFKLLGLSEITCEADGQWSSGFPHCEHTSCGSLPMIPNAFISETSSWKENVITYSCRSGYVIQGSSDLICTEKGVWSQPYPVCEPLSCGSPPSVANAVATGEAHTYESEVKLRCLEGYTMDTDTDTFTCQKDGRWFPERISCSPKKCPLPENITHILVHGDDFSVNRQVSVSCAEGYTFEGVNISVCQLDGTWEPPFSDESCSPVSCGKPESPEHGFVVGSKYTFESTIIYQCEPGYELEGNRERVCQENRQWSGGVAICKETRCETPLEFLNGKADIENRTTGPNVVYSCNRGYSLEGPSEAHCTENGTWSHPVPLCKPNPCPVPFVIPENALLSEKEFYVDQNVSIKCREGFLLQGHGIITCNPDETWTQTSAKCEKISCGPPAHVENAIARGVHYQYGDMITYSCYSGYMLEGFLRSVCLENGTWTSPPICRAVCRFPCQNGGICQRPNACSCPEGWMGRLCEEPICILPCLNGGRCVAPYQCDCPPGWTGSRCHTAVCQSPCLNGGKCVRPNRCHCLSSWTGHNCSRKRRTGF

SEQ ID NO: 5776 - protein, 457 aa, Homo sapiens
MLGAVKMEGHEPSDWSSYYAEPEGYSSVSNMNAGLGMNGMNTYMSMSAAAMGSGSGNMSAGSMNMSSYVGAGMSPSLAGMSPGAGAMAGMGGSAGAAGVAGMGPHLSPSLSPLGGQAAGAMGGLAPYANMNSMSPMYGQAGLSRARDPKTYRRSYTHAKPPYSYISLITMAIQQSPNKMLTLSEIYQWIMDLFPFYRQNQQRWQNSIRHSLSFNDCFLKVPRSPDKPGKGSFWTLHPDSGNMFENGCYLRRQKRFKCEKQLALKEAAGAAGSGKKAAAGAQASQAQLGEAAGPASETPAGTESPHSSASPCQEHKRGGLGELKGTPAAALSPPEPAPSPGQQQQAAAHLLGPPHHPGLPPEAHLKPEHHYAFNHPFSINNLMSSEQQHHHSHHHHQPHKMDLKAYEQVMHYPGYGSPMPGSLAMGPVTNKTGLDASPLAADTSYYQGVYSRPIMNSS

SEQ ID NO: 5777 - protein, 429 aa, Homo sapiens
MTGKSVKDVDRYQAVLANLLLEEDNKFCADCQSKGPRWASWNIGVFICIRCAGIHRNLGVHISRVKSVNLDQWTQEQIQCMQEMGNGKANRLYEAYLPETFRRPQIDPAVEGFIRDKYEKKKYMDRSLDINAFRKEKDDKWKRGSEPVPEKKLEPVVFEKVKMPQKKEDPQLPRKSSPKSTAPVMDLLGLDAPVACSIANSKTSNTLEKDLDLLASVPSPSSSGSRKVVGSMPTAGSAGSVPENLNLFPEPGSKSEEIGKKQLSKDSILSLYGSQTPQMPTQAMFMAPAQMAYPTAYPSFPGVTPPNSIMGSMMPPPVGMVAQPGASGMVAPMAMPAGYMGGMQASMMGVPNGMMTTQQAGYMAGMAAMPQTVYGVQPAQQLQWNLTQMTQQMAGMNFYGANGMMNYGQSMSGGNGQAANQTLSPQMWK

SEQ ID NO: 5778 - protein, 750 aa, Homo sapiens
MSSKRPASPYGEADGEVAMVTSRQKVEEEESDGLPAFHLPLHVSFPNKPHSEEFQPVSLLTQETCGHRTPTSQHNTMEVDGNKVMSSFAPHNSSTSPQKAEEGGRQSGESLSSTALGTPERRKGSLADVVDTLKQRKMEELIKNEPEETPSIEKLLSKDWKDKLLAMGSGNFGEIKGTPESLAEKERQLMGMINQLTSLREQLLAAHDEQKKLAASQIEKQRQQMELAKQQQEQIARQQQQLLQQQHKINLLQQQIQVQGQLPPLMIPVFPPDQRTLAAAAQQGFLLPPGFSYKAGCSDPYPVQLIPTTMAAAAAATPGLGPLQLQQLYAAQLAAMQVSPGGKLPGIPQGNLGAAVSPTSIHTDKSTNSPPPKSKDEVAQPLNLSAKPKTSDGKSPTSPTSPHMPALRINSGAGPLKASVPAALASPSARVSTIGYLNDHDAVTKAIQEARQMKEQLRREQQVLDGKVAVVNSLGLNNCRTEKEKTTLESLTQQLAVKQNEEGKFSHAMMDFNLSGDSDGSAGVSESRIYRESRGRGSNEPHIKRPMNAFMVWAKDERRKILQAFPDMHNSNISKILGSRWKAMTNLEKQPYYEEQARLSKQHLEKYPDYKYKPRPKRTCLVDGKKLRIGEYKAIMRNRRQEMRQYFNVGQQAQIPIATAGVVYPGAIAMAGMPSPHLPSEHSSVSSSPEPGMPVIQSTYGVKGEEPHIKEEIQAEDINGEIYDEYDEEEDDPDVDYGSDSENHIAGQAN

SEQ ID NO: 5779 - protein, 763 aa, Homo sapiens [sequence omitted]

SEQ ID NO: 5780 - protein, 377 aa, Homo sapiens
MHDEVAQPLNLSAKPKTSDGKSPTSPTSPHMPALRINSGAGPLKASVPAALASPSARVSTIGYLNDHDAVTKAIQEARQMKEQLRREQQVLDGKVAVVNSLGLNNCRTEKEKTTLESLTQQLAVKQNEEGKFSHAMMDFNLSGDSDGSAGVSESRIYRESRGRGSNEPHIKRPMNAFMVWAKDERRKILQAFPDMHNSNISKILGSRWKAMTNLEKQPYYEEQARLSKQHLEKYPDYKYKPRPKRTCLVDGKKLRIGEYKAIMRNRRQEMRQYFNVGQQAQIPIATAGVVYPGAIAMAGMPSPHLPSEHSSVSSSPEPGMPVIQSTYGVKGEEPHIKEEIQAEDINGEIYDEYDEEEDDPDVDYGSDSENHIAGQAN

SEQ ID NO: 5781 - protein, 347 aa, Homo sapiens
MPALRINSGAGPLKASVPAALASPSARVSTIGYLNDHDAVTKAIQEARQMKEQLRREQQVLDGKVAVVNSLGLNNCRTEKEKTTLESLTQQLAVKQNEEGKFSHAMMDFNLSGDSDGSAGVSESRIYRESRGRGSNEPHIKRPMNAFMVWAKDERRKILQAFPDMHNSNISKILGSRWKAMTNLEKQPYYEEQARLSKQHLEKYPDYKYKPRPKRTCLVDGKKLRIGEYKAIMRNRRQEMRQYFNVGQQAQIPIATAGVVYPGAIAMAGMPSPHLPSEHSSVSSSPEPGMPVIQSTYGVKGEEPHIKEEIQAEDINGEIYDEYDEEEDDPDVDYGSDSENHIAGQAN

SEQ ID NO: 5782 - protein, 211 aa, Homo sapiens
MQSAMFLAVQHDCRPMDKSAGSGHKSEEKREKMKRTLLKDWKTRLSYFLQNSSTPGKPKTGKKSKQQAFIKPSPEEAQLWSEAFDELLASKYGLAAFRAFLKSEFCEENIEFWLACEDFKKTKSPQKLSSKARKIYTDFIEKEAPKEINIDFQTKTLIAQNIQEATSGCFTTAQKRVYSLMENNSYPRFLESEFYQDLCKKPQITTEPHAT

SEQ ID NO: 5783 - protein, 1345 aa, Homo sapiens
LTRRLPPIKEAKPRLQKLFRDFWLYSVLMGFAVEGSGLWPEEWYEGVCEIATKSPLLTFPSKEPLRSVLQYNSAMKNDTVTPAELSELRSTIINLLDPPPEVSALINKLDFAMSTYLLSVYRLEYMRVLRSTDPDRFQVMFCYFEDKAIQKDKSGMMQCVIAVADKVFDAFLNMMADKAKTKENEEELERHAQFLLVNFNHIHKRIRRVADKYLSGLVDKFPHLLWSGTVLKTMLDILQTLSLSLSADIHKDQPYYDIPDAPYRITVPDTYEARESIVKDFAARCGMILQEAMKWAPTVTKSHLQEYLNKHQNWVSGLSQHTGLAMATESILHFAGYNKQNTTLGLSERPACVKKDYSNFMASLNLRNRYAGEVLLLGVSLMSGKSIKGHHWPQLVNSCWPREAVLGFSCCWRPLTDVCLVPDCDPQLLHHLCWGPLRMFNEHGMETALACWEWLLAGKDGVEVPFMREMAGAWHMTVEQKFGLFSAEIKEADPLAASEASQPKPCPPEVTPHYIWIDFLVQRFEIAKYCSSDQVEIFSSLLQRSMSLNIGGAKGSMNRHVAAIGPRFKLLTLGLSLLHADVVPNATIRNVLREKIYSTAFDYFSCPPKFPTQGEKRLREDISIMIKFWTAMFSDKKYLTASQLVPPGRWEVCCWGHHMQAIILVASCLMDTCSDSRTEHCKLPLGLESQGRQVASEDYTCALSFLLGMSKKTNRGSQLHKYYMKRRTLLLSLLATEIERLITWYNPLSAPELELDQAGENSVANWRSKYISLSEKQWKDNVNLAWSISPYLAVQLPARFKNTEAIGNEVTRLVRLDPGAVSDVPEAIKFLVTWHTIDADAPELSHVLCWAPTDPPTGLSYFSSMYPPHPLTAQYGVKVLRSFPPDAILFYIPQIVQALRYDKMGYVREYILWAASKSQLLAHQFIWNMKTNIYLDEEGHQKDPDIGDLLDQLVEEITGSLSGPAKDFYQREFDFFNKITNVSAIIKPYPKGDERKKACLSALSEVKVQPGCYLPSNPEAIVLDIDYKSGTPMQSAAKAPYLAKFKVKRCGVSELEKEGLRCRSDSEDECSTQEADGQKISWQAAIFKVGDDCRQDMLALQIIDLFKNIFQLVGLDLFVFPYRVVATAPGCGVIECIPDCTSRDQLGRQTDFGMYDYFTRQYGDESTLAFQQARYNFIRSMAAYSLLLFLLQIKDRHNGNIMLDKKGHIIHIDFGFMFESSPGGNLGWEPDIKLTDEMVMIMGGKMEATPFKWFMEMCVRGYLAVRPYMDAVVSLVTLMLDTGLPCFRGQTIKLLNHKGLIGQVGLPVGRDPRPCWLLESPFTLPWPFRSRTYDMIQYYQNDIPY

SEQ ID NO: 5784 - protein, 623 aa, Homo sapiens
MSCRQFSSSYLSRSGGGGGGGLGSGGSIRSSYSRFSSSGGGGGGGRFSSSSGYGGGSSRVCGRGGGGSFGYSYGGGSGGGFSASSLGGGFGGGSRGFGGASGGGYSSSGGFGGGFGGGSGGGFGGGYGSGFGGFGGFGGGAGGGDGGILTANEKSTMQELNSRLASYLDKVQALEEANNDLENKIQDWYDKKGPAAIQKNYSPYYNTIDDLKDQIVDLTVGNNKTLLDIDNTRMTLDDFRIKFEMEQNLRQGVDADINGLRQVLDNLTMEKSDLEMQYETLQEELMALKKNHKEEMSQLTGQNSGDVNVEINVAPGKDLTKTLNDMRQEYEQLIAKNRKDIENQYETQITQIEHEVSSSGQEVQSSAKEVTQLRHGVQELEIELQSQLSKKAALEKSLEDTKNRYCGQLQMIQEQISNLEAQITDVRQEIECQNQEYSLLLSIKMRLEKEIETYHNLLEGGQEDFESSGAGKIGLGGRGGSGGSYGRGSRGGSGGSYGGGGSGGGYGGGSGSRGGSGGSYGGGSGSGGGSGGGYGGGSGGGHSGGSGGGHSGGSGGNYGGGSGSGGGSGGGYGGGSGSRGGSGGSHGGGSGFGGESGGSYGGGEEASGSGGGYGGGSGKSSHS

SEQ ID NO: 5785 - protein, 1243 aa, Homo sapiens
MENCSAASTFLTDSLELELGTEWCKPPYFSCAVDNRGGGKHFSGESYLCSGALKRLILNLDPLPTNFEEDTLEIFGIQWVTETALVNSSRELFHLFRQQLYNLETLLQSSCDFGKVSTLHCKADNIRQQCVLFLHYVKVFIFRYLKVQNAESHVPVHPYEALEAQLPSVLIDELHGLLLYIGHLSELPSVNIGAFVNQNQIKLFPPSWHLLHLHLDIHWLVLEILYMLGEKLKQVVYGHQFMNLASDNLTNISLFEEHCETLLCDLISLSLNRYDKVRSSESLMSDQCPCLRIKELWVLLIHLLDHRSKWFVSESFWNWLNKLLKTLLEKSSDRRRSSMPVIQSRDPLGFSWWIITHVASFYKFDRHGVPDEMRKVESNWNFVEELLKKSISVQGVILEEQLRMYLHCCLTLCDFWEPNIAIVTILWEYYSKNLNSSFSISWLPFKGLANTMKSPLSMLEMVKTCCCDKQDQELYKSSSSYTIFLCILAKVVKKAMKSNGPHPWKQVKGRIYSKFHQKRMEELTEVGLQNFFSLFLLLAAVAEVEDVASHVLDLLNFLKPAFVMSQRALIWKGHMAFLLMYAQKNLDIGVLAEKFSCAFREKAKEFLVSKNEEMVQRQTIWTLLSIYIDGVQEVFETSYCLYPSHEKLLNDGFSMLLRACRESELRTVLSFLQAVLARIRSMHQQLCQELQRDNVDLFVQSSLSAKERHLAAVASALWRHFFSFLKSQRMSQVVPFSQLADAAADFTLLAMDMPSTAPSDFQPQPVISIIQLFGWDDIICPQVVARYLSHVLQNSTLCEALSHSGYVSFQALTVRSWIRCVLQMYIKNLSGPDDLLIDKNLEEAVEKEYMKQLVKLTRLLFNLSEVKSIFSKAQAEYLSISEDPKKALVRFFEAVGVTYGNVQTLSDKSAMVTKSLEYLGEVLKYIKPYLGKKVFSAGLQLTYGMMGILVKSWAQIFATSKAQKLLFRIIDCLLLPHAVLQQEKELPAPMLSAIQKSLPLYLQGMCIVCCQSQNPNAYLNQLLGNVIEQYIGRFLPASPYVSDLGQHPVLLALRNTATIPPISSLKKCIVQVIRKSYLEYKGSSPPPRLASILAFILQLFKETNTDIYEVELLLPGILKCLVLVSEPQVKRLATENLQYMVKACQVGSEEEPSSQLTSVFRQFIQDYGMRYYYQVYSILETVATLDQQVVIHLISTLTQSLKDSEQKWGLGRNIAQREAYSKLLSHLGQMGQDEMQRLENDNT

SEQ ID NO: 5786 - protein, 853 aa, Homo sapiens
MFLEGVILEEQLRMYLHCCLTLCDFWEPNIAIVTILWEYYSKNLNSSFSISWLPFKGLANTMKSPLSMLEMVKTCCCDKQDQELYKSSSSYTIFLCILAKVVKKAMKSNGPHPWKQVKGRIYSKFHQKRMEELTEVGLQNFFSLFLLLAAVAEVEDVASHVLDLLNFLKPAFVTSQRALIWKGHMAFLLMYAQKNLDIGVLAEKFSCAFREKAKEFLVSKNEEMVQRQTIWTLLSIYIDGVQEVFETSYCLYPSHEKLLNDGFSMLLRACRESELRTVLSFLQAVLARIRSMHQQLCQELQRDNVDLFVQSSLSAKERHLAAVASALWRHFFSFLKSQRMSQVVPFSQLADAAADFTLLAMDMPSTAPSDFQPQPVISIIQLFGWDDIICPQVVARYLSHVLQNSTLCEALSHSGYVSFQALTVRSWIRCVLQMYIKNLSGPDDLLIDKNLEEAVEKEYMKQLVKLTRLLFNLSEVKSIFSKAQVEYLSISEDPKKALVRFFEAVGVTYGNVQTLSDKSAMVTKSLEYLGEVLKYIKPYLGKKVFSAGLQLTYGMMGILVKSWAQIFATSKAQKLLFRIIDCLLLPHAVLQQEKELPAPMLSAIQKSLPLYLQGMCIVCCQSQNPNAYLNQLLGNVIEQYIGRFLPASPYVSDLGQHPVLLALRNTATIPPISSLKKCIVQVIRKSYLEYKGSSPPPRLASILAFILQLFKETNTDIYEVELLLPGILKCLVLVSEPQVKRLATENLQYMVKACQVGSEEEPSSQLTSVFRQFIQDYGMRYYYQVYSILETVATLDQQVVIHLISTLTQSLKDSEQKWGLGRNIAQREAYSKLLSHLGQMGQDEMQRLENDNT

SEQ ID NO: 5787 - protein, 213 aa, Homo sapiens
MVTQFKEKNESLQYETSSPTVQLKIPQLRVSSVSKSQPDGSGLLDVMYQVSKTSSVLEGSALQKLKNILPKQNKIECSGPVTHSSVDSYFLHGDLSPLCLNSKNGTVDGTSENTEDGLDRKDSKQPRKKRGRYRQYDHEIMEEAIAMVMSGKMSVSKAQGIYGVPHSTLEYKVKERSGTLKTPPKKKLRLPDTGLYNMTDSGTGSCKNSSKPV

SEQ ID NO: 5788 - protein, 572 aa, Homo sapiens
IRDTYTQNPDKAKGYFSCIFFEIEETTMSRKQNQKDSSGFIFDLQSNTVLAQGGAFENMKEKINAVRAIVPNKSNNEIILVLQHFDNCVDKTVQAFMEGSASEVLKEWTVTGKKKNKKKKNKPKPAAEPSNGIPDSSKSVSIQEEQSAPSSEKGGMNGYHVNGAINDTESVDSLSEGLETLSIDARELEDPESAMLDTLDRTGSMLQNGVSDFETKSLTMHSIHNSQQPRNAAKSLSRPTTETQFSNMGMEDVPLATSKKLSSNIEKSVKDLQRCTVSLARYRVVVKEEMDASIKKMKQAFAELESCLMDREVALLAEMDKVKAEAMEILLSRQKKAELLKKMTHVAVQMSEQQLVELRADIKHFVSERKYDEDLGRVARFTCDVETLKKSIDSFGQVSHPKNSYSTRSRCSSVTSVSLSSPSDASAASSSTCASPPSLTSANKKNFAPGETPAAIANSSGQPYQPLREVLPGNRRGGQGYRPQGQKSNDPMNQGRHDSMGRYRNSSWYSSGSRYQSAPSQAPGNTIERGQTHSAGTNGTGVSMEPSPPTPSFKKGLPQRKPRTSQTEAVNS

SEQ ID NO: 5789 - protein, 920 aa, Homo sapiens
RCGAGGYEALRGPLGAAGRRARQAWTIAPGSRRRGKAAAQSSVPGAGHAGGGAAPRRPAAAVRPGSPPLAGALTPRPSPLQGPFPGRLLAGPPPRFPGGTMTDTRRRVKVYTLNEDRQWDDRGTGHVSSGYVERLKGMSLLVRAESDGSLLLESKINPNTAYQKQQDTLIVWSEAENYDLALSFQEKAGCDEIWEKICQVQGKDPSVDITQDLVDESEEERFDDMSSPGLELPSCELSRLEEIAELVASSLPSPLRREKLALALENEGYIKKLLELFHVCEDLENIEGLHHLYEIIKGIFLLNRTALFEVMFSEECIMDVIGCLEYDPALSQPRKHREFLTKTAKFKEVIPISDPELKQKIHQTYRVQYIQDMVLPTPSVFEENMLSTLHSFIFFNKVEIVGMLQEDEKFLTDLFAQLTDEATDEEKRQELVNFLKEFCAFSQTLQPQNRDAFFKTLSNMGILPALEVILGMDDTQVRSAATDIFSYLVEYNPSMVREFVMQEAQQNDDDILLINLIIEHMICDTDPELGGAVQLMGLLRTLVDPENMLATANKTEKTEFLGFFYKHCMHVLTAPLLANTTEDKPSKDDFQTAQLLALVLELLTFCVEHHTYHIKNYIINKDILRRVLVLMASKHAFLALCALRFKRKIIGLKDEFYNRYIMKSFLFEPVVKAFLNNGSRYNLMNSAIIEMFEFIRVEDIKSLTAHVIENYWKALEDVDYVQTFKGLKLRFEQQRERQDNPKLDSMRSILRNHRYRRDARTLEDEEEMWFNTDEDDMEDGEAVVSPSDKTKNDDDIMDPISKFMERKKLKESEEKEVLLKTNLSGRQSPSFKLSLSSGTKTNLTSQSSTTNLPGSPGSPGSPGSPGSPGSVPKNTSQTAAITTKGGLVGLVDYPDDDEDDDEDEDKEDTLPLSKKAKFDS

SEQ ID NO: 5790 - protein, 594 aa, Homo sapiens
MTDTRRRVKVYTLNEDRQWDDRGTGHVSSGYVERLKGMSLLVRAESDGSLLLESKINPNTAYQKQQEDEKFLTDLFAQLTDEATDEEKRQELVNFLKEFCAFSQTLQPQNRDAFFKTLSNMGILPALEVILGMDDTQVRSAATDIFSYLVEYNPSMVREFVMQEAQQNDDVSKKLTEQKITSKDILLINLIIEHMICDTDPELGGAVQLMGLLRTLVDPENMLATANKTEKTEFLGFFYKHCMHVLTAPLLANTTEDKPSKDDFQTAQLLALVLELLTFCVEHHTYHIKNYIINKDILRRVLVLMASKHAFLALCALRFKRKIIGLKDEFYNRYIMKSFLFEPVVKAFLNNGSRYNLMNSAIIEMFEFIRVEDIKSLTAHVIENYWKALEDVDYVQTFKGLKLRFEQQRERQDNPKLDSMRSILRNHRYRRDARTLEDEEEMWFNTDEDDMEDGEAVVSPSDKTKNDDDIMDPISKFMERKKLKESEEKEVLLKTNLSGRQSPSFKLSLSSGTKTNLTSQSSTTNLPGSPGSPGSPGSPGSPGSVPKNTSQTAAITTKGGLVGLVDYPDDDEDDDEDEDKEDTLPLSKKAKFDS

SEQ ID NO: 5791 - protein, 1523 aa, Homo sapiens
VQTLGGWVQPETRTKEEIIELLVLEQYLTIIPEKLKPWVRAKKPENCEKLVTLLENYKEMYQPEDDNNSDVTSDDDMTRNRRESSPPHSVHSFSGDRDWDRRGRSRDMEPRDRWSHTRNPRSRMPPRDLSLPVVAKTSFEMDREDDRDSRAYESRSQDAESYQNVVDLAEDRKPHNTIQDNMENYRKLLSLGVQLAEDDGHSHMTQGHSSRSKRSAYPSTSRGLKTMPEAKKSTHRRGICEDESSHGVIMEKFIKDVSRSSKSGRARESSDRSQRFPRMSDDNWKDISLNKRESVIQQRVYEGNAFRGGFRFNSTLVSRKRVLERKRRYHFDTDGKGSIHDQKGCPRKKPFECGSEMRKAMSVSSLSSLSSPSFTESQPIDFGAMPYVCDECGRSFSVISEFVEHQIMHTRENLYEYGESFIHSVAVSEVQKSQVGGKRFECKDCGETFNKSAALAEHRKIHARGYLVECKNQECEEAFMPSPTFSELQKIYGKDKFYECRVCKETFLHSSALIEHQKIHFGDDKDNEREHERERERERGETFRPSPALNEFQKMYGKEKMYECKVCGETFLHSSSLKEHQKIHTRGNPFENKGKVCEETFIPGQSLKRRQKTYNKEKLCDFTDGRDAFMQSSELSEHQKIHSRKNLFEGRGYEKSVIHSGPFTESQKSHTITRPLESDEDEKAFTISSNPYENQKIPTKENVYEAKSYERSVIHSLASVEAQKSHSVAGPSKPKVMAESTIQSFDAINHQRVRAGGNTSEGREYSRSVIHSLVASKPPRSHNGNELVESNEKGESSIYISDLNDKRQKIPARENPCEGGSKNRNYEDSVIQSVFRAKPQKSVPGEGSGEFKKDGEFSVPSSNVREYQKARAKKKYIEHRSNETSVIHSLPFGEQTFRPRGMLYECQECGECFAHSSDLTEHQKIHDREKPSGSRNYEWSVIRSLAPTDPQTSYAQEQYAKEQARNKCKDFRQFFATSEDLNTNQKIYDQEKSHGEESQGENTDGEETHSEETHGQETIEDPVIQGSDMEDPQKDDPDDKIYECEDCGLGFVDLTDLTDHQKVHSRKCLVDSREYTHSVIHTHSISEYQRDYTGEQLYECPKCGESFIHSSFLFEHQRIHEQDQLYSMKGCDDGFIALLPMKPRRNRAAERNPALAGSAIRCLLCGQGFIHSSALNEHMRLHREDDLLEQSQMAEEAIIPGLALTEFQRSQTEERLFECAVCGESFVNPAELADHVTVHKNEPYEYGSSYTHTSFLTEPLKGAIPFYECKDCGKSFIHSTVLTKHKELHLEEEEEDEAAAAAAAAAQEVEANVHVPQVVLRIQGLNVEAAEPEVEAAEPEVEAAEPEVEAAEPNGEAEGPDGEAAEPIGEAGQPNGEAEQPNGDADEPDGAGIEDPEERAEEPEGKAEEPEGDADEPDGVGIEDPEEGEDQEIQVEEPYYDCHECTETFTSSTAFSEHLKTHASMIIFEPANAFGECSGYIERASTSTGGANQADEKYFKCDVCGQLFNDRLSLARHQNTHTG

SEQ ID NO: 5792 - protein, 518 aa, Homo sapiens
PKHLSATKPKKSWAPNLYELDSDLTKEPDVIIGEGPTDSEFFHQRFRNLIYVEFVGPRKTLIKLRNLCLDWLQPETRTKEEIIELLVLEQYLTIIPEKLKPWVRAKKPENCEKLVTLLENYKEMYQPEDDNNSDVTSDDDMTRNRRESSPPHSVHSFSGDRDWDRRGRSRDMEPRDRWSHTRNPRSRMPPRDLSLPVVAKTSFEMDREDDRDSRAYESRSQDAESYQNVVDLAEDRKPHNTIQDNMENYRKLLSLGLKTMPEAKKSTHRRGICEDESSHGVIMEKFIKDVSRSSKSGRARESSDRSQRFPRMSDDNWKDISLNKRESVIQQRVYEGNAFRGGFRFNSTLVSRKRVLERKRRYHFDTDGKGSIHDQKGCPRKKPFECGSEMRKAMSVSSLSSLSSPSFTESQPIDFGAMPYVCDECGRSFSVISEFVEHQIMHTRENLYEYGESFIHSVAVSEVQKSQVGGKRFECKDCGETFNKSAALAEHRKIHARGYLVECKNQECEEAFMPNPCL

SEQ ID NO: 5793 - protein, 1590 aa, Homo sapiens
MLPPKHLSATKPKKSWAPNLYELDSDLTKEPDVIIGEGPTDSEFFHQRFRNLIYVEFVGPRKTLIKLRNLCLDWLQPETRTKEEIIELLVLEQYLTIIPEKLKPWVRAKKPENCEKLVTLLENYKEMYQPEDDNNSDVTSDDDMTRNRRESSPPHSVHSFSGDRDWDRRGRSRDMEPRDRWSHTRNPRSRMPPRDLSLPVVAKTSFEMDREDDRDSRAYESRSQDAESYQNVVDLAEDRKPHNTIQDNMENYRKLLSLGVQLAEDDGHSHMTQGHSSRSKRSAYPSTSRGLKTMPEAKKSTHRRGICEDESSHGVIMEKFIKDVSRSSKSGRARESSDRSQRFPRMSDDNWKDISLNKRESVIQQRVYEGNAFRGGFRFNSTLVSRKRVLERKRRYHFDTDGKGSIHDQKGCPRKKPFECGSEMRKAMSVSSLSSLSSPSFTESQPIDFGAMPYVCDECGRSFSVISEFVEHQIMHTRENLYEYGESFIHSVAVSEVQKSQVGGKRFECKDCGETFNKSAALAEHRKIHARGYLVECKNQECEEAFMPSPTFSELQKIYGKDKFYECRVCKETFLHSSALIEHQKIHFGDDKDNEREHERERERERGETFRPSPALNEFQKMYGKEKMYECKVCGETFLHSSSLKEHQKIHTRGNPFENKGKVCEETFIPGQSLKRRQKTYNKEKLCDFTDGRDAFMQSSELSEHQKIHSRKNLFEGRGYEKSVIHSGPFTESQKSHTITRPLESDEDEKAFTISSNPYENQKIPTKENVYEAKSYERSVIHSLASVEAQKSHSVAGPSKPKVMAESTIQSFDAINHQRVRAGGNTSEGREYSRSVIHSLVASKPPRSHNGNELVESNEKGESSIYISDLNDKRQKIPARENPCEGGSKNRNYEDSVIQSVFRAKPQKSVPGEGSGEFKKDGEFSVPSSNVREYQKARAKKKYIEHRSNETSVIHSLPFGEQTFRPRGMLYECQECGECFAHSSDLTEHQKIHDREKPSGSRNYEWSVIRSLAPTDPQTSYAQEQYAKEQARNKCKDFRQFFATSEDLNTNQKIYDQEKSHGEESQGENTDGEETHSEETHGQETIEDPVIQGSDMEDPQKDDPDDKIYECEDCGLGFVDLTDLTDHQKVHSRKCLVDSREYTHSVIHTHSISEYQRDYTGEQLYECPKCGESFIHSSFLFEHQRIHEQDQLYSMKGCDDGFIALLPMKPRRNRAAERNPALAGSAIRCLLCGQGFIHSSALNEHMRLHREDDLLEQSQMAEEAIIPGLALTEFQRSQTEERLFECAVCGESFVNPAELADHVTVHKNEPYEYGSSYTHTSFLTEPLKGAIPFYECKDCGKSFIHSTVLTKHKELHLEEEEEDEAAAAAAAAAQEVEANVHVPQVVLRIQGLNVEAAEPEVEAAEPEVEAAEPEVEAAEPNGEAEGPDGEAAEPIGEAGQPNGEAEQPNGDADEPDGAGIEDPEERAEEPEGKAEEPEGDADEPDGVGIEDPEEGEDQEIQVEEPYYDCHECTETFTSSTAFSEHLKTHASMIIFEPANAFGECSGYIERASTSTGGANQADEKYFKCDVCGQLFNDRLSLARHQNTHTG

SEQ ID NO: 5794 - protein, 586 aa, Homo sapiens
VQTLGGWVQPETRTKEEIIELLVLEQYLTIIPEKLKPWVRAKKPENCEKLVTLLENYKEMYQPEDDNNSDVTSDDDMTRNRRESSPPHSVHSFSGDRDWDRRGRSRDMEPRDRWSHTRNPRSRMPPRDLSLPVVAKTSFEMDREDDRDSRAYESRSQDAESYQNVVDLAEDRKPHNTIQDNMENYRKLLSLGFLAQDSVPAEKRNTEMLDNLPSAGSQFPDFKHLGTFLVFEELVTFEDVLVDFSPEELSSLSAAQRNLYREVMLENYRNLVSLGHQFSKPDIISRLEEEESYAMETDSRHTVICQGESHDDPLEPHQGNQEKLLTPITMNDPKTLTPERSYGSDEFERSSNLSKQSKDPLGKDPQEGTAPGICTSPQSASQENKHNRCEFCKRTFSTQVALRRHERIHTGKKPYECKQCAEAFYLMPHLNRHQKTHSGRKTSGCNEGRKPSVQCANLCERVRIHSQEDYFECFQCGKAFLQNVHLLQHLKAHEAARVLPPGLSHSKTYLIRYQRKHDYVGERACQCCDCGRVFSRNSYLIQHYRTHTQERPYQCQLCGKCFGRPSYLTQHYQLHSQEKTVECDHC

SEQ ID NO: 5795 - protein, 1148 aa, Homo sapiens
MESLLLPVLLLLAILWTQAAALINLKYSVEEEQRAGTVIANVAKDAREAGFALDPRQASAFRVVSNSAPHLVDINPSSGLLVTKQKIDRDLLCRQSPKCIISLEVMSSSMEICVIKVEIKDLNDNAPSFPAAQIELEISEAASPGTRIPLDSAYDPDSGSFGVQTYELTPNELFGLEIKTRGDGSRFAELVVEKSLDRETQSHYSFRITALDGGDPPRLGTVGLSIKVTDSNDNNPVFSESTYAVSVPENSPPNTPVIRLNASDPDEGTNGQVVYSFYGYVNDRTRELFQIDPHSGLVTVTGALDYEEGHVYELDVQAKDLGPNSIPAHCKVTVSVLDTNDNPPVINLLSVNSELVEVSESAPPGYVIALVRVSDRDSGLNGRVQCRLLGNVPFRLQEYESFSTILVDGRLDREQHDQYNLTIQARDGGVPMLQSAKSFTVLITDENDNHPHFSKPYYQVIVQENNTPGAYLLSVSARDPDLGLNGSVSYQIVPSQVRDMPVFTYVSINPNSGDIYALRSFNHEQTKAFEFKVLAKDGGLPSLQSNATVRVIILDVNDNTPVITAPPLINGTAEVYIPRNSGIGYLVTVVKAEDYDEGENGRVTYDMTEGDRGFFEIDQVNGEVRTTRTFGESSKSSYELIVVAHDHGKTSLSASALVLIYLSPALDAQESMGSVNLSLIFIIALGSIAGILFVTMIFVAIKCKRDNKEIRTYNCSNCLTITCLLGCFIKGQNSKCLHCISVSPISEEQDKKTEEKVSLRGKRIAEYSYGHQKKSSKKKKISKNDIRLVPRDVEETDKMNVVSCSSLTSSLNYFDYHQQTLPLGCRRSESTFLNVENQNTRNTSANHIYHHSFNSQGPQQPDLIINGVPLPETENYSFDSNYVNSRAHLIKSSSTFKDLEGNSLKDSGHEESDQTDSEHDVQRSLYCDTAVNDVLNTSVTSMGSQMPDHDQNEGFHCREECRILGHSDRCWMPRNPMPIRSKSPEHVRNIIALSIEATAADVEAYDDCGPTKRTFATFGKDVSDHPAEERPTLKGKRTVDVTICSPKVNSVIREAGNGCEAISPVTSPLHLKSSLPTKPSVSYTIALAPPARDLEQYVNNVNNGPTRPSEAEPRGADSEKVMHEVSPILKEGRNKESPGVKRLKDIVL

SEQ ID NO: 5796 - protein, 144 aa, Homo sapiens
MTRMTRPLKSHVQVVPSTLMWQSQARTQPAPLCCKLLTPRWLPLLLPTHPHSHCLAGHLFFPARYSCSSEWKQQLTCHLCVTDSAPPRHTGVVVSEHLRRTEKLFFTILSPNQSKPFTTWKMLKATIPIFVCFLLNLAQKKKKK

SEQ ID NO: 5797 - protein, 460 aa, Homo sapiens
MFTIKLLLFIVPLVISSRIDQDNSSFDSLSPEPKSRFAMLDDVKILANGLLQLGHGLKDFVHKTKGQINDIFQKLNIFDQSFYDLSLQTSEIKEEEKELRRTTYKLQVKNEEVKNMSLELNSKLESLLEEKILLQQKVKYLEEQLTNLIQNQPETPEHPEVTSLKTFVEKQDNSIKDLLQTVEDQYKQLNQQHSQIKEIENQLRRTSIQEPTEISLSSKPRAPRTTPFLQLNEIRNVKHDGIPAECTTIYNRGEHTSGMYAIRPSNSQVFHVYCDVISGSPWTLIQHRIDGSQNFNETWENYKYGFGRLDGEFWLGLEKIYSIVKQSNYVLRIELEDWKDNKHYIEYSFYLGNHETNYTLHLVAITGNVPNAIPENKDLVFSTWDHKAKGHFNCPEGYSGGWWWHDECGENNLNGKYNKPRAKSKPERRRGLSWKSQNGRLYSIKSTKMLIHPTDSESFE

SEQ ID NO: 5798 - protein, 509 aa, Homo sapiens
AGAGRALLGARLRREGGAGATLARTEETMPQTSVVFSSILGPSCSGQVQPGMGERGGGAGGGSGDLIFQDGHLISGSLEALMEHLVPTVDYYPDRTYIFTFLLSSRVFMPPHDLLARVGQICVEQKQQLEAGPEKAKLKSFSAKIVQLLKEWTEAFPYDFQDEKAMAELKAITHRVTQCDEENGTVKKAIAQMTQSLLLSLAARSQLQELREKLRPPAVDKGPILKTKPPAAQKDILGVCCDPLVLAQQLTHIELDRVSSIYPEDLMQIVSHMDSLDNHRCRGDLTKTYSLEAYDNWFNCLSMLVATEVCRVVKKKHRTRMLEFFIDVARECFNIGNFNSMMAIISGMNLSPVARLKKTWSKVKTAKFDVLEHHMDPSSNFCNYRTALQGATQRSQMANSSREKIVIPVFNLFVKDIYFLHKIHTNHLPNGHINFKKFWEISRQIHEFMTWTQVECPFEKDKKIQSYLLTAPIYSEEALFVASFESEGPENHMEKDSWKTLRTTLLNRA

SEQ ID NO: 5799 - protein, 519 aa, Homo sapiens
EWVLAWLAGRGAAARWTPDRAGRRGEPAARMFLEPQETMPQTSVVFSSILGPSCSGQVQPGMGERGGGAGGGSGDLIFQDGHLISGSLEALMEHLVPTVDYYPDRTYIFTFLLSSRVFMPPHDLLARVGQICVEQKQQLEAGPEKAKLKSFSAKIVQLLKEWTEAFPYDFQDEKAMAELKAITHRVTQCDEENGTVKKAIAQMTQSLLLSLAARSQLQELREKLRPPAVDKGPILKTKPPAAQKDILGVCCDPLVLAQQLTHIELDRVSSIYPEDLMQIVSHMDSLDNHRCRGDLTKTYSLEAYDNWFNCLSMLVATEVCRVVKKKHRTRMLEFFIDVARECFNIGNFNSMMAIISGMNLSPVARLKKTWSKVKTAKFDVLEHHMDPSSNFCNYRTALQGATQRSQMANSSREKIVIPVFNLFVKDIYFLHKIHTNHLPNGHINFKKFWEISRQIHEFMTWTQVECPFEKDKKIQSYLLTAPIYSEEALFVASFESEGPENHMEKDSWKTLRTTLLNRA

SEQ ID NO: 5800 - protein, 1061 aa, Homo sapiens
PKMAAVAGSGAAAAPSSLLLVVGSEFGSPGLLTYVLEELERGIRSWDVDPGVCNLDEQLKVFVSRHSATFSSIVKGQRSLHHRGDNLETLVLLNPSDKSLYDELRNLLLDPASHKLLVLAGPCLEETGELLLQTGGFSPHHFLQVLKDREIRDILATTPPPVQPPILTITCPTFGDWAQLAPAVPGLQGALRLQLRLNPPAQLPNSEGLCEFLEYVAESLEPPSPFELLEPPTSGGFLRLGRPCCYIFPGGLGDAAFFAVNGFTVLVNGGSNPKSSFWKLVRHLDRVDAVLVTHPGADSLPGLNSLLRRKLAERSEVAAGGGSWDDRLRRLISPNLGVVFFNACEAASRLARGEDEAELALSLLAQLGITPLPLSRGPVPAKPTVLFEKMGVGRLDMYVLHPPSAGAERTLASVCALLVWHPAGPGEKVVRVLFPGCTPPAYLLDGLVRLQHLRFLREPVVTPQDLEGPGRAESKESVGSRDSSKREGLLATHPRPGQERPGVARKEPARAEAPRKTEKEAKTPRELKKDPKPSVSRTQPREVRRAASSVPNLKKTNAQAAPKPRKAPSTSHSGFPPVANGPRSPPSLRCGEASPPSAACGSPASQLVATPSLELGPIPAGEEKALELPLAASSIPRPRTPSPESHRSPAEGSERLSLSPLRGGEAGPDASPTVTTPTVTTPSLPAEVGSPHSTEVDESLSVSFEQVLPPSAPTSEAGLSLPLRGPRARRSASPHDVDLCLVSPCEFEHRKAVPMAPAPASPGSSNDSSARSQERAGGLGAEETPPTSVSESLPTLSDSDPVPLAPGAADSDEDTEGFGVPRHDPLPDPLKVPPPLPDPSSICMVDPEMLPPKTARQTENVSRTRKPLARPNSRAAAPKATPVAAAKTKGLAGGDRASRPLSARSEPSEKGGRAPLSRKSSTPKTATRGPSGSASSRPGVSATPPKSPVYLDLAYLPSGSSAHLVDEEFFQRVRALCYVISGQDQRKEEGMRAVLDALLASKQHWDRDLQVTLIPTFDSVAMHTWYAETHARHQALGITVLGSNSMVSMQDDAFPACKVEF

SEQ ID NO: 5801 - protein, 125 aa, Homo sapiens
MHPARKLLSLLFLILMGTELTQVLPTNPEESWQVYSSAQDSEGRCICTVVAPQQTMCSRDARTKQLRQLLEKVQNMSQSIEVLDRRTQRDLQYVEKMENQMKGLESKFKQVEESHKQHLARQFKG

SEQ ID NO: 5802 - protein, 153 aa, Homo sapiens
MSVPLLKIGVVLSTMAMITNWMSQTLPSLVGLNTTRLSAASGGTLDRSTGVLPTNPEESWQVYSSAQDSEGRCICTVVAPQQTMCSRDARTKQLRQLLEKVQNMSQSIEVLDRRTQRDLQYVEKMENQMKGLESKFKQVEESHKQHLARQFKG

SEQ ID NO: 5803 - protein, 364 aa, Homo sapiens
MDMCQALSCHTDPLDQSSCSRLLVPLLDGTECGVEKWCSKGRCRSLVELTPIAAVHGRWSSWGPRSPCSRSCGGGVVTRRRQCNNPRPAFGGRACVGADLQAEMCNTQACEKTQLEFMSQQCARTDGQPLRSSPGGASFYHWGAAVPHSQGDALCRHMCRAIGESFIMKRGDSFLDGTRCMPSGPREDGTLSLCVSGSCRTFGCDGRMDSQQVWDRCQVCGGDNSTCSPRKGSFTAGRAREYVTFLTVTPNLTSVYIANHRPLFTHLAVRIGGRYVVAGKMSISPNTTYPSLLEDGRVEYRVALTEDRLPRLEEIRIWGPLQEDADIQVGGVRAQLMHISWWSRPGLGERDLCARGRWPGGSSD

SEQ ID NO: 5804 - protein, 3396 aa, Homo sapiens
MTAWLISLMSIEVLLLAVRHLSLHIEPEEGSLAGGTWITVIFDGLELGVLYPNNGSQLEIHLVNVNMVVPALRSVPCDVFPVFLDLPVVTCRTRSVLSEAHEGLYFLEAYFGGQLVSSPNPGPRDSCTFKFSKAQTPIVHQVYPPSGVPGKLIHVYGWIITGRLETFDFDAEYIDSPVILEAQGDKWVTPCSLINRQMGSCYPIQEDHGLGTLQCHVEGDYIGSQNVSFSVFNKGKSMVHKKAWLISAKQDLFLYQTHSEILSVFPETGSLGGRTNITITGDFFDNSAQVTIAGIPCDIRHVSPRKIECTTRAPGKDVRLTTPQPGNRGLLFEVGDAVEGLELTEATPGYRWQIVPNASSPFGFWSQEGQPFRARLSGFFVAPETNNYTFWIQADSQASLHFSWSEEPRTKVKVASISVGTADWFDSWEQNRDEGTWQQKTPKLELLGGAMYYLEAEHHGIAPSRGMRIGVQIHNTWLNPDVVTTYLREKHQIRVRAQRLPEVQVLNVSGRGNFFLTWDNVSSQPIPANATAHLIQTTIEELLAVKCKLEPLWSNILLRLGFERGPEVSNSDGDLTSGTEPFCGRFSLRQPRHLVLTPPAAQKGYRLDQYTHLCLAYKGHMNKILKMIVSFTIGFQNMVKNTTCDWSLTRTSPESWQFDCTDLWETCVRCFGDLQPPPANSPVLVHQINLLPLAQETGLFYVDEIIIADTNVTVSQADSGTARPGGNLVESVSVVGSPPVYSVTSWLAGCGTELPLITARSVPTEGTEEGSGLVLVTTQRRQRTSPPLGGHFRIQLPNTVISDVPVQISAHHLHQLLQNNADDFTSRYLNASDFTVKEDLYTCYEHVWTLSWSTQIGDLPNFIRVSDENLTGVNPAAATRVVYDGGVFLGPIFGDMLATANQHTQVVVRVNDVPAHCPGSCSFQYLQGSTPCVHSVWYSIDGDINLMIYITGTGFSGDSQFLQVTVNKTSCKVIFSNQTNVVCQTDLLPVGMHRILMLVRPSGLAISATGEDLFLNVKPRLDMVEPSRAADIGGLWATIRGSSLEGVSLILFGSYSCAINVATSNSSRIQCKVPPRGKDGRIVNVTVIRGDYSAVLPRAFTYVSSLNPVIVTLSRNISNIAGGETLVIGVARLMNYTDLDVEVHVQDALAPVHTQSAWGLEVALPPLPAGLHRISVSINGVSIHSQGVDLHIQYLTEVFSIEPCCGSLLGGTILSISGIGFSRDPALVWVLVGNRSCDIVNLTEASIWCETLPAPQIPDAGAPTVPAAVEVWAGNRFFARGPSPSLVGKGFTFMYEAAATPVVTAMQGEITNSSLSLHVGGSNLSNSVILLGNLNCDVETQSFQGNVSLSGCSIPLHSLEAGIYPLQVRQKQMGFANMSVVLQQFAVMPRIMAIFPSQGSACGGTILTVRGLLLNSRRRSVRVDLSGPFTCVILSLGDHTILCQVSLEGDPLPGASFSLNVTVLVNGLTSECQGNCTLFIREEASPVMDALSTNTSGSLTTVLIRGQRLATTADEPMVFVDDQLPCNVTFFNASHVVCQTRDLAPGPHYLSVFYTRNGYACSGNVSRHFYIMPQVFHYFPKNFSLHGGSLLTIEGTGLRGQNTTSVYIDQQTCLTVNIGAELIRCIVPTGNGSVALEIEVDGLWYHIGVIGYNKAFTPELISISQSDDILTFAVAQISGAANIDIFIGMSPCVGVSGNHTVLQCVVPSLPAGEYHVRGYDCIRGWASSALVFTSRVIITAVTENFGCLGGRLVHVFGAGFSPGNVSAAVCGAPCRVLANATVSAFSCLVLPLDVSLAFLCGLKREEDSCEAARHTYVQCDLTVAMATEQLLESWPYLYICEESSQCLFVPDHWAESMFPSFSGLFISPKLERDEVLIYNSSCNITMETEAEMECETPNQPITVKITEIRKRWGQNTQGNFSLQFCRRWSRTHSWFPERLPQDGDNVTVENGQLLLLDTNTSILNLLHIKGGKLIFMAPGPIELRAHAILVSDGGELRIGSEDKPFQGRAQITLYGSSYSTPFFPYGVKFLAVRNGTLSLHGSLPEVIVTCLRATAHALDTVLALEDAVDWNPGDEVVIISGTGVKGAKPMEEIVTVETVQDTDLYLKSPLRYSHNFTENWVAGEHHILKATVALLSRSITIQGNLTNEREKLLVSCQEANAPEGNLQHCLYSMSEKMLGSRDMGARVIVQSFPEEPSQVQLKGVQFQVLGQAFHKHLSSLTLVGAMRESFIQGCTVRNSFSRGLSMCGTLGLKVDSNVFYNILGHALLVGTCTEMRYISWEAIHGRKDDWSGHGNIIRNNVIIQVSGAEGLSNPEMLTPSGIYICSPTNVIEGNRVCGAGYGYFFHLMTNQTSQAPLLSFTQNIAHSCTRYGLFVYPKFQPPWDNVTGTTLFQSFTVWESAGGAQIFRSSNLRLKNFKVYSCRDFGIDVLESDANTSVTDSLLLGHFAHKGSLCMSSGIKTPKRWELMVSNTTFVNFDLINCVAIRTCSDCSQGQGGFTVKTSQLKFTNSSNLVAFPFPHAAILEDLDGSLSGKNRSHILASMETLSASCLVNSSFGRVVHGSACGGGVLFHRMSIGLANTPEVSYDLTMTDSRNKTTTVNYVRDTLSNPRGWMALLLDQETYSLQSENLWINRSLQYSATFDNFAPGNYLLLVHTDLPPYPDILLRCGSRVGLSFPFLPSPGQNQGCDWFFNSQLRQLTYLVSGEGQVQVILRVKEGMPPTISASTSAPESALKWSLPETWQGVEEGWGGYNNTIPGPGDDVLILPNRTVLVDTDLPFFKGLYVMGTLDFPVDRSNVLSVACMVIAGGELKVGTLENPLEKEQKLLILLRASEGVFCDRMNGIHIDPGTIGVYGKVHLYSAYPKNSWTHLGADIASGNERIIVEDAVDWRPHDKIVLSSSSYEPHEAEVLTVKEVKGHHVRIYERLKHRHIGSVHVTEDGRHIRLAAEVGLLTRNIQIQPDVSCRGRLFVGSFRKSSREEFSGVLQLLNVEIQNFGSPLYSSVEFSNVSAGSWIISSTLHQSCGGGIHAAASHGVLLNDNIVFGTAGHGIDLEGQAYTVTNNLVVLMTQPAWSTIWVAGIKVNQVKDINLHGNVVAGSERLGFHIRGHKCSSCELLWSDNVAHSSLHGLHLYKESGLDNCTRISGFLAFKNFDYGAMLHVENSVEIENITLVDNTIGLLAVVYVFSAPQNSVKKVQIVLRNSVIVATSSSFDCIQDKVKPHSANLTSTDRAPSNPRGGRIGILWPVFTSEPNQWPQEPWHKVRNDHSISGIMKLQDVTFSSFVKSCYSDDLDVCILPNAENSGIMHPITAERTRMLKIKDKNKFYFPSLQPRKDLGKVVCPELDCASPRKYLFKDLDGRALGLPPPVSVFPKTEAEWTASFFNAVTTEQALKISE

SEQ ID NO: 5805 - protein, 4074 aa, Homo sapiens
MTAWLISLMSIEVLLLAVRHLSLHIEPEEGSLAGGTWITVIFDGLELGVLYPNNGSQLEIHLVNVNMVVPALRSVPCDVFPVFLDLPVVTCRTRSVLSEAHEGLYFLEAYFGGQLVSSPNPGPRDSCTFKFSKAQTPIVHQVYPPSGVPGKLIHVYGWIITGRLETFDFDAEYIDSPVILEAQGDKWVTPCSLINRQMGSCYPIQEDHGLGTLQCHVEGDYIGSQNVSFSVFNKGKSMVHKKAWLISAKQDLFLYQTHSEILSVFPETGSLGGRTNITITGDFFDNSAQVTIAGIPCDIRHVSPRKIECTTRAPGKDVRLTTPQPGNRGLLFEVGDAVEGLELTEATPGYRWQIVPNASSPFGFWSQEGQPFRARLSGFFVAPETNNYTFWIQADSQASLHFSWSEEPRTKVKVASISVGTADWFDSWEQNRDEGTWQQKTPKLELLGGAMYYLEAEHHGIAPSRGMRIGVQIHNTWLNPDVVTTYLREKHQIRVRAQRLPEVQVLNVSGRGNFFLTWDNVSSQPIPANATAHLIQTTIEELLAVKCKLEPLWSNILLRLGFERGPEVSNSDGDLTSGTEPFCGRFSLRQPRHLVLTPPAAQKGYRLDQYTHLCLAYKGHMNKILKMIVSFTIGFQNMVKNTTCDWSLTRTSPESWQFDCTDLWETCVRCFGDLQPPPANSPVLVHQINLLPLAQETGLFYVDEIIIADTNVTVSQADSGTARPGGNLVESVSVVGSPPVYSVTSWLAGCGTELPLITARSVPTEGTEEGSGLVLVTTQRRQRTSPPLGGHFRIQLPNTVISDVPVQISAHHLHQLLQNNADDFTSRYLNASDFTVKEDLYTCYEHVWTLSWSTQIGDLPNFIRVSDENLTGVNPAAATRVVYDGGVFLGPIFGDMLATANQHTQVVVRVNDVPAHCPGSCSFQYLQGSTPCVHSVWYSIDGDINLMIYITGTGFSGDSQFLQVTVNKTSCKVIFSNQTNVVCQTDLLPVGMHRILMLVRPSGLAISATGEDLFLNVKPRLDMVEPSRAADIGGLWATIRGSSLEGVSLILFGSYSCAINVATSNSSRIQCKVPPRGKDGRIVNVTVIRGDYSAVLPRAFTYVSSLNPVIVTLSRNISNIAGGETLVIGVARLMNYTDLDVEVHVQDALAPVHTQSAWGLEVALPPLPAGLHRISVSINGVSIHSQGVDLHIQYLTEVFSIEPCCGSLLGGTILSISGIGFSRDPALVWVLVGNRSCDIVNLTEASIWCETLPAPQIPDAGAPTVPAAVEVWAGNRFFARGPSPSLVGKGFTFMYEAAATPVVTAMQGEITNSSLSLHVGGSNLSNSVILLGNLNCDVETQSFQGNVSLSGCSIPLHSLEAGIYPLQVRQKQMGFANMSVVLQQFAVMPRIMAIFPSQGSACGGTILTVRGLLLNSRRRSVRVDLSGPFTCVILSLGDHTILCQVSLEGDPLPGASFSLNVTVLVNGLTSECQGNCTLFIREEASPVMDALSTNTSGSLTTVLIRGQRLATTADEPMVFVDDQLPCNVTFFNASHVVCQTRDLAPGPHYLSVFYTRNGYACSGNVSRHFYIMPQVFHYFPKNFSLHGGSLLTIEGTGLRGQNTTSVYIDQQTCLTVNIGAELIRCIVPTGNGSVALEIEVDGLWYHIGVIGYNKAFTPELISISQSDDILTFAVAQISGAANIDIFIGMSPCVGVSGNHTVLQCVVPSLPAGEYHVRGYDCIRGWASSALVFTSRVIITAVTENFGCLGGRLVHVFGAGFSPGNVSAAVCGAPCRVLANATVSAFSCLVLPLDVSLAFLCGLKREEDSCEAARHTYVQCDLTVAMATEQLLESWPYLYICEESSQCLFVPDHWAESMFPSFSGLFISPKLERDEVLIYNSSCNITMETEAEMECETPNQPITVKITEIRKRWGQNTQGNFSLQFCRRWSRTHSWFPERLPQDGDNVTVENGQLLLLDTNTSILNLLHIKGGKLIFMAPGPIELRAHAILVSDGGELRIGSEDKPFQGRAQITLYGSSYSTPFFPYGVKFLAVRNGTLSLHGSLPEVIVTCLRATAHALDTVLALEDAVDWNPGDEVVIISGTGVKGAKPMEEIVTVETVQDTDLYLKSPLRYSHNFTENWVAGEHHILKATVALLSRSITIQGNLTNEREKLLVSCQEANAPEGNLQHCLYSMSEKMLGSRDMGARVIVQSFPEEPSQVQLKGVQFQVLGQAFHKHLSSLTLVGAMRESFIQGCTVRNSFSRGLSMCGTLGLKVDSNVFYNILGHALLVGTCTEMRYISWEAIHGRKDDWSGHGNIIRNNVIIQVSGAEGLSNPEMLTPSGIYICSPTNVIEGNRVCGAGYGYFFHLMTNQTSQAPLLSFTQNIAHSCTRYGLFVYPKFQPPWDNVTGTTLFQSFTVWESAGGAQIFRSSNLRLKNFKVYSCRDFGIDVLESDANTSVTDSLLLGHFAHKGSLCMSSGIKTPKRWELMVSNTTFVNFDLINCVAIRTCSDCSQGQGGFTVKTSQLKFTNSSNLVAFPFPHAAILEDLDGSLSGKNRSHILASMETLSASCLVNSSFGRVVHGSACGGGVLFHRMSIGLANTPEVSYDLTMTDSRNKTTTVNYVRDTLSNPRGWMALLLDQETYSLQSENLWINRSLQYSATFDNFAPGNYLLLVHTDLPPYPDILLRCGSRVGLSFPFLPSPGQNQGCDWFFNSQLRQLTYLVSGEGQVQVILRVKEGMPPTISASTSAPESALKWSLPETWQGVEEGWGGYNNTIPGPGDDVLILPNRTVLVDTDLPFFKGLYVMGTLDFPVDRSNVLSVACMVIAGGELKVGTLENPLEKEQKLLILLRASEGVFCDRMNGIHIDPGTIGVYGKVHLYSAYPKNSWTHLGADIASGNERIIVEDAVDWRPHDKIVLSSSSYEPHEAEVLTVKEVKGHHVRIYERLKHRHIGSVHVTEDGRHIRLAAEVGLLTRNIQIQPDVSCRGRLFVGSFRKSSREEFSGVLQLLNVEIQNFGSPLYSSVEFSNVSAGSWIISSTLHQSCGGGIHAAASHGVLLNDNIVFGTAGHGIDLEGQAYTVTNNLVVLMTQPAWSTIWVAGIKVNQVKDINLHGNVVAGSERLGFHIRGHKCSSCELLWSDNVAHSSLHGLHLYKESGLDNCTRISGFLAFKNFDYGAMLHVENSVEIENITLVDNTIGLLAVVYVFSAPQNSVKKVQIVLRNSVIVATSSSFDCIQDKVKPHSANLTSTDRAPSNPRGGRIGILWPVFTSEPNQWPQEPWHKVRNDHSISGIMKLQDVTFSSFVKSCYSDDLDVCILPNAENSGIMHPITAERTRMLKIKDKNKFYFPSLQPRKDLGKVVCPELDCASPRKYLFKDLDGRALGLPPPVSVFPKTEAEWTASFFNAGTFREEQKCTYQFLMQGFICKQTDQVVLILDSADAIWAIQKLYPVVSVTSGFVDVFSSVNANIPCSTSGSVSTFYSILPIRQITKVCFMDQTPQVLRFFLLGNKSTSKLLLAVFYHELQSPHVFLGESFIPPTLVQSASLLLNESIGANYFNIMDNLLYVVLQGEEPIEIRSGVSIHLALTVMVSVLEKGWEIVILERLTNFLQIGQNQIRFIHEMPGHEETLKAIADSRAKRKRNCPTVTCTSHYRRVGQRRPLMMEMNSHRASPPMTVETISKVIVIEIGDSPTVRSTGMISSLSSNKLQNLAHRVITAQQTGVLENVLNMTIGALLVTQSKGVIGYGNTSSFKTGNLIYIRPYALSILVQPSDGEVGNELPVQPQLVFLDEQNRRVESLGPPSEPWTISASLEGASDSVLKGCTQAETQDGYVSFYNLAVLISGSNWHFIFTVTSPPGVNFTARSKPFAVLPVTRKEKSTIILAASLSSVASWLALSCLVCCWLKRSKSRKTKPEEIPESQTNNQNIHIHISSKRRESQGPKKEDTVVGEDMRMKVMLGKVNQCPHQLMNGVSRRKVSRHIVREEEAAVPAPGTTGITSHGHICAPGAPAQQVYLQETGNWKEGQEQLLRYQLAGQNQLLLLCPDFRQERQQLPGQSRLSKQSGSLGLSQEKKASCGATEAFCLHSVHPETIQEQL

SEQ ID NO: 5806 - protein, 866 aa, Homo sapiens [sequence omitted]

SEQ ID NO: 5807 - protein, 470 aa, Homo sapiens
MLRGISQLPAVATMSWVLLPVLWLIVQTQAIAIKQTPELTLHEIVCPKKLHILHKREIKNNQTEKHGKEERYEPEVQYQMILNGEEIILSLQKTKHLLGPDYTETLYSPRGEEITTKPENMEHCYYKGNILNEKNSVASISTCDGLRGYFTHHHQRYQIKPLKSTDEKEHAVFTSNQEEQDPANHTCGVKSTDGKQGPIRISRSLKSPEKEDFLRAQKYIDLYLVLDNAFYKNYNENLTLIRSFVFDVMNLLNVIYNTIDVQVALVGMEIWSDGDKIKVVPSASTTFDNFLRWHSSNLGKKIHDHAQLLSGISFNNRRVGLAASNSLCSPSSVAVIEAKKKNNVALVGVMSHELGHVLGMPDVPFNTKCPSGSCVMNQYLSSKFPKDFSTSCRAHFERYLLSQKPKCLLQAPIPTNIMTTPVCGNHLLEVGEDCDCGSPKECTNLCCEALTCKLKPGTDCGGDAPNHTTE

SEQ ID NO: 5808 - protein, 3319 aa, Homo sapiens
MGRHVATSCHVAWLLVLISGCWGQVNRLPFFTNHFFDTYLLISEDTPVGSSVTQLLAQDMDNDPLVFGVSGEEASRFFAVEPDTGVVWLRQPLDRETKSEFTVEFSVSDHQGVITRKVNIQVGDVNDNAPTFHNQPYSVRIPENTPVGTPIFIVNATDPDLGAGGSVLYSFQPPSQFFAIDSARGIVTVIRELDYETTQAYQLTVNATDQDKTRPLSTLANLAIIITDVQDMDPIFINLPYSTNIYEHSPPGTTVRIITAIDQDKGRPRGIGYTIVSGNTNSIFALDYISGVLTLNGLLDRENPLYSHGFILTVKGTELNDDRTPSDATVTTTFNILVIDINDNAPEFNSSEYSVAITELAQVGFALPLFIQVVDKDENLGLNSMFEVYLVGNNSHHFIISPTSVQGKADIRIRVAIPLDYETVDRYDFDLFANESVPDHVGYAKVKITLINENDNRPIFSQPLYNISLYENVTVGTSVLTVLATDNDAGTFGEVSYFFSDDPDRFSLDKDTGLIMLIARLDYELIQRFTLTIIARDGGGEETTGRVRINVLDVNDNVPTFQKDAYVGALRENEPSVTQLVRLRATDEDSPPNNQITYSIVSASAFGSYFDISLYEGYGVISVSRPLDYEQISNGLIYLTVMAMDAGNPPLNSTVPVTIEVFDENDNPPTFSKPAYFVSVVENIMAGATVLFLNATDLDRSREYGQESIIYSLEGSTQFRINARSGEITTTSLLDRETKSEYILIVRAVDGGVGHNQKTGIATVNITLLDINDNHPTWKDAPYYINLVEMTPPDSDVTTVVAVDPDLGENGTLVYSIQPPNKFYSLNSTTGKIRTTHAMLDRENPDPHEAELMRKIVVSVTDCGRPPLKATSSATVFVNLLDLNDNDPTFQNLPFVAEVLEGIPAGVSIYQVVAIDLDEGLNGLVSYRMPVGMPRMDFLINSSSGVVVTTTELDRERIAEYQLRVVASDAGTPTKSSTSTLTIHVLDVNDETPTFFPAVYNVSVSEDVPREFRVVWLNCTDNDVGLNAELSYFITGGNVDGKFSVGYRDAVVRTVVGLDRETTAAYMLILEAIDNGPVGKRHTGTATVFVTVLDVNDNRPIFLQSSYEASVPEDIPEGHSILQLKATDADEGEFGRVWYRILHGNHGNNFRIHVSNGLLMRGPRPLDRERNSSHVLIVEAYNHDLGPMRSSVRVIVYVEDINDEAPVFTQQQYSRLGLRETAGIGTSVIVVQATDRDSGDGGLVNYRILSGAEGKFEIDESTGLIITVNYLDYETKTSYMMNVSATDQAPPFNQGFCSVYITLLNELDEAVQFSNASYEAAILENLALGTEIVRVQAYSIDNLNQITYRFDAYTSTQAKALFKIDAITGVITVQGLVDREKGDFYTLTVVADDGGPKVDSTVKVYITVLDENDNSPRFDFTSDSAVSIPEDCPVGQRVATVKAWDPDAGSNGQVVFSLASGNIAGAFEIVTTNDSIGEVFVARPLDREELDHYILQVVASDRGTPPRKKDHILQVTILDINDNPPVIESPFGYNVSVNENVGGGTAVVQVRATDRDIGINSVLSYYITEGNKDMTFRMDRISGEIATRPAPPDRERQSFYHLVATVEDEGTPTLSATTHVYVTIVDENDNAPMFQQPHYEVLLDEGPDTLNTSLITIQALDLDEGPNGTVTYAIVAGNIVNTFRIDRHMGVITAAKELDYEISHGRYTLIVTATDQCPILSHRLTSTTTVLVNVNDINDNVPTFPRDYEGPFEVTEGQPGPRVWTFLAHDRDSGPNGQVEYSIMDGDPLGEFVISPVEGVLRVRKDVELDRETIAFYNLTICARDRGMPPLSSTMLVGIRVLDINDNDPVLLNLPMNITISENSPVSSFVAHVLASDADSGCNARLTFNITAGNRERAFFINATTGIVTVNRPLDRERIPEYKLTISVKDNPENPRIARRDYDLLLIFLSDENDNHPLFTKSTYQAEVMENSPAGTPLTVLNGPILALDADQDIYAVVTYQLLGAQSGLFDINSSTGVVTVRSGVIIDREAFSPPILELLLLAEDIGLLNSTAHLLITILDDNDNRPTFSPATLTVHLLENCPPGFSVLQVTATDEDSGLNGELVYRIEAGAQDRFLIHLVTGVIRVGNATIDREEQESYRLTVVATDRGTVPLSGTAIVTILIDDINDSRPEFLNPIQTVSVLESAEPGTVIANITAIDHDLNPKLEYHIVGIVAKDDTDRLVPNQEDAFAVNINTGSVMVKSPMNRELVATYEVTLSVIDNASDLPERSVSVPNAKLTVNVLDVNDNTPQFKPFGITYYMERILEGATPGTTLIAVAAVDPDKGLNGLVTYTLLDLVPPGYVQLEDSSAGKVIANRTVDYEEVHWLNFTVRASDNGSPPRAAEIPVYLEIVDINDNNPIFDQPSYQEAVFEDVPVGTIILTVTATDADSGNFALIEYSLGDGESKFAINPTTGDIYVLSSLDREKKDHYILTALAKDNPGDVASNRRENSVQVVIQVLDVNDCRPQFSKPQFSTSVYENEPAGTSVITMMATDQDEGPNGELTYSLEGPGVEAFHVDMDSGLVTTQRPLQSYEKFSLTVVATDGGEPPLWGTTMLLVEVIDVNDNRPVFVRPPNGTILHIREEIPLRSNVYEVYATDKDEGLNGAVRYSFLKTAGNRDWEFFIIDPISGLIQTAQRLDRESQAVYSLILVASDLGQPVPYETMQPLQVALEDIDDNEPLFVRPPKGSPQYQLLTVPEHSPRGTLVGNVTGAVDADEGPNAIVYYFIAAGNEEKNFHLQPDGCLLVLRDLDREREAIFSFIVKASSNRSWTPPRGPSPTLDLVADLTLQEVRVVLEDINDQPPRFTKAEYTAGVATDAKVGSELIQVLALDADIGNNSLVFYSILAIHYFRALANDSEDVGQVFTMGSMDGILRTFDLFMAYSPGYFVVDIVARDLAGHNDTAIIGIYILRDDQRVKIVINEIPDRVRGFEEEFIHLLSNITGAIVNTDNVQFHVDKKGRVNFAQTELLIHVVNRDTNRILDVDRVIQMIDENKEQLRNLFRNYNVLDVQPAISVRLPDDMSALQMAIIVLAILLFLAAMLFVLMNWYYRTVHKRKLKAIVAGSAGNRGFIDIMDMPNTNKYSFDGANPVWLDPFCRNLELAAQAEHEDDLPENLSEIADLWNSPTRTHGTFGREPAAVKPDDDRYLRAAIQEYDNIAKLGQIIREGPIKLIQTELDEEPGDHSPGQGSLRFRHKPPVELKGPDGIHVVHGSTGTLLATDLNSLPEEDQKGLGRSLETLTAAEATAFERNARTESAKSTPLHKLRDVIMETPLEITEL

SEQ ID NO: 5809 - protein, 3358 aa, Homo sapiens
MGRHVATSCHVAWLLVLISGCWGQVNRLPFFTNHFFDTYLLISEDTPVGSSVTQLLAQDMDNDPLVFGVSGEEASRFFAVEPDTGVVWLRQPLDRETKSEFTVEFSVSDHQGVITRKVNIQVGDVNDNAPTFHNQPYSVRIPENTPVGTPIFIVNATDPDLGAGGSVLYSFQPPSQFFAIDSARGIVTVIRELDYETTQAYQLTVNATDQDKTRPLSTLANLAIIITDVQDMDPIFINLPYSTNIYEHSPPGTTVRIITAIDQDKGRPRGIGYTIVSGNTNSIFALDYISGVLTLNGLLDRENPLYSHGFILTVKGTELNDDRTPSDATVTTTFNILVIDINDNAPEFNSSEYSVAITELAQVGFALPLFIQVVDKDEGLNSMFEVYLVGNNSHHFIISPTSVQGKADIRIRVAIPLDYETVDRYDFDLFANESVPDHVGYAKVKITLINENDNRPIFSQPLYNISLYENVTVGTSVLTVLATDNDAGTFGEVSYFFSDDPDRFSLDKDTGLIMLIARLDYELIQRFTLTIIARDGGGEETTGRVRINVLDVNDNVPTFQKDAYVGALRENEPSVTQLVRLRATDEDSPPNNQITYSIVSASAFGSYFDISLYEGYGVISVSRPLDYEQISNGLIYLTVMAMDAGNPPLNSTVPVTIEVFDENDNPPTFSKPAYFVSVVENIMAGATVLFLNATDLDRSREYGQESIIYSLEGSTQFRINARSGEITTTSLLDRETKSEYILIVRAVDGGVGHNQKTGIATVNITLLDINDNHPTWKDAPYYINLVEMTPPDSDVTTVVAVDPDLGENGTLVYSIQPPNKFYSLNSTTGKIRTTHAMLDRENPDPHEAELMRKIVVSVTDCGRPPLKATSSATVFVNLLDLNDNDPTFQNLPFVAEVLEGIPAGVSIYQVVAIDLDEGLNGLVSYRMPVGMPRMDFLINSSSGVVVTTTELDRERIAEYQLRVVASDAGTPTKSSTSTLTIHVLDVNDETPTFFPAVYNVSVSEDVPREFRVVWLNCTDNDVGLNAELSYFITGGNVDGKFSVGYRDAVVRTVVGLDRETTAAYMLILEAIDNGPVGKRHTGTATVFVTVLDVNDNRPIFLQSSYEASVPEDIPEGHSILQAATDADEGEFGRVWYRILHGNHGNNFRIHVSNGLLMRGPRPLDRERNSSHVLIVEAYNHDLGPMRSSVRVIVYVEDINDEAPVFTQQQYSRLGLRETAGIGTSVIVVQATDRDSGDGGLVNYRILSGAEGKFEIDESTGLIITVNYLDYETKTSYMMNVSATDQAPPFNQGFCSVYITLLNELDEAVQFSNASYEAAILENLALGTEIVRVQAYSIDNLNQITYRFNAYTSTQAKALFKIDAITGVITVQGLVDREKGDFYTLTVVADDGGPKVDSTVVSDHVHPQVYITVLDENDNSPRFDFTSDSAVSIPEDCPVGQRVATVKAWDPDAGSNGQVVFSLASGNIAGAFEIVTTNDSIGEVFVARPLDREELDHYILQVVASDRGTPPRKKDHILQVTILDINDNPPVIESPFGYNVSVNENVGGGTAVVQVRATDRDIGINSVLSYYITEGNKDMAFRMDRISGEIATRPAPPDRERQSFYHLVATVEDEGTPTLSATTHVYVTIVDENDNAPMFQQPHYEVLLDEGPDTLNTSLITIQALDLDEGPNGTVTYAIVAGNIVNTFRIDRHMGVITAAKELDYEISHGRYTLIVTATDQCPILSHRLTSTTTVLVNVNDINDNVPTFPRDYEGPFEVTEGQPGPRVWTFLAHDRDSGPNGQVEYSIMDGDPLGEFVISPVEGVLRVRKDVELDRETIAFYNLTICARDRGMPPLSSTMLVGIRVLDINDNDPVLLNLPMNITISENSPVSSFVAHVLASDADSGCNARLTFNITAGNRERAFFINATTGIVTVNRPLDRERIPEYKLTISVKDNPENPRIARRDYDLLLIFLSDENDNHPLFTKSTYQAEVMENSPAGTPLTVLNGPILALDADQDIYAVVTYQLLGAQSGLFDINSSTGVVTVRSGVIIDREAFSPPILELLLLAEDIGLLNSTAHLLITILDDNDNRPTFSPATLTVHLLENCPPGFSVLQVTATDEDSGLNGELVYRIEAGAQDRFLIHLVTGVIRVGNATIDREEQESYRLTVVATDRGTVPLSGTAIVTILIDDINDSRPEFLNPIQTVSVLESAEPGTVIANITAIDHDLNPKLEYHIVGIVAKDDTDRLVPNQEDAFAVNINTGSVMVKSPMNRELVATYEVTLSVIDNASDLPERSVSVPNAKLTVNVLDVNDNTPQFKPFGITYYMERILEGATPGTTLIAVAAVDPDKGLNGLVTYTLLDLVPPGYVQLEDSSAGKVIANRTVDYEEVHWLNFTVRASDNGSPPRAAEIPVYLEIVDINDNNPIFDQPSYQEAVFEDVPVGTIILTVTATDADSGNFALIEYSLGDGESKFAINPTTGDIYVLSSLDREKKDHYILTALAKDNPGDVASNRRENSVQVVIQVLDVNDCRPQFSKPQFSTSVYENEPAGTSVITMMATDQDEGPNGELTYSLEGPGVEAFHVDMDSGLVTTQRPLQSYEKFSLTVVATDGGEPPLWGTTMLLVEVIDVNDNRPVFVRPPNGTILHIREEIPLRSNVYEVYATDKDEGLNGAVRYSFLKTAGNRDWEFFIIDPISGLIQTAQRLDRESQAVYSLILVASDLGQPVPYETMQPLQVALEDIDDNEPLFVRPPKGSPQYQLLTVPEHSPRGTLVGNVTGAVDADEGPNAIVYYFIAAGNEEKNFHLQPDGCLLVLRDLDREREAIFSFIVKASSNRSWTPPRGPSPTLDLVADLTLQEVRVVLEDINDQPPRFTKAEYTAGVATDAKVGSELIQVLALDADIGNNSLVFYSILAIHYFRALANDSEDVGQVFTMGSMDGILRTFDLFMAYSPGYFVVDIVARDLAGHNDTAIIGIYILRDDQRVKIVINEIPDRVRGFEEEFIHLLSNITGAIVNTDNVQFHVDKKGRVNFAQTELLIHVVNRDTNRILDVDRVIQMIDENKEQLRNLFRNYNVLDVQPAISVRLPDDMSALQMAIIVLAILLFLAAMLFVLMNWYYRTVHKRKLKAIVAGSAGNRGFIDIMDMPNTNKYSFDGANPVWLDPFCRNLELAAQAEHEDDLPENLSEIADLWNSPTRTHGTFGREPAAVKPDDDRYLRAAIQEYDNIAKLGQIIREGPIKGSLLKVVLEDYLRLKKLFAQRMVQKASSCHSSISELIQTELDEEPGDHSPGQGSLRFRHKPPVELKGPDGIHVVHGSTGTLLATDLNSLPEEDQKGLGRSLETLTAAEATAFERNARTESAKSTPLHKLRDVIMETPLEITEL

SEQ ID NO: 5810 - protein, 3353 aa, Homo sapiens
MGRHVATSCHVAWLLVLISGCWGQVNRLPFFTNHFFDTYLLISEDTPVGSSVTQLLAQDMDNDPLVFGVSGEEASRFFAVEPDTGVVWLRQPLDRETKSEFTVEFSVSDHQGVITRKVNIQVGDVNDNAPTFHNQPYSVRIPENTPVGTPIFIVNATDPDLGAGGSVLYSFQPPSQFFAIDSARGIVTVIRELDYETTQAYQLTVNATDQDKTRPLSTLANLAIIITDVQDMDPIFINLPYSTNIYEHSPPGTTVRIITAIDQDKGRPRGIGYTIVSGNTNSIFALDYISGVLTLNGLLDRENPLYSHGFILTVKGTELNDDRTPSDATVTTTFNILVIDINDNAPEFNSSEYSVAITELAQVGFALPLFIQVVDKDENLGLNSMFEVYLVGNNSHHFIISPTSVQGKADIRIRVAIPLDYETVDRYDFDLFANESVPDHVGYAKVKITLINENDNRPIFSQPLYNISLYENVTVGTSVLTVLATDNDAGTFGEVSYFFSDDPDRFSLDKDTGLIMLIARLDYELIQRFTLTIIARDGGGEETTGRVRINVLDVNDNVPTFQKDAYVGALRENEPSVTQLVRLRATDEDSPPNNQITYSIVSASAFGSYFDISLYEGYGVISVSRPLDYEQISNGLIYLTVMAMDAGNPPLNSTVPVTIEVFDENDNPPTFSKPAYFVSVVENIMAGATVLFLNATDLDRSREYGQESIIYSLEGSTQFRINARSGEITTTSLLDRETKSEYILIVRAVDGGVGHNQKTGIATVNITLLDINDNHPTWKDAPYYINLVEMTPPDSDVTTVVAVDPDLGENGTLVYSIQPPNKFYSLNSTTGKIRTTHAMLDRENPDPHEAELMRKIVVSVTDCGRPPLKATSSATVFVNLLDLNDNDPTFQNLPFVAEVLEGIPAGVSIYQVVAIDLDEGLNGLVSYRMPVGMPRMDFLINSSSGVVVTTTELDRERIAEYQLRVVASDAGTPTKSSTSTLTIHVLDVNDETPTFFPAVYNVSVSEDVPREFRVVWLNCTDNDVGLNAELSYFITGGNVDGKFSVGYRDAVVRTVVGLDRETTAAYMLILEAIDNGPVGKRHTGTATVFVTVLDVNDNRPIFLQSSYEASVPEDIPEGHSILQLKATDADEGEFGRVWYRILHGNHGNNFRIHVSNGLLMRGPRPLDRERNSSHVLIVEAYNHDLGPMRSSVRVIVYVEDINDEAPVFTQQQYSRLGLRETAGIGTSVIVVQATDRDSGDGGLVNYRILSGAEGKFEIDESTGLIITVNYLDYETKTSYMMNVSATDQAPPFNQGFCSVYITLLNELDEAVQFSNASYEAAILENLALGTEIVRVQAYSIDNLNQITYRFDAYTSTQAKALFKIDAITGVITVQGLVDREKGDFYTLTVVADDGGPKVDSTVVYITVLDENDNSPRFDFTSDSAVSIPEDCPVGQRVATVKAWDPDAGSNGQVVFSLASGNIAGAFEIVTTNDSIGEVFVARPLDREELDHYILQVVASDRGTPPRKKDHILQVTILDINDNPPVIESPFGYNVSVNENVGGGTAVVQVRATDRDIGINSVLSYYITEGNKDMTFRMDRISGEIATRPAPPDRERQSFYHLVATVEDEGTPTLSATTHVYVTIVDENDNAPMFQQPHYEVLLDEGPDTLNTSLITIQALDLDEGPNGTVTYAIVAGNIVNTFRIDRHMGVITAAKELDYEISHGRYTLIVTATDQCPILSHRLTSTTTVLVNVNDINDNVPTFPRDYEGPFEVTEGQPGPRVWTFLAHDRDSGPNGQVEYSIMDGDPLGEFVISPVEGVLRVRKDVELDRETIAFYNLTICARDRGMPPLSSTMLVGIRVLDINDNDPVLLNLPMNITISENSPVSSFVAHVLASDADSGCNARLTFNITAGNRERAFFINATTGIVTVNRPLDRERIPEYKLTISVKDNPENPRIARRDYDLLLIFLSDENDNHPLFTKSTYQAEVMENSPAGTPLTVLNGPILALDADQDIYAVVTYQLLGAQSGLFDINSSTGVVTVRSGVIIDREAFSPPILELLLLAEDIGLLNSTAHLLITILDDNDNRPTFSPATLTVHLLENCPPGFSVLQVTATDEDSGLNGELVYRIEAGAQDRFLIHLVTGVIRVGNATIDREEQESYRLTVVATDRGTVPLSGTAIVTILIDDINDSRPEFLNPIQTVSVLESAEPGTVIANITAIDHDLNPKLEYHIVGIVAKDDTDRLVPNQEDAFAVNINTGSVMVKSPMNRELVATYEVTLSVIDNASDLPERSVSVPNAKLTVNVLDVNDNTPQFKPFGITYYMERILEGATPGTTLIAVAAVDPDKGLNGLVTYTLLDLVPPGYVQLEDSSAGKVIANRTVDYEEVHWLNFTVRASDNGSPPRAAEIPVYLEIVDINDNNPIFDQPSYQEAVFEDVPVGTIILTVTATDADSGNFALIEYSLGDGESKFAINPTTGDIYVLSSLDREKKDHYILTALAKDNPGDVASNRRENSVQVVIQVLDVNDCRPQFSKPQFSTSVYENEPAGTSVITMMATDQDEGPNGELTYSLEGPGVEAFHVDMDSGLVTTQRPLQSYEKFSLTVVATDGGEPPLWGTTMLLVEVIDVNDNRPVFVRPPNGTILHIREEIPLRSNVYEVYATDKDEGLNGAVRYSFLKTAGNRDWEFFIIDPISGLIQTAQRLDRESQAVYSLILVASDLGQPVPYETMQPLQVALEDIDDNEPLFVRPPKGSPQYQLLTVPEHSPRGTLVGNVTGAVDADEGPNAIVYYFIAAGNEEKNFHLQPDGCLLVLRDLDREREAIFSFIVKASSNRSWTPPRGPSPTLDLVADLTLQEVRVVLEDINDQPPRFTKAEYTAGVATDAKVGSELIQVLALDADIGNNSLVFYSILAIHYFRALANDSEDVGQVFTMGSMDGILRTFDLFMAYSPGYFVVDIVARDLAGHNDTAIIGIYILRDDQRVKIVINEIPDRVRGFEEEFIHLLSNITGAIVNTDNVQFHVDKKGRVNFAQTELLIHVVNRDTNRILDVDRVIQMIDENKEQLRNLFRNYNVLDVQPAISVRLPDDMSALQMAIIVLAILLFLAAMLFVLMNWYYRTVHKRKLKAIVAGSAGNRGFIDIMDMPNTNKYSFDGANPVWLDPFCRNLELAAQAEHEDDLPENLSEIADLWNSPTRTHGTFGREPAAVKPDDDRYLRAAIQEYDNIAKLGQIIREGPIKGSLLKVVLEDYLRLKKLFAQRMVQKASSCHSSISELIQTELDEEPGDHSPGQGSLRFRHKPPVELKGPDGIHVVHGSTGTLLATDLNSLPEEDQKGLGRSLETLTAAEATAFERNARTESAKSTPLHKLRDVIMETPLEITEL

SEQ ID NO: 5811 - protein, 3352 aa, Homo sapiens
MGRHVATSCHVAWLLVLISGCWGQVNRLPFFTNHFFDTYLLISEDTPVGSSVTQLLAQDMDNDPLVFGVSGEEASRFFAVEPDTGVVWLRQPLDRETKSEFTVEFSVSDHQGVITRKVNIQVGDVNDNAPTFHNQPYSVRIPENTPVGTPIFIVNATDPDLGAGGSVLYSFQPPSQFFAIDSARGIVTVIRELDYETTQAYQLTVNATDQDKTRPLSTLANLAIIITDVQDMDPIFINLPYSTNIYEHSPPGTTVRIITAIDQDKGRPRGIGYTIVSGNTNSIFALDYISGVLTLNGLLDRENPLYSHGFILTVKGTELNDDRTPSDATVTTTFNILVIDINDNAPEFNSSEYSVAITELAQVGFALPLFIQVVDKDEGLNSMFEVYLVGNNSHHFIISPTSVQGKADIRIRVAIPLDYETVDRYDFDLFANESVPDHVGYAKVKITLINENDNRPIFSQPLYNISLYENVTVGTSVLTVLATDNDAGTFGEVSYFFSDDPDRFSLDKDTGLIMLIARLDYELIQRFTLTIIARDGGGEETTGRVRINVLDVNDNVPTFQKDAYVGALRENEPSVTQLVRLRATDEDSPPNNQITYSIVSASAFGSYFDISLYEGYGVISVSRPLDYEQISNGLIYLTVMAMDAGNPPLNSTVPVTIEVFDENDNPPTFSKPAYFVSVVENIMAGATVLFLNATDLDRSREYGQESIIYSLEGSTQFRINARSGEITTTSLLDRETKSEYILIVRAVDGGVGHNQKTGIATVNITLLDINDNHPTWKDAPYYINLVEMTPPDSDVTTVVAVDPDLGENGTLVYSIQPPNKFYSLNSTTGKIRTTHAMLDRENPDPHEAELMRKIVVSVTDCGRPPLKATSSATVFVNLLDLNDNDPTFQNLPFVAEVLEGIPAGVSIYQVVAIDLDEGLNGLVSYRMPVGMPRMDFLINSSSGVVVTTTELDRERIAEYQLRVVASDAGTPTKSSTSTLTIHVLDVNDETPTFFPAVYNVSVSEDVPREFRVVWLNCTDNDVGLNAELSYFITGGNVDGKFSVGYRDAVVRTVVGLDRETTAAYMLILEAIDNGPVGKRHTGTATVFVTVLDVNDNRPIFLQSSYEASVPEDIPEGHSILQLKATDADEGEFGRVWYRILHGNHGNNFRIHVSNGLLMRGPRPLDRERNSSHVLIVEAYNHDLGPMRSSVRVIVYVEDINDEAPVFTQQQYSRLGLRETAGIGTSVIVVQATDRDSGDGGLVNYRILSGAEGKFEIDESTGLIITVNYLDYETKTSYMMNVSATDQAPPFNQGFCSVYITLLNELDEAVQFSNASYEAAILENLALGTEIVRVQAYSIDNLNQITYRFDAYTSTQAKALFKIDAITGVITVQGLVDREKGDFYTLTVVADDGGPKVDSTVKVYITVLDENDNSPRFDFTSDSAVSIPEDCPVGQRVATVKAWDPDAGSNGQVVFSLASGNIAGAFEIVTTNDSIGEVFVARPLDREELDHYILQVVASDRGTPPRKKDHILQVTILDINDNPPVIESPFGYNVSVNENVGGGTAVVQVRATDRDIGINSVLSYYITEGNKDMTFRMDRISGEIATRPAPPDRERQSFYHLVATVEDEGTPTLSATTHVYVTIVDENDNAPMFQQPHYEVLLDEGPDTLNTSLITIQALDLDEGPNGTVTYAIVAGNIVNTFRIDRHMGVITAAKELDYEISHGRYTLIVTATDQCPILSHRLTSTTTVLVNVNDINDNVPTFPRDYEGPFEVTEGQPGPRVWTFLAHDRDSGPNGQVEYSIMDGDPLGEFVISPVEGVLRVRKDVELDRETIAFYNLTICARDRGMPPLSSTMLVGIRVLDINDNDPVLLNLPMNITISENSPVSSFVAHVLASDADSGCNARLTFNITAGNRERAFFINATTGIVTVNRPLDRERIPEYKLTISVKDNPENPRIARRDYDLLLIFLSDENDNHPLFTKSTYQAEVMENSPAGTPLTVLNGPILALDADQDIYAVVTYQLLGAQSGLFDINSSTGVVTVRSGVIIDREAFSPPILELLLLAEDIGLLNSTAHLLITILDDNDNRPTFSPATLTVHLLENCPPGFSVLQVTATDEDSGLNGELVYRIEAGAQDRFLIHLVTGVIRVGNATIDREEQESYRLTVVATDRGTVPLSGTAIVTILIDDINDSRPEFLNPIQTVSVLESAEPGTVIANITAIDHDLNPKLEYHIVGIVAKDDTDRLVPNQEDAFAVNINTGSVMVKSPMNRELVATYEVTLSVIDNASDLPERSVSVPNAKLTVNVLDVNDNTPQFKPFGITYYMERILEGATPGTTLIAVAAVDPDKGLNGLVTYTLLDLVPPGYVQLEDSSAGKVIANRTVDYEEVHWLNFTVRASDNGSPPRAAEIPVYLEIVDINDNNPIFDQPSYQEAVFEDVPVGTIILTVTATDADSGNFALIEYSLGDGESKFAINPTTGDIYVLSSLDREKKDHYILTALAKDNPGDVASNRRENSVQVVIQVLDVNDCRPQFSKPQFSTSVYENEPAGTSVITMMATDQDEGPNGELTYSLEGPGVEAFHVDMDSGLVTTQRPLQSYEKFSLTVVATDGGEPPLWGTTMLLVEVIDVNDNRPVFVRPPNGTILHIREEIPLRSNVYEVYATDKDEGLNGAVRYSFLKTAGNRDWEFFIIDPISGLIQTAQRLDRESQAVYSLILVASDLGQPVPYETMQPLQVALEDIDDNEPLFVRPPKGSPQYQLLTVPEHSPRGTLVGNVTGAVDADEGPNAIVYYFIAAGNEEKNFHLQPDGCLLVLRDLDREREAIFSFIVKASSNRSWTPPRGPSPTLDLVADLTLQEVRVVLEDINDQPPRFTKAEYTAGVATDAKVGSELIQVLALDADIGNNSLVFYSILAIHYFRALANDSEDVGQVFTMGSMDGILRTFDLFMAYSPGYFVVDIVARDLAGHNDTAIIGIYILRDDQRVKIVINEIPDRVRGFEEEFIHLLSNITGAIVNTDNVQFHVDKKGRVNFAQTELLIHVVNRDTNRILDVDRVIQMIDENKEQLRNLFRNYNVLDVQPAISVRLPDDMSALQMAIIVLAILLFLAAMLFVLMNWYYRTVHKRKLKAIVAGSAGNRGFIDIMDMPNTNKYSFDGANPVWLDPFCRNLELAAQAEHEDDLPENLSEIADLWNSPTRTHGTFGREPAAVKPDDDRYLRAAIQEYDNIAKLGQIIREGPIKGSLLKVVLEDYLRLKKLFAQRMVQKASSCHSSISELIQTELDEEPGDHSPGQGSLRFRHKPPVELKGPDGIHVVHGSTGTLLATDLNSLPEEDQKGLGRSLETLTAAEATAFERNARTESAKSTPLHKLRDVIMETPLEITEL

SEQ ID NO: 5812 - protein, 426 aa, Homo sapiens
MRQVCCSALPPPPLEKGRCSSYSDSSSSSSERSSSSSSSSSESGSSSRSSSNNSSISRPAAPPEPRPQQQPQPRSPAARRAAARSRAAAAGGMRRDPAPGFSMLLFGVSLACYSPSLKSVQDQAYKAPVVVEGKVQGLVPAGGSSSNSTREPPASGRVALVKVLDKWPLRSGGLQREQVISVGSCVPLERNQRYIFFLEPTEQPLVFKTAFAPLDTNGKNLKKEVGKILCTDCATRPKLKKMKSQTGQVGEKQSLKCEAAAGNPQPSYRWFKDGKELNRSRDIRIKYGNGRKNSRLQFNKVKVEDAGEYVCEAENILGKDTVRGRLYVNSVSTTLSSWSGHARKCNETAKSYCVNGGVCYYIEGINQLSCKCPNGFFGQRCLEKLPLRLYMPDPKQSVLWDTPGTGVSSSQWSTSPKPRSCTRRGS

SEQ ID NO: 5813 - protein, 852 aa, Homo sapiens
MRQVCCSALPPPPLEKGRCSSYSDSSSSSSERSSSSSSSSSESGSSSRSSSNNSSISRPAAPPEPRPQQQPQPRSPAARRAAARSRAAAAGGMRRDPAPGFSMLLFGVSLACYSPSLKSVQDQAYKAPVVVEGKVQGLVPAGGSSSNSTREPPASGRVALVKVLDKWPLRSGGLQREQVISVGSCVPLERNQRYIFFLEPTEQPLVFKTAFAPLDTNGKNLKKEVGKILCTDCATRPKLKKMKSQTGQVGEKQSLKCEAAAGNPQPSYRWFKDGKELNRSRDIRIKYGNGRKNSRLQFNKVKVEDAGEYVCEAENILGKDTVRGRLYVNSVSTTLSSWSGHARKCNETAKSYCVNGGVCYYIEGINQLSCKCPVGYTGDRCQQFAMVNFSKHLGFELKEAEELYQKRVLTITGICVALLVVGIVCVVAYCKTKKQRKQMHNHLRQNMCPAHQNRSLANGPSHPRLDPEEIQMADYISKNVPATDHVIRRETETTFSGSHSCSPSHHCSTATPTSSHRHESHTWSLERSESLTSDSQSGIMLSSVGTSKCNSPACVEARARRAAAYNLEERRRATAPPYHDSVDSLRDSPHSERYVSALTTPARLSPVDFHYSLATQVPTFEITSPNSAHAVSLPPAAPISYRLAEQQPLLRHPAPPGPGPGPGPGPGPGADMQRSYDSYYYPAAGPGPRRGTCALGGSLGSLPASPFRIPEDDEYETTQECAPPPPPRPRARGASRRTSAGPRRWRRSRLNGLAAQRARAARDSLSLSSGSGGGSASASDDDADDADGALAAESTPFLGLRGAHDALRSDSPPLCPAADSRTYYSLDSHSTRASSRHSRGPPPRAKQDSAPL

SEQ ID NO: 5814 - protein, 850 aa, Homo sapiens
MRQVCCSALPPPPLEKGRCSSYSDSSSSSSERSSSSSSSSSESGSSSRSSSNNSSISRPAAPPEPRPQQQPQPRSPAARRAAARSRAAAAGGMRRDPAPGFSMLLFGVSLACYSPSLKSVQDQAYKAPVVVEGKVQGLVPAGGSSSNSTREPPASGRVALVKVLDKWPLRSGGLQREQVISVGSCVPLERNQRYIFFLEPTEQPLVFKTAFAPLDTNGKNLKKEVGKILCTDCATRPKLKKMKSQTGQVGEKQSLKCEAAAGNPQPSYRWFKDGKELNRSRDIRIKYGNGRKNSRLQFNKVKVEDAGEYVCEAENILGKDTVRGRLYVNSVSTTLSSWSGHARKCNETAKSYCVNGGVCYYIEGINQLSCKCPNGFFGQRCLEKLPLRLYMPDPKQKAEELYQKRVLTITGICVALLVVGIVCVVAYCKTKKQRKQMHNHLRQNMCPAHQNRSLANGPSHPRLDPEEIQMADYISKNVPATDHVIRRETETTFSGSHSCSPSHHCSTATPTSSHRHESHTWSLERSESLTSDSQSGIMLSSVGTSKCNSPACVEARARRAAAYNLEERRRATAPPYHDSVDSLRDSPHSERYVSALTTPARLSPVDFHYSLATQVPTFEITSPNSAHAVSLPPAAPISYRLAEQQPLLRHPAPPGPGPGPGPGPGPGADMQRSYDSYYYPAAGPGPRRGTCALGGSLGSLPASPFRIPEDDEYETTQECAPPPPPRPRARGASRRTSAGPRRWRRSRLNGLAAQRARAARDSLSLSSGSGGGSASASDDDADDADGALAAESTPFLGLRGAHDALRSDSPPLCPAADSRTYYSLDSHSTRASSRHSRGPPPRAKQDSAPL

SEQ ID NO: 5815 - protein, 422 aa, Homo sapiens
MRQVCCSALPPPPLEKGRCSSYSDSSSSSSERSSSSSSSSSESGSSSRSSSNNSSISRPAAPPEPRPQQQPQPRSPAARRAAARSRAAAAGGMRRDPAPGFSMLLFGVSLACYSPSLKSVQDQAYKAPVVVEGKVQGLVPAGGSSSNSTREPPASGRVALVKVLDKWPLRSGGLQREQVISVGSCVPLERNQRYIFFLEPTEQPLVFKTAFAPLDTNGKNLKKEVGKILCTDCATRPKLKKMKSQTGQVGEKQSLKCEAAAGNPQPSYRWFKDGKELNRSRDIRIKYGNGRKNSRLQFNKVKVEDAGEYVCEAENILGKDTVRGRLYVNSVSTTLSSWSGHARKCNETAKSYCVNGGVCYYIEGINQLSCKCPNGFFGQRCLEKLPLRLYMPDPKQSVLWDTPGTGVSSSQWSTSPSTLDLN

SEQ ID NO: 5816 - protein, 844 aa, Homo sapiens
MRQVCCSALPPPPLEKGRCSSYSDSSSSSSERSSSSSSSSSESGSSSRSSSNNSSISRPAAPPEPRPQQQPQPRSPAARRAAARSRAAAAGGMRRDPAPGFSMLLFGVSLACYSPSLKSVQDQAYKAPVVVEGKVQGLVPAGGSSSNSTREPPASGRVALVKVLDKWPLRSGGLQREQVISVGSCVPLERNQRYIFFLEPTEQPLVFKTAFAPLDTNGKNLKKEVGKILCTDCATRPKLKKMKSQTGQVGEKQSLKCEAAAGNPQPSYRWFKDGKELNRSRDIRIKYGNGRKNSRLQFNKVKVEDAGEYVCEAENILGKDTVRGRLYVNSVSTTLSSWSGHARKCNETAKSYCVNGGVCYYIEGINQLSCKCPVGYTGDRCQQFAMVNFSKAEELYQKRVLTITGICVALLVVGIVCVVAYCKTKKQRKQMHNHLRQNMCPAHQNRSLANGPSHPRLDPEEIQMADYISKNVPATDHVIRRETETTFSGSHSCSPSHHCSTATPTSSHRHESHTWSLERSESLTSDSQSGIMLSSVGTSKCNSPACVEARARRAAAYNLEERRRATAPPYHDSVDSLRDSPHSERYVSALTTPARLSPVDFHYSLATQVPTFEITSPNSAHAVSLPPAAPISYRLAEQQPLLRHPAPPGPGPGPGPGPGPGADMQRSYDSYYYPAAGPGPRRGTCALGGSLGSLPASPFRIPEDDEYETTQECAPPPPPRPRARGASRRTSAGPRRWRRSRLNGLAAQRARAARDSLSLSSGSGGGSASASDDDADDADGALAAESTPFLGLRGAHDALRSDSPPLCPAADSRTYYSLDSHSTRASSRHSRGPPPRAKQDSAPL

SEQ ID NO: 5817 - protein, 858 aa, Homo sapiens
MRQVCCSALPPPPLEKGRCSSYSDSSSSSSERSSSSSSSSSESGSSSRSSSNNSSISRPAAPPEPRPQQQPQPRSPAARRAAARSRAAAAGGMRRDPAPGFSMLLFGVSLACYSPSLKSVQDQAYKAPVVVEGKVQGLVPAGGSSSNSTREPPASGRVALVKVLDKWPLRSGGLQREQVISVGSCVPLERNQRYIFFLEPTEQPLVFKTAFAPLDTNGKNLKKEVGKILCTDCATRPKLKKMKSQTGQVGEKQSLKCEAAAGNPQPSYRWFKDGKELNRSRDIRIKYGNGRKNSRLQFNKVKVEDAGEYVCEAENILGKDTVRGRLYVNSVSTTLSSWSGHARKCNETAKSYCVNGGVCYYIEGINQLSCKCPNGFFGQRCLEKLPLRLYMPDPKQKHLGFELKEAEELYQKRVLTITGICVALLVVGIVCVVAYCKTKKQRKQMHNHLRQNMCPAHQNRSLANGPSHPRLDPEEIQMADYISKNVPATDHVIRRETETTFSGSHSCSPSHHCSTATPTSSHRHESHTWSLERSESLTSDSQSGIMLSSVGTSKCNSPACVEARARRAAAYNLEERRRATAPPYHDSVDSLRDSPHSERYVSALTTPARLSPVDFHYSLATQVPTFEITSPNSAHAVSLPPAAPISYRLAEQQPLLRHPAPPGPGPGPGPGPGPGADMQRSYDSYYYPAAGPGPRRGTCALGGSLGSLPASPFRIPEDDEYETTQECAPPPPPRPRARGASRRTSAGPRRWRRSRLNGLAAQRARAARDSLSLSSGSGGGSASASDDDADDADGALAAESTPFLGLRGAHDALRSDSPPLCPAADSRTYYSLDSHSTRASSRHSRGPPPRAKQDSAPL

SEQ ID NO: 5818 - protein, 847 aa, Homo sapiens
MLFKLLQRQTYTCLSHRYGLYVCFLGVVVTIVSAFQFGEVVLEWSRDQYHVLFDSYRDNIAGKSFQNRLCLPMPIDVVYTWVNGTDLELLKELQQVREQMEEEQKAMREILGKNTTEPTKKSEKQLECLLTHCIKVPMLVLDPALPANITLKDLPSLYPSFHSASDIFNVAKPKNPSTNVSVVVFDSTKDVEDAHSGLLKGNSRQTVWRGYLTTDKEVPGLVLMQDLAFLSGFPPTFKETNQLKTKLPENLSSKVKLLQLYSEASVALLKLNNPKDFQELNKQTKKNMTIDGKELTISPAYLLWDLSAISQSKQDEDISASRFEDNEELRYSLRSIERHAPWVRNIFIVTNGQIPSWLNLDNPRVTIVTHQDVFRNLSHLPTFSSPAIESHIHRIEGLSQKFIYLNDDVMFGKDVWPDDFYSHSKGQKVYLTWPVPNCAEGCPGSWIKDGYCDKACNNSACDWDGGDCSGNSGGSRYIAGGGGTGSIGVGQPWQFGGGINSVSYCNQGCANSWLADKFCDQACNVLSCGFDAGDCGQDHFHELYKVILLPNQTHYIIPKGECLPYFSFAEVAKRGVEGAYSDNPIIRHASIANKWKTIHLIMHSGMNATTIHFNLTFQNTNDEEFKMQITVEVDTREGPKLNSTAQKGYENLVSPITLLPEAEILFEDIPKEKRFPKFKRHDVNSTRRAQEEVKIPLVNISLLPKDAQLSLNTLDLQLEHGDITLKGYNLSKSALLRSFLMNSQHAKIKNQAIITDETNDSLVAPQEKQVHKSILPNSLGVSERLQRLTFPAVSVKVNGHDQGQNPPLDLETTARFRVETHTQKTIGGNVTKEKPPSLIVPLESQMT

SEQ ID NO: 5819 - protein, 1256 aa, Homo sapiens
MLFKLLQRQTYTCLSHRYGLYVCFLGVVVTIVSAFQFGEVVLEWSRDQYHVLFDSYRDNIAGKSFQNRLCLPMPIDVVYTWVNGTDLELLKELQQVREQMEEEQKAMREILGKNTTEPTKKSEKQLECLLTHCIKVPMLVLDPALPANITLKDLPSLYPSFHSASDIFNVAKPKNPSTNVSVVVFDSTKDVEDAHSGLLKGNSRQTVWRGYLTTDKEVPGLVLMQDLAFLSGFPPTFKETNQLKTKLPENLSSKVKLLQLYSEASVALLKLNNPKDFQELNKQTKKNMTIDGKELTISPAYLLWDLSAISQSKQDEDISASRFEDNEELRYSLRSIERHAPWVRNIFIVTNGQIPSWLNLDNPRVTIVTHQDVFRNLSHLPTFSSPAIESHIHRIEGLSQKFIYLNDDVMFGKDVWPDDFYSHSKGQKVYLTWPVPNCAEGCPGSWIKDGYCDKACNNSACDWDGGDCSGNSGGSRYIAGGGGTGSIGVGQPWQFGGGINSVSYCNQGCANSWLADKFCDQACNVLSCGFDAGDCGQDHFHELYKVILLPNQTHYIIPKGECLPYFSFAEVAKRGVEGAYSDNPIIRHASIANKWKTIHLIMHSGMNATTIHFNLTFQNTNDEEFKMQITVEVDTREGPKLNSTAQKGYENLVSPITLLPEAEILFEDIPKEKRFPKFKRHDVNSTRRAQEEVKIPLVNISLLPKDAQLSLNTLDLQLEHGDITLKGYNLSKSALLRSFLMNSQHAKIKNQAIITDETNDSLVAPQEKQVHKSILPNSLGVSERLQRLTFPAVSVKVNGHDQGQNPPLDLETTARFRVETHTQKTIGGNVTKEKPPSLIVPLESQMTKEKKITGKEKENSRMEENAENHIGVTEVLLGRKLQHYTDSYLGFLPWEKKKYFQDLLDEEESLKTQLAYFTDSKNTGRQLKDTFADSLRYVNKILNSKFGFTSRKVPAHMPHMIDRIVMQELQDMFPEEFDKTSFHKVRHSEDMQFAFSYFYYLMSAVQPLNISQVFDEVDTDQSGVLSDREIRTLATRIHELPLSLQDLTGLEHMLINCSKMLPADITQLNNIPPTQESYYDPNLPPVTKSLVTNCKPVTDKIHKAYKDKNKYRFEIMGEEEIAFKMIRTNVSHVVGQLDDIRKNPRKFVCLNDNIDHNHKDAQTVKAVLRDFYESMFPIPSQFELPREYRNRFLHMHELQEWRAYRDKLKFWTHCVLATLIMFTIFSFFAEQLIALKRKIFPRRRIHKEASPNRIRV

SEQ ID NO: 5820 - protein, 255 aa, Homo sapiens
MKALLALPLLLLLSTPPCAPQVSGIRGDALERFCLQQPLDCDDIYAQGYQSDGVYLIYPSGPSVPVPVFCDMTTEGGKWTVFQKRFNGSVSFFRGWNDYKLGFGRADGEYWLGLQNMHLLTLKQKYELRVDLEDFENNTAYAKYADFSISPNAVSAEEDGYTLFVAGFEDGGAGDSLSYHSGQKFSTFDRDQDLFVQNCAALSSGAFWFRSCHFANLNGFYLGGSHLSYANGINWAQWKGFYYSLKRTEMKIRRA

SEQ ID NO: 5821 - protein, 711 aa, Homo sapiens [sequence omitted]

SEQ ID NO: 5822 - protein, 556 aa, Homo sapiens
MELCGLGLPRPPMLLALLLATLLAAMLALLTQVALVVQVAEAARAPSVSAKPGPALWPLPLSVKMTPNLLHLAPENFYISHSPNSTAGPSCTLLEEAFRRYHGYIFGFYKWHHEPAEFQAKTQVQQLLVSITLQSECDAFPNISSDESYTLLVKEPVAVLKANRVWGALRGLETFSQLVYQDSYGTFTINESTIIDSPRFSHRGILIDTSRHYLPVKIILKTLDAMAFNKFNVLHWHIVDDQSFPYQSITFPELSNKGSYSLSHVYTPNDVRMVIEYARLRGIRVLPEFDTPGHTLSWGKGQKDLLTPCYSRQNKLDSFGPINPTLNTTYSFLTTFFKEISEVFPDQFIHLGGDEVEFKCWESNPKIQDFMRQKGFGTDFKKLESFYIQKVLDIIATINKGSIVWQEVFDDKAKLAPGTIVEVWKDSAYPEELSRVTASGFPVILSAPWYLDLISYGQDWRKYYKVEPLDFGGTQKQKQLFIGGEACLWGEYVDATNLTPRLWPRASAVGERLWSSKDVRDMDDAYDRLTRHRCRMVERGIAAQPLYAGYCNHENM

SEQ ID NO: 5823 - protein, 526 aa, Homo sapiens
MYALFLLASLLGAALAGPVLGLKECTRGSAVWCQNVKTASDCGAVKHCLQTVWNKPTVKSLPCDICKDVVTAAGDMLKDNATEEEILVYLEKTCDWLPKPNMSASCKEIVDSYLPVILDIIKGEMSRPGEVCSALNLCESLQKHLAELNHQKQLESNKIPELDMTEVVAPFMANIPLLLYPQDGPRSKPQPKDNGDVCQDCIQMVTDIQTAVRTNSTFVQALVEHVKEECDRLGPGMADICKNYISQYSEIAIQMMMHMDQQPKEICALVGFCDEVKEMPMQTLVPAKVASKNVIPALELVEPIKKHEVPAKSDVYCEVCEFLVKEVTKLIDNNKTEKEILDAFDKMCSKLPKSLSEECQEVVDTYGSSILSILLEEVSPELVCSMLHLCSGTRLPALTVHVTQPKDGGFCEVCKKLVGYLDRNLEKNSTKQEILAALEKGCSFLPDPYQKQCDQFVAEYEPVLIEILVEVMDPSFVCLKIGACPSAHKPLLGTEKCIWGPSYWCQNTETAAQCNAVEHCKRHVWN

SEQ ID NO: 5824 - protein, 527 aa, Homo sapiens
MYALFLLASLLGAALAGPVLGLKECTRGSAVWCQNVKTASDCGAVKHCLQTVWNKPTVKSLPCDICKDVVTAAGDMLKDNATEEEILVYLEKTCDWLPKPNMSASCKEIVDSYLPVILDIIKGEMSRPGEVCSALNLCESLQKHLAELNHQKQLESNKIPELDMTEVVAPFMANIPLLLYPQDGPRSKPQPKDNGDVCQDCIQMVTDIQTAVRTNSTFVQALVEHVKEECDRLGPGMADICKNYISQYSEIAIQMMMHMQDQQPKEICALVGFCDEVKEMPMQTLVPAKVASKNVIPALELVEPIKKHEVPAKSDVYCEVCEFLVKEVTKLIDNNKTEKEILDAFDKMCSKLPKSLSEECQEVVDTYGSSILSILLEEVSPELVCSMLHLCSGTRLPALTVHVTQPKDGGFCEVCKKLVGYLDRNLEKNSTKQEILAALEKGCSFLPDPYQKQCDQFVAEYEPVLIEILVEVMDPSFVCLKIGACPSAHKPLLGTEKCIWGPSYWCQNTETAAQCNAVEHCKRHVWN

SEQ ID NO: 5825 - protein, 524 aa, Homo sapiens
MYALFLLASLLGAALAGPVLGLKECTRGSAVWCQNVKTASDCGAVKHCLQTVWNKPTVKSLPCDICKDVVTAAGDMLKDNATEEEILVYLEKTCDWLPKPNMSASCKEIVDSYLPVILDIIKGEMSRPGEVCSALNLCESLQKHLAELNHQKQLESNKIPELDMTEVVAPFMANIPLLLYPQDGPRSKPQPKDNGDVCQDCIQMVTDIQTAVRTNSTFVQALVEHVKEECDRLGPGMADICKNYISQYSEIAIQMMMHMQPKEICALVGFCDEVKEMPMQTLVPAKVASKNVIPALELVEPIKKHEVPAKSDVYCEVCEFLVKEVTKLIDNNKTEKEILDAFDKMCSKLPKSLSEECQEVVDTYGSSILSILLEEVSPELVCSMLHLCSGTRLPALTVHVTQPKDGGFCEVCKKLVGYLDRNLEKNSTKQEILAALEKGCSFLPDPYQKQCDQFVAEYEPVLIEILVEVMDPSFVCLKIGACPSAHKPLLGTEKCIWGPSYWCQNTETAAQCNAVEHCKRHVWN

SEQ ID NO: 5826 - protein, 999 aa, Homo sapiens
MADKVRRQRPRRRVCWALVAVLLADLLALSDTLAVMSVDLGSESMKVAIVKPGVPMEIVLNKESRRKTPVIVTLKENERFFGDSAASMAIKNPKATLRYFQHLLGKQADNPHVALYQARFPEHELTFDPQRQTVHFQISSQLQFSPEEVLGMVLNYSRSLAEDFAEQPIKDAVITVPVFFNQAERRAVLQAARMAGLKVLQLINDNTATALSYGVFRRKDINTTAQNIMFYDMGSGSTVCTIVTYQMVKTKEAGMQPQLQIRGVGFDRTLGGLEMELRLRERLAGLFNEQRKGQRAKDVRENPRAMAKLLREANRLKTVLSANADHMAQIEGLMDDVDFKAKVTRVEFEELCADLFERVPGPVQQALQSAEMSLDEIEQVILVGGATRVPRVQEVLLKAVGKEELGKNINADEAAAMGAVYQAAALSKAFKVKPFVVRDAVVYPILVEFTREVEEEPGIHSLKHNKRVLFSRMGPYPQRKVITFNRYSHDFNFHINYGDLGFLGPEDLRVFGSQNLTTVKLKGVGDSFKKYPDYESKGIKAHFNLDESGVLSLDRVESVFETLVEDSAEEESTLTKLGNTISSLFGGGTTPDAKENGTDTVQEEEESPAEGSKDEPGEQVELKEEAEAPVEDGSQPPPPEPKGDATPEGEKATEKENGDKSEAQKPSEKAEAGPEGVAPAPEGEKKQKPARKRRMVEEIGVELVVLDLPDLPEDKLAQSVQKLQDLTLRDLEKQEREKAANSLEAFIFETQDKLYQPEYQEVSTEEQREEISGKLSAASTWLEDEGVGATTVMLKEKLAELRKLCQGLFFRVEERKKWPERLSALDNLLNHSSMFLKGARLIPEMDQIFTEVEMTTLEKVINETWAWKNATLAEQAKLPATEKPVLLSKDIEAKMMALDREVQYLLNKAKFTKPRPRPKDKNGTRAEPPLNASASDQGEKVIPPAGQTEDAEPISEPEKVETGSEPGDTEPLELGGPGAEPEQKEQSTGQKRPLKNDEL

SEQ ID NO: 5827 - protein, 1007 aa, Homo sapiens
MKMWLLVSHLVIISITTCLAVSEEDKGFGPIFEEQPINTIYPEESLEGKVSLNCRARASPFPVYKWRMNNGDVDLTSDRYSMVGGNLVINNPDKQKDAGIYYCLASNNYGMVRSTEATLSFGYLDPFPPEERPEVRVKEGKGMVLLCDPPYHFPDDLSYRWLLNEFPVFITMDKRRFVSQTNGNLYIANVEASDKGNYSCFVSSPSITKSVFSKFIPLIPIPERTTKPYPADIVVQFKDVYALMGQNVTLECFALGNPVPDIRWRKVLEPMPSTAEISTSGAVLKIFNIQLEDEGIYECEAENIRGKDKHQARIYVQAFPEWVEHINDTEVDIGSDLYWPCVATGKPIPTIRWLKNGYAYHKGELRLYDVTFENAGMYQCIAENTYGAIYANAELKILALAPTFEMNPMKKKILAAKGGRVIIECKPKAAPKPKFSWSKGTEWLVNSSRILIWEDGSLEINNITRNDGGIYTCFAENNRGKANSTGTLVITDPTRIILAPINADITVGENATMQCAASFDPALDLTFVWSFNGYVIDFNKENIHYQRNFMLDSNGELLIRNAQLKHAGRYTCTAQTIVDNSSASADLVVRGPPGPPGGLRIEDIRATSVALTWSRGSDNHSPISKYTIQTKTILSDDWKDAKTDPPIIEGNMEAARAVDLIPWMEYEFRVVATNTLGRGEPSIPSNRIKTDGAAPNVAPSDVGGGGGRNRELTITWAPLSREYHYGNNFGYIVAFKPFDGEEWKKVTVTNPDTGRYVHKDETMSPSTAFQVKVKAFNNKGDGPYSLVAVINSAQDAPSEAPTEVGVKVLSSSEISVHWEHVLEKIVESYQIRYWAAHDKEEAANRVQVTSQEYSARLENLLPDTQYFIEVGACNSAGCGPPSDMIEAFTKKAPPSQPPRIISSVRSGSRYIITWDHVVALSNESTVTGYKVLYRPDGQHDGKLYSTHKHSIEVPIPRDGEYVVEVRAHSDGGDGVVSQVKISGAPTLSPSLLGLLLPAFGILVYLEF

SEQ ID NO: 5828 - protein, 1018 aa, Homo sapiens
MKMWLLVSHLVIISITTCLAEFTWYRRYGHGVSEEDKGFGPIFEEQPINTIYPEESLEGKVSLNCRARASPFPVYKWRMNNGDVDLTSDRYSMVGGNLVINNPDKQKDAGIYYCLASNNYGMVRSTEATLSFGYLDPFPPEERPEVRVKEGKGMVLLCDPPYHFPDDLSYRWLLNEFPVFITMDKRRFVSQTNGNLYIANVEASDKGNYSCFVSSPSITKSVFSKFIPLIPIPERTTKPYPADIVVQFKDVYALMGQNVTLECFALGNPVPDIRWRKVLEPMPSTAEISTSGAVLKIFNIQLEDEGIYECEAENIRGKDKHQARIYVQAFPEWVEHINDTEVDIGSDLYWPCVATGKPIPTIRWLKNGYAYHKGELRLYDVTFENAGMYQCIAENTYGAIYANAELKILALAPTFEMNPMKKKILAAKGGRVIIECKPKAAPKPKFSWSKGTEWLVNSSRILIWEDGSLEINNITRNDGGIYTCFAENNRGKANSTGTLVITDPTRIILAPINADITVGENATMQCAASFDPALDLTFVWSFNGYVIDFNKENIHYQRNFMLDSNGELLIRNAQLKHAGRYTCTAQTIVDNSSASADLVVRGPPGPPGGLRIEDIRATSVALTWSRGSDNHSPISKYTIQTKTILSDDWKDAKTDPPIIEGNMEAARAVDLIPWMEYEFRVVATNTLGRGEPSIPSNRIKTDGAAPNVAPSDVGGGGGRNRELTITWAPLSREYHYGNNFGYIVAFKPFDGEEWKKVTVTNPDTGRYVHKDETMSPSTAFQVKVKAFNNKGDGPYSLVAVINSAQDAPSEAPTEVGVKVLSSSEISVHWEHVLEKIVESYQIRYWAAHDKEEAANRVQVTSQEYSARLENLLPDTQYFIEVGACNSAGCGPPSDMIEAFTKKAPPSQPPRIISSVRSGSRYIITWDHVVALSNESTVTGYKVLYRPDGQHDGKLYSTHKHSIEVPIPRDGEYVVEVRAHSDGGDGVVSQVKISGAPTLSPSLLGLLLPAFGILVYLEF

SEQ ID NO: 5829 - protein, 416 aa, Homo sapiens
MAPRSARRPLLLLLPVAAARPHALSSAAMFMVKNGNGTACIMANFSAAFSVNYDTKSGPKNMTFDLPSDATVVLNRSSCGKENTSDPSLVIAFGRGHTLTLNFTRNATRYSVQLMSFVYNLSDTHLFPNASSKEIKTVESITDIRADIDKKYRCVSGTQVHMNNVTVTLHDATIQAYLSNSSFSRGETRCEQDRPSPTTAPPAPPSPSPSPVPKSPSVDKYNVSGTNGTCLLASMGLQLNLTYERKDNTTVTRLLNINPNKTSASGSCGAHLVTLELHSEGTTVLLFQFGMNASSSRFFLQGIQLNTILPDARDPAFKAANGSLRALQATVGNSYKCNAEEHVRVTKAFSVNIFKVWVQAFKVEGGQFGSVEECLLDENSTLIPIAVGGALAGLVLIVLIAYLVGRKRSHAGYQTI

SEQ ID NO: 5830 - protein, 1408 aa, Homo sapiens
MAAERGARRLLSTPSFWLYCLLLLGRRAPGAAAARSGSAPQSPGASIRTFTPFYFLVEPVDTLSVRGSSVILNCSAYSEPSPKIEWKKDGTFLNLVSDDRRQLLPDGSLFISNVVHSKHNKPDEGYYQCVATVESLGTIISRTAKLIVAGLPRFTSQPEPSSVYAGNGAILNCEVNADLVPFVRWEQNRQPLLLDDRVIKLPSGMLVISNATEGDGGLYRCVVESGGPPKYSDEVELKVLPDPEVISDLVFLKQPSPLVRVIGQDVVLPCVASGLPTPTIKWMKNEEALDTESSERLVLLAGGSLEISDVTEDDAGTYFCIADNGNETIEAQAELTVQAQPEFLKQPTNIYAHESMDIVFECEVTGKPTPTVKWVKNGDMVIPSDYFKIVKEHNLQVLGLVKSDEGFYQCIAENDVGNAQAGAQLIILEHAPATTGPLPSAPRDVVASLVSTRFIKLTWRTPASDPHGDNLTYSVFYTKEGIARERVENTSHPGEMQVTIQNLMPATVYIFRVMAQNKHGSGESSAPLRVETQPEVQLPGPAPNLRAYAASPTSITVTWETPVSGNGEIQNYKLYYMEKGTDKEQDVDVSSHSYTINGLKKYTEYSFRVVAYNKHGPGVSTPDVAVRTLSDVPSAAPQNLSLEVRNSKSIMIHWQPPAPATQNGQITGYKIRYRKASRKSDVTETLVSGTQLSQLIEGLDRGTEYNFRVAALTINGTGPATDWLSAETFESDLDETRVPEVPSSLHVRPLVTSIVVSWTPPENQNIVVRGYAIGYGIGSPHAQTIKVDYKQRYYTIENLDPSSHYVITLKAFNNVGEGIPLYESAVTRPHTDTSEVDLFVINAPYTPVPDPTPMMPPVGVQASILSHDTIRITWADNSLPKHQKITDSRYYTVRWKTNIPANTKYKNANATTLSYLVTGLKPNTLYEFSVMVTKGRRSSTWSMTAHGTTFELVPTSPPKDVTVVSKEGKPKTIIVNWQPPSEANGKITGYIIYYSTDVNAEIHDWVIEPVVGNRLTHQIQELTLDTPYYFKIQARNSKGMGPMSEAVQFRTPKADSSDKMPNDQASGSGGKGSRLPDLGSDYKPPMSGSNSPHGSPTSPLDSNMLLVIIVSVGVITIVVVVIIAVFCTRRTTSHQKKKRAACKSVNGSHKYKGNSKDVKPPDLWIHHERLELKPIDKSPDPNPIMTDTPIPRNSQDITPVDNSMDSNIHQRRNSYRGHESEDSMSTLAGRRGMRPKMMMPFDSQPPQESVRNTPSTDTMPASSSQTCCTDHQDPEGATSSSYLASSQEEDSGQSLPTAHVRPSHPLKSFAVPAIPPPGPPTYDPALPSTPLLSQQALNHHIHSVKTASIGTLGRSRPPMPVVVPSAPEVQETTRMLEDSESSYEPDELTKEMAHLEGLMKDLNAITTA

SEQ ID NO: 5831 - protein, 1461 aa, Homo sapiens
MAAERGARRLLSTPSFWLYCLLLLGRRAPGAAAARSGSAPQSPGASIRTFTPFYFLVEPVDTLSVRGSSVILNCSAYSEPSPKIEWKKDGTFLNLVSDDRRQLLPDGSLFISNVVHSKHNKPDEGYYQCVATVESLGTIISRTAKLIVAGLPRFTSQPEPSSVYAGNGAILNCEVNADLVPFVRWEQNRQPLLLDDRVIKLPSGMLVISNATEGDGGLYRCVVESGGPPKYSDEVELKVLPDPEVISDLVFLKQPSPLVRVIGQDVVLPCVASGLPTPTIKWMKNEEALDTESSERLVLLAGGSLEISDVTEDDAGTYFCIADNGNETIEAQAELTVQAQPEFLKQPTNIYAHESMDIVFECEVTGKPTPTVKWVKNGDMVIPSDYFKIVKEHNLQVLGLVKSDEGFYQCIAENDVGNAQAGAQLIILEHAPATTGPLPSAPRDVVASLVSTRFIKLTWRTPASDPHGDNLTYSVFYTKEGIARERVENTSHPGEMQVTIQNLMPATVYIFRVMAQNKHGSGESSAPLRVETQPEVQLPGPAPNLRAYAASPTSITVTWETPVSGNGEIQNYKLYYMEKGTDKEQDVDVSSHSYTINGLKKYTEYSFRVVAYNKHGPGVSTPDVAVRTLSDVPSAAPQNLSLEVRNSKSIMIHWQPPAPATQNGQITGYKIRYRKASRKSDVTETLVSGTQLSQLIEGLDRGTEYNFRVAALTINGTGPATDWLSAETFESDLDETRVPEVPSSLHVRPLVTSIVVSWTPPENQNIVVRGYAIGYGIGSPHAQTIKVDYKQRYYTIENLDPSSHYVITLKAFNNVGEGIPLYESAVTRPHTDTSEVDLFVINAPYTPVPDPTPMMPPVGVQASILSHDTIRITWADNSLPKHQKITDSRYYTVRWKTNIPANTKYKNANATTLSYLVTGLKPNTLYEFSVMVTKGRRSSTWSMTAHGTTFELVPTSPPKDVTVVSKEGKPKTIIVNWQPPSEANGKITGYIIYYSTDVNAEIHDWVIEPVVGNRLTHQIQELTLDTPYYFKIQARNSKGMGPMSEAVQFRTPKADSSDKMPNDQASGSGGKGSRLPDLGSDYKPPMSGSNSPHGSPTSPLDSNMLLVIIVSVGVITIVVVVIIAVFCTRRTTSHQKKKRAACKSVNGSHKYKGNSKDVKPPDLWIHHERLELKPIDKSPDPNPIMTDTPIPRNSQDITPVDNSMDSNIHQRRNSYRGHESEDSMSTLAGRRGMRPKMMMPFDSQPPQPVISAHPIHSLDNPHHHFHSSSLASPARSHLYHPGSPWPIGTSMSLSDRANSTESVRNTPSTDTMPASSSQTCCTDHQDPEGATSSSYLASSQEEDSGQSLPTAHVRPSHPLKSFAVPAIPPPGPPTYDPALPSTPLLSQQALNHHIHSVKTASIGTLGRSRPPMPVVVPSAPEVQETTRMLEDSESSYEPDELTKEMAHLEGLMKDLNAITTA

SEQ ID NO: 5832 - protein, 416 aa, Homo sapiens
MSEADGLRQRRPLRPQVVTDDDGQAPEAKDGSSFSGRVFRVTFLMLAVSLTVPLLGAMMLLESPIDPQPLSFKEPPLLLGVLHPNTKLRQAERLFENQLVGPESIAHIGDVMFTGTADGRVVKLENGEIETIARFGSGPCKTRDDEPVCGRPLGIRAGPNGTLFVADAYKGLFEVNPWKREVKLLLSSETPIEGKNMSFVNDLTVTQDGRKIYFTDSSSKWQRRDYLLLVMEGTDDGRLLEYDTVTREVKVLLDQLRFPNGVQLSPAEDFVLVAETTMARIRRVYVSGLMKGGADLFVENMPGFPDNIRPSSSGGYWVGMSTIRPNPGFSMLDFLSERPWIKRMIFKLFSQETVMKFVPRYSLVLELSDSGAFRRSLHDPDGLVATYISEVHEHDGHLYLGSFRSPFLCRLSLQAV

SEQ ID NO: 5833 - protein, 1156 aa, Homo sapiens
MVLLEDSGSADFRRHFVNLSPFTITVVLLLSACFVTSSLGGTDKELRLVDGENKCSGRVEVKVQEEWGTVCNNGWSMEAVSVICNQLGCPTAIKAPGWANSSAGSGRIWMDHVSCRGNESALWDCKHDGWGKHSNCTHQQDAGVTCSDGSNLEMRLTRGGNMCSGRIEIKFQGRWGTVCDDNFNIDHASVICRQLECGSAVSFSGSSNFGEGSGPIWFDDLICNGNESALWNCKHQGWGKHNCDHAEDAGVICSKGADLSLRLVDGVTECSGRLEVRFQGEWGTICDDGWDSYDAAVACKQLGCPTAVTAIGRVNASKGFGHIWLDSVSCQGHEPAVWQCKHHEWGKHYCNHNEDAGVTCSDGSDLELRLRGGGSRCAGTVEVEIQRLLGKVCDRGWGLKEADVVCRQLGCGSALKTSYQVYSKIQATNTWLFLSSCNGNETSLWDCKNWQWGGLTCDHYEEAKITCSAHREPRLVGGDIPCSGRVEVKHGDTWGSICDSDFSLEAASVLCRELQCGTVVSILGGAHFGEGNGQIWAEEFQCEGHESHLSLCPVAPRPEGTCSHSRDVGVVCSRYTEIRLVNGKTPCEGRVELKTLGAWGSLCNSHWDIEDAHVLCQQLKCGVALSTPGGARFGKGNGQIWRHMFHCTGTEQHMGDCPVTALGASLCPSEQVASVICSGNQSQTLSSCNSSSLGPTRPTIPEESAVACIESGQLRLVNGGGRCAGRVEIYHEGSWGTICDDSWDLSDAHVVCRQLGCGEAINATGSAHFGEGTGPIWLDEMKCNGKESRIWQCHSHGWGQQNCRHKEDAGVICSEFMSLRLTSEASREACAGRLEVFYNGAWGTVGKSSMSETTVGVVCRQLGCADKGKINPASLDKAMSIPMWVDNVQCPKGPDTLWQCPSSPWEKRLASPSEETWITCDNKIRLQEGPTSCSGRVEIWHGGSWGTVCDDSWDLDDAQVVCQQLGCGPALKAFKEAEFGQGTGPIWLNEVKCKGNESSLWDCPARRWGHSECGHKEDAAVNCTDISVQKTPQKATTGRSSRQSSFIAVGILGVVLLAIFVALFFLTKKRRQRQRLAVSSRGENLVHQIQYREMNSCLNADDLDLMNSSGLWVLGGSIAQGFRSVAAVEAQTFYFDKQLKKSKNVIGSLDAYNGQE

SEQ ID NO: 5834 - protein, 1464 aa, Homo sapiens
MFSFVDLRLLLLLAATALLTHGQEEGQVEGQDEDIPPITCVQNGLRYHDRDVWKPEPCRICVCDNGKVLCDDVICDETKNCPGAEVPEGECCPVCPDGSESPTDQETTGVEGPKGDTGPRGPRGPAGPPGRDGIPGQPGLPGPPGPPGPPGPPGLGGNFAPQLSYGYDEKSTGGISVPGPMGPSGPRGLPGPPGAPGPQGFQGPPGEPGEPGASGPMGPRGPPGPPGKNGDDGEAGKPGRPGERGPPGPQGARGLPGTAGLPGMKGHRGFSGLDGAKGDAGPAGPKGEPGSPGENGAPGQMGPRGLPGERGRPGAPGPAGARGNDGATGAAGPPGPTGPAGPPGFPGAVGAKGEAGPQGPRGSEGPQGVRGEPGPPGPAGAAGPAGNPGADGQPGAKGANGAPGIAGAPGFPGARGPSGPQGPGGPPGPKGNSGEPGAPGSKGDTGAKGEPGPVGVQGPPGPAGEEGKRGARGEPGPTGLPGPPGERGGPGSRGFPGADGVAGPKGPAGERGSPGPAGPKGSPGEAGRPGEAGLPGAKGLTGSPGSPGPDGKTGPPGPAGQDGRPGPPGPPGARGQAGVMGFPGPKGAAGEPGKAGERGVPGPPGAVGPAGKDGEAGAQGPPGPAGPAGERGEQGPAGSPGFQGLPGPAGPPGEAGKPGEQGVPGDLGAPGPSGARGERGFPGERGVQGPPGPAGPRGANGAPGNDGAKGDAGAPGAPGSQGAPGLQGMPGERGAAGLPGPKGDRGDAGPKGADGSPGKDGVRGLTGPIGPPGPAGAPGDKGESGPSGPAGPTGARGAPGDRGEPGPPGPAGFAGPPGADGQPGAKGEPGDAGAKGDAGPPGPAGPAGPPGPIGNVGAPGAKGARGSAGPPGATGFPGAAGRVGPPGPSGNAGPPGPPGPAGKEGGKGPRGETGPAGRPGEVGPPGPPGPAGEKGSPGADGPAGAPGTPGPQGIAGQRGVVGLPGQRGERGFPGLPGPSGEPGKQGPSGASGERGPPGPMGPPGLAGPPGESGREGAPGAEGSPGRDGSPGAKGDRGETGPAGPPGAPGAPGAPGPVGPAGKSGDRGETGPAGPAGPVGPAGARGPAGPQGPRGDKGETGEQGDRGIKGHRGFSGLQGPPGPPGSPGEQGPSGASGPAGPRGPPGSAGAPGKDGLNGLPGPIGPPGPRGRTGDAGPVGPPGPPGPPGPPGPPSAGFDFSFLPQPPQEKAHDGGRYYRADDANVVRDRDLEVDTTLKSLSQQIENIRSPEGSRKNPARTCRDLKMCHSDWKSGEYWIDPNQGCNLDAIKVFCNMETGETCVYPTQPSVAQKNWYISKNPKDKRHVWFGESMTDGFQFEYGGQGSDPADVAIQLTFLRLMSTEASQNITYHCKNSVAYMDQQTGNLKKALLLKGSNEIEIRAEGNSRFTYSVTVDGCTSHTGAWGKTVIEYKTTKTSRLPIIDVAPLDVGAPDQEFGFDVGPVCFL

SEQ ID NO: 5835 - protein, 1222 aa, Homo sapiens
MLVGQGAGPLGPAVVTAAVVLLLSGVGPAHGSEDIVVGCGGFVKSDVEINYSLIEIKLYTKHGTLKYQTDCAPNNGYFMIPLYDKGDFILKIEPPLGWSFEPTTVELHVDGVSDICTKGGDINFVFTGFSVNGKVLSKGQPLGPAGVQVSLRNTGTEAKIQSTVTQPGGKFAFFKVLPGDYEILATHPTWALKEASTTVRVTNSNANAASPLIVAGYNVSGSVRSDGEPMKGVKFLLFSSLVTKEDVLGCNVSPVPGFQPQDESLVYLCYTVSREDGSFSFYSLPSGGYTVIPFYRGERITFDVAPSRLDFTVEHDSLKIEPVFHVMGFSVTGRVLNGPEGDGVPEAVVTLNNQIKVKTKADGSFRLENITTGTYTIHAQKEHLYFETVTIKIAPNTPQLADIIATGFSVCGQISIIRFPDTVKQMNKYKVVLSSQDKDKSLVTVETDAHGSFCFKAKPGTYKVQVMVPEAETRAGLTLKPQTFPLTVTNRPVMDVAFVQFLASVSGKVSCLDTCGDLLVTLQSLSRQGEKRSLQLSGKVNAMTFTFDNVLPGKYKISIMHEDWCWKNKSLEVEVLEDDVSAVEFRQTGYMLRCSLSHAITLEFYQDGNGRENVGIYNLSKGVNRFCLSKPGVYKVTPRSCHRFEQAFYTYDTSSPSILTLTAIRHHVLGTITTDKMMDVTVTIKSSIDSEPALVLGPLKSVQELRREQQLAEIEARRQEREKNGNEEGEERMTKPPVQEMVDELQGPFSYDFSYWARSGEKITVTPSSKELLFYPPSMEAVVSGESCPGKLIEIHGKAGLFLEGQIHPELEGVEIVISEKGASSPLITVFTDDKGAYSVGPLHSDLEYTVTSQKEGYVLTAVEGTIGDFKAYALAGVSFEIKAEDDQPLPGVLLSLSGGLFRSNLLTQDNGILTFSNLSPGQYYFKPMMKEFRFEPSSQMIEVQEGQNLKITITGYRTAYSCYGTVSSLNGEPEQGVAMEAVGQNDCSIYGEDTVTDEEGKFRLRGLLPGCVYHVQLKAEGNDHIERALPHHRVIEVGNNDIDDVNIIVFRQINQFDLSGNVITSSEYLPTLWVKLYKSENLDNPIQTVSLGQSLFFHFPPLLRDGENYVVLLDSTLPRSQYDYILPQVSFTAVGYHKHFTLIFNPTRKLPEQDIAQGSYIALPLTLLVLLAGYNHDKLIPLLLQLTSRLQGVRALGQAASDNSGPEDAKRQAKKQKTRRT

SEQ ID NO: 5836 - protein, 1222 aa, Homo sapiens
MLVGQGAGLLGPAVVTAAVVLLLSGVGPAHGSEDIVVGCGGFVKSDVEINYSLIEIKLYTKHGTLKYQTDCAPNNGYFMIPLYDKGDFILKIEPPLGWSFEPTTVELHVDGVSDICTKGGDINFVFTGFSVNGKVLSKGQPLGPAGVQVSLRNTGTEAKIQSTVTQPGGKFAFFKVLPGDYEILATHPTWALKEASTTVRVTNSNANAASPLIVAGYNVSGSVRSDGEPMKGVKFLLFSSLVTKEDVLGCNVSPVPGFQPQDESLVYLCYTVSREDGSFSFYSLPSGGYTVIPFYRGERITFDVAPSRLDFTVEHDSLKIEPVFHVMGFSVTGRVLNGPEGDGVPEAVVTLNNQIKVKTKADGSFRLENITTGTYTIHAQKEHLYFETVTIKIAPNTPQLADIVATGFSVCGRISIIRFPDTVKQMNKYKVVLSSQDKDKSLVTVETDAHGSFCFKAKPGTYKVQVMVPEAETRAGLTLKPQTFPLTVTDRPVMDVAFVQFLASVSGKVSCLDTCGDLLVTLQSLSRQGEKRSLQLSGKVNAMTFTFDNVLPGKYKISIMHEDWCWKNKSLEVEVLEDDVSAVEFRQTGYMLRCSLSHAITLEFYQDGNGRENVGIYNLSKGVNRFCLSKPGVYKVTPRSCHRFEQAFYTYDTSSPSILTLTAIRHHVLGTITTDKMMDVTVTIKSSIDSEPALVLGPLKSVQELRREQQLAEIEARRQEREKNGNEEGEERMTKPPVQEMVDELQGPFSYDFSYWARSGEKITVTPSSKELLFYPPSMEAVVSGESCPGKLIEIHGKAGLFLEGQIHPELEGVEIVISEKGASSPLITVFTDDKGAYSVGPLHSDLEYTVTSQKEGYVLTAVEGTIGDFKAYALAGVSFEIKAEDDQPLPGVLLSLSGGLFRSNLLTQDNGILTFSNLSPGQYYFKPMMKEFRFEPSSQMIEVQEGQNLKITITGYRTAYSCYGTVSSLNGEPEQGVAMEAVGQNDCSIYGEDTVTDEEGKFRLRGLLPGCVYHVQLKAEGNDHIERALPHHRVIEVGNNDIDDVNIIVFRQINQFDLSGNVITSSEYLPTLWVKLYKSENLDNPIQTVSLGQSLFFHFPPLLRDGENYVVLLDSTLPRSQYDYILPQVSFTAVGYHKHITLIFNPTRKLPEQDIAQGSYIALPLTLLVLLAGYNHDKLIPLLLQLTSRLQGVGALGQAASDNSGPEDAKRQAKKQKTRRT

SEQ ID NO: 5837 - protein, 2537 aa, Homo sapiens
MPVTEKDLAEDAPWKKIQQNTFTRWCNEHLKCVNKRIGNLQTDLSDGLRLIALLEVLSQKRMYRKYHQRPTFRQMQLENVSVALEFLDRESIKLVSIDSKAIVDGNLKLILGLVWTLILHYSISMPVWEDEGDDDAKKQTPKQRLLGWIQNKIPYLPITNFNQNWQDGKALGALVDSCAPGLCPDWESWDPQKPVDNAREAMQQADDWLGVPQVITPEEIIHPDVDEHSVMTYLSQFPKAKLKPGAPLKPKLNPKKARAYGRGIEPTGNMVKQPAKFTVDTISAGQGDVMVFVEDPEGNKEEAQVTPDSDKNKTYSVEYLPKVTGLHKVTVLFAGQHISKSPFEVSVDKAQGDASKVTAKGPGLEAVGNIANKPTYFDIYTAGAGVGDIGVEVEDPQGKNTVELLVEDKGNQVYRCVYKPMQPGPHVVKIFFAGDTIPKSPFVVQVGEACNPNACRASGRGLQPKGVRIRETTDFKVDTKAAGSGELGVTMKGPKGLEELVKQKDFLDGVYAFEYYPSTPGRYSIAITWGGHHIPKSPFEVQVGPEAGMQKVRAWGPGLHGGIVGRSADFVVESIGSEVGSLGFAIEGPSQAKIEYNDQNDGSCDVKYWPKEPGEYAVHIMCDDEDIKDSPYMAFIHPATGGYNPDLVRAYGPGLEKSGCIVNNLAEFTVDPKDAGKAPLKIFAQDGEGQRIDIQMKNRMDGTYACSYTPVKAIKHTIAVVWGGVNIPHSPYRVNIGQGSHPQKVKVFGPGVERSGLKANEPTHFTVDCTEAGEGDVSVGIKCDARVLSEDEEDVDFDIIHNANDTFTVKYVPPAAGRYTIKVLFASQEIPASPFRVKVDPSHDASKVKAEGPGLSKAGVENGKPTHFTVYTKGAGKAPLNVQFNSPLPGDAVKDLDIIDNYDYSHTVKYTPTQQGNMQVLVTYGGDPIPKSPFTVGVAAPLDLSKIKLNGLENRVEVGKDQEFTVDTRGAGGQGKLDVTILSPSRKVVPCLVTPVTGRENSTAKFIPREEGLYAVDVTYDGHPVPGSPYTVEASLPPDPSKVKAHGPGLEGGLVGKPAEFTIDTKGAGTGGLGLTVEGPCEAKIECSDNGDGTCSVSYLPTKPGEYFVNILFEEVHIPGSPFKADIEMPFDPSKVVASGPGLEHGKVGEAGLLSVNCSEAGPGALGLEAVSDSGTKAEVSIQNNKDGTYAVTYVPLTAGMYTLTMKYGGELVPHFPARVKVEPAVDTSRIKVFGPGIEGKDVFREATTDFTVDSRPLTQVGGDHIKAHIANPSGASTECFVTDNADGTYQVEYTPFEKGLHVVEVTYDDVPIPNSPFKVAVTEGCQPSRVQAQGPGLKEAFTNKPNVFTVVTRGAGIGGLGITVEGPSESKINCRDNKDGSCSAEYIPFAPGDYDVNITYGGAHIPGSPFRVPVKDVVDPSKVKIAGPGLGSGVRARVLQSFTVDSSKAGLAPLEVRVLGPRGLVEPVNMVDNGDGTHTVTYTPSQEGPYMVSVKYADEEIPRSPFKVKVLPTYDASKVTASGPGLSSYGVPASLPVDFAIDARDAGEGLLAVQITDQEGKPKRAIVHDNKDGTYAVTYIPDKTGRYMIGVTYGGDDIPLSPYRIRATQTGDASKCLATGPGIASTVKTGEEVGFVVDAKTAGKGKVTCTVLTPDGTEAEADVIENEDGTYDIFYTAAKPGTYVIYVRFGGVDIPNSPFTVMVTEEAYVPVSDMNGLGFKPFDLVIPFAVRKGEITGEVHMPSGKTATPEIVDNKDGTVTVRYAPTEVGLHEMHIKYMGSHIPESPLQFYVNYPNSGSVSAYGPGLVYGVANKTATFTIVTEDAGEGGLDLAIEGPSKAEISCIDNKDGTCTVTYLPTLPGDYSILVKYNDKHIPGSPFTAKITDDSRRCSQVKLGSAADFLLDISETDLSSLTASIKAPSGRDEPCLLKRLPNNHIGISFIPREVGEHLVSIKKNGNHVANSPVSIMVVQSEIGDARRAKVYGRGLSEGRTFEMSDFIVDTRDAGYGGISLAVEGPSKVDIQTEDLEDGTCKVSYFPTVPGVYIVSTKFADEHVPEINSSDMSAHVTSPSGRVTEAEIVPMGKNSHCVRFVPQEMGVHTVSVKYRGQHVTGSPFQFTVGPLGEGGAHKVRAGGPGLERGEAGVPAEFSIWTREAGAGGLSIAVEGPSKAEITFDDHKNGSCGVSYIAQEPGNYEVSIKFNDEHIPESPYLVPVIAPSDDARRLTVMSLQESGLKVNQPASFAIRLNGAKGKIDAKVHSPSGAVEECHVSELEPDKYAVRFIPHENGVHTIDVKFNGSHVVGSPFKVRVGEPGQAGNPALVSAYGTGLEGGTTGIQSEFFINTTRAGPGTLSVTIEGPSKVKMDCQETPEGYKVMYTPMAPGNYLISVKYGGPNHIVGSPFKAKVTGQRLVSPGSANETSSILVESVTRSSTETCYSAIPKASSDASKVTSKGAGLSKAFVGQKSSFLVDCSKAGSNMLLIGVHGPTTPCEEVSMKHVGNQQYNVTYVVKERGDYVLAVKWGEEHIPGSPFHVTVP

SEQ ID NO: 5838 - protein, 2578 aa, Homo sapiens [sequence omitted]

SEQ ID NO: 5839 - protein, 2561 aa, Homo sapiens
MPVTEKDLAEDAPWKKIQQNTFTRWCNEHLKCVNKRIGNLQTDLSDGLRLIALLEVLSQKRMYRKYHQRPTFRQMQLENVSVALEFLDRESIKLVSIDSKAIVDGNLKLILGLVWTLILHYSISMPVWEDEGDDDAKKQTPKQRLLGWIQNKIPYLPITNFNQNWQDGKALGALVDSCAPGLCPDWESWDPQKPVDNAREAMQQADDWLGVPQVITPEEIIHPDVDEHSVMTYLSQFPKAKLKPGAPLKPKLNPKKARAYGRGIEPTGNMVKQPAKFTVDTISAGQGDVMVFVEDPEGNKEEAQVTPDSDKNKTYSVEYLPKVTGLHKVTVLFAGQHISKSPFEVSVDKAQGDASKVTAKGPGLEAVGNIANKPTYFDIYTAGAGVGDIGVEVEDPQGKNTVELLVEDKGNQVYRCVYKPMQPGPHVVKIFFAGDTIPKSPFVVQVGEACNPNACRASGRGLQPKGVRIRETTDFKVDTKAAGSGELGVTMKGPKGLEELVKQKDFLDGVYAFEYYPSTPGRYSIAITWGGHHIPKSPFEVQVGPEAGMQKVRAWGPGLHGGIVGRSADFVVESIGSEVGSLGFAIEGPSQAKIEYNDQNDGSCDVKYWPKEPGEYAVHIMCDDEDIKDSPYMAFIHPATGGYNPDLVRAYGPGLEKSGCIVNNLAEFTVDPKDAGKAPLKIFAQDGEGQRIDIQMKNRMDGTYACSYTPVKAIKHTIAVVWGGVNIPHSPYRVNIGQGSHPQKVKVFGPGVERSGLKANEPTHFTVDCTEAGEGDVSVGIKCDARVLSEDEEDVDFDIIHNANDTFTVKYVPPAAGRYTIKVLFASQEIPASPFRVKVDPSHDASKVKAEGPGLSKAGVENGKPTHFTVYTKGAGKAPLNVQFNSPLPGDAVKDLDIIDNYDYSHTVKYTPTQQGNMQVLVTYGGDPIPKSPFTVGVAAPLDLSKIKLNGLENRVEVGKDQEFTVDTRGAGGQGKLDVTILSPSRKVVPCLVTPVTGRENSTAKFIPREEGLYAVDVTYDGHPVPGSPYTVEASLPPDPSKVKAHGPGLEGGLVGKPAEFTIDTKGAGTGGLGLTVEGPCEAKIECSDNGDGTCSVSYLPTKPGEYFVNILFEEVHIPGSPFKADIEMPFDPSKVVASGPGLEHGKVGEAGLLSVNCSEAGPGALGLEAVSDSGTKAEVSIQNNKDGTYAVTYVPLTAGMYTLTMKYGGELVPHFPARVKVEPAVDTSRIKVFGPGIEGKDVFREATTDFTVDSRPLTQVGGDHIKAHIANPSGASTECFVTDNADGTYQVEYTPFEKGLHVVEVTYDDVPIPNSPFKVAVTEGCQPSRVQAQGPGLKEAFTNKPNVFTVVTRGAGIGGLGITVEGPSESKINCRDNKDGSCSAEYIPFAPGDYDVNITYGGAHIPGSPFRVPVKDVVDPSKVKIAGPGLGSGVRARVLQSFTVDSSKAGLAPLEVRVLGPRGLVEPVNMVDNGDGTHTVTYTPSQEGPYMVSVKYADEEIPRSPFKVKVLPTYDASKVTASGPGLSSYGVPASLPVDFAIDARDAGEGLLAVQITDQEGKPKRAIVHDNKDGTYAVTYIPDKTGRYMIGVTYGGDDIPLSPYRIRATQTGDASKCLATGPGIASTVKTGEEVGFVVDAKTAGKGKVTCTVLTPDGTEAEADVIENEDGTYDIFYTAAKPGTYVIYVRFGGVDIPNSPFTVMATDGEVTAVEEAPVNACPPGFRPWVTEEAYVPVSDMNGLGFKPFDLVIPFAVRKGEITGEVHMPSGKTATPEIVDNKDGTVTVRYAPTEVGLHEMHIKYMGSHIPESPLQFYVNYPNSGSVSAYGPGLVYGVANKTATFTIVTEDAGEGGLDLAIEGPSKAEISCIDNKDGTCTVTYLPTLPGDYSILVKYNDKHIPGSPFTAKITDDSRRCSQVKLGSAADFLLDISETDLSSLTASIKAPSGRDEPCLLKRLPNNHIGISFIPREVGEHLVSIKKNGNHVANSPVSIMVVQSEIGDARRAKVYGRGLSEGRTFEMSDFIVDTRDAGYGGISLAVEGPSKVDIQTEDLEDGTCKVSYFPTVPGVYIVSTKFADEHVPEINSSDMSAHVTSPSGRVTEAEIVPMGKNSHCVRFVPQEMGVHTVSVKYRGQHVTGSPFQFTVGPLGEGGAHKVRAGGPGLERGEAGVPAEFSIWTREAGAGGLSIAVEGPSKAEITFDDHKNGSCGVSYIAQEPGNYEVSIKFNDEHIPESPYLVPVIAPSDDARRLTVMSLQESGLKVNQPASFAIRLNGAKGKIDAKVHSPSGAVEECHVSELEPDKYAVRFIPHENGVHTIDVKFNGSHVVGSPFKVRVGEPGQAGNPALVSAYGTGLEGGTTGIQSEFFINTTRAGPGTLSVTIEGPSKVKMDCQETPEGYKVMYTPMAPGNYLISVKYGGPNHIVGSPFKAKVTGQRLVSPGSANETSSILVESVTRSSTETCYSAIPKASSDASKVTSKGAGLSKAFVGQKSSFLVDCSKAGSNMLLIGVHGPTTPCEEVSMKHVGNQQYNVTYVVKERGDYVLAVKWGEEHIPGSPFHVTVP

SEQ ID NO: 5840 - protein, 91 aa, Homo sapiens
MPLIATSSQGLSKAFVGQKSSFLVDCSKASSNMLLIRVHGPTTACEKVSMKHVGNQQYNVTYVVKERGHYVLAVKWGEEHIPGSPFHVTVP

SEQ ID NO: 5841 - protein, 2602 aa, Homo sapiens
MPVTEKDLAEDAPWKKIQQNTFTRWCNEHLKCVNKRIGNLQTDLSDGLRLIALLEVLSQKRMYRKYHQRPTFRQMQLENVSVALEFLDRESIKLVSIDSKAIVDGNLKLILGLVWTLILHYSISMPVWEDEGDDDAKKQTPKQRLLGWIQNKIPYLPITNFNQNWQDGKALGALVDSCAPGLCPDWESWDPQKPVDNAREAMQQADDWLGVPQVITPEEIIHPDVDEHSVMTYLSQFPKAKLKPGAPLKPKLNPKKARAYGRGIEPTGNMVKQPAKFTVDTISAGQGDVMVFVEDPEGNKEEAQVTPDSDKNKTYSVEYLPKVTGLHKVTVLFAGQHISKSPFEVSVDKAQGDASKVTAKGPGLEAVGNIANKPTYFDIYTAGAGVGDIGVEVEDPQGKNTVELLVEDKGNQVYRCVYKPMQPGPHVVKIFFAGDTIPKSPFVVQVGEACNPNACRASGRGLQPKGVRIRETTDFKVDTKAAGSGELGVTMKGPKGLEELVKQKDFLDGVYAFEYYPSTPGRYSIAITWGGHHIPKSPFEVQVGPEAGMQKVRAWGPGLHGGIVGRSADFVVESIGSEVGSLGFAIEGPSQAKIEYNDQNDGSCDVKYWPKEPGEYAVHIMCDDEDIKDSPYMAFIHPATGGYNPDLVRAYGPGLEKSGCIVNNLAEFTVDPKDAGKAPLKIFAQDGEGQRIDIQMKNRMDGTYACSYTPVKAIKHTIAVVWGGVNIPHSPYRVNIGQGSHPQKVKVFGPGVERSGLKANEPTHFTVDCTEAGEGDVSVGIKCDARVLSEDEEDVDFDIIHNANDTFTVKYVPPAAGRYTIKVLFASQEIPASPFRVKVDPSHDASKVKAEGPGLSKAGVENGKPTHFTVYTKGAGKAPLNVQFNSPLPGDAVKDLDIIDNYDYSHTVKYTPTQQGNMQVLVTYGGDPIPKSPFTVGVAAPLDLSKIKLNGLENRVEVGKDQEFTVDTRGAGGQGKLDVTILSPSRKVVPCLVTPVTGRENSTAKFIPREEGLYAVDVTYDGHPVPGSPYTVEASLPPDPSKVKAHGPGLEGGLVGKPAEFTIDTKGAGTGGLGLTVEGPCEAKIECSDNGDGTCSVSYLPTKPGEYFVNILFEEVHIPGSPFKADIEMPFDPSKVVASGPGLEHGKVGEAGLLSVNCSEAGPGALGLEAVSDSGTKAEVSIQNNKDGTYAVTYVPLTAGMYTLTMKYGGELVPHFPARVKVEPAVDTSRIKVFGPGIEGKDVFREATTDFTVDSRPLTQVGGDHIKAHIANPSGASTECFVTDNADGTYQVEYTPFEKGLHVVEVTYDDVPIPNSPFKVAVTEGCQPSRVQAQGPGLKEAFTNKPNVFTVVTRGAGIGGLGITVEGPSESKINCRDNKDGSCSAEYIPFAPGDYDVNITYGGAHIPGSPFRVPVKDVVDPSKVKIAGPGLGSGVRARVLQSFTVDSSKAGLAPLEVRVLGPRGLVEPVNMVDNGDGTHTVTYTPSQEGPYMVSVKYADEEIPRSPFKVKVLPTYDASKVTASGPGLSSYGVPASLPVDFAIDARDAGEGLLAVQITDQEGKPKRAIVHDNKDGTYAVTYIPDKTGRYMIGVTYGGDDIPLSPYRIRATQTGDASKCLATGPGIASTVKTGEEVGFVVDAKTAGKGKVTCTVLTPDGTEAEADVIENEDGTYDIFYTAAKPGTYVIYVRFGGVDIPNSPFTVMATDGEVTAVEEAPVNACPPGFRPWVTEEAYVPVSDMNGLGFKPFDLVIPFAVRKGEITGEVHMPSGKTATPEIVDNKDGTVTVRYAPTEVGLHEMHIKYMGSHIPESPLQFYVNYPNSGSVSAYGPGLVYGVANKTATFTIVTEDAGEGGLDLAIEGPSKAEISCIDNKDGTCTVTYLPTLPGDYSILVKYNDKHIPGSPFTAKITDDSRRCSQVKLGSAADFLLDISETDLSSLTASIKAPSGRDEPCLLKRLPNNHIGISFIPREVGEHLVSIKKNGNHVANSPVSIMVVQSEIGDARRAKVYGRGLSEGRTFEMSDFIVDTRDAGYGGISLAVEGPSKVDIQTEDLEDGTCKVSYFPTVPGVYIVSTKFADEHVPGSPFTVKISGEGRVKESITRTSRAPSVATVGSICDLNLKIPEINSSDMSAHVTSPSGRVTEAEIVPMGKNSHCVRFVPQEMGVHTVSVKYRGQHVTGSPFQFTVGPLGEGGAHKVRAGGPGLERGEAGVPAEFSIWTREAGAGGLSIAVEGPSKAEITFDDHKNGSCGVSYIAQEPGNYEVSIKFNDEHIPESPYLVPVIAPSDDARRLTVMSLQESGLKVNQPASFAIRLNGAKGKIDAKVHSPSGAVEECHVSELEPDKYAVRFIPHENGVHTIDVKFNGSHVVGSPFKVRVGEPGQAGNPALVSAYGTGLEGGTTGIQSEFFINTTRAGPGTLSVTIEGPSKVKMDCQETPEGYKVMYTPMAPGNYLISVKYGGPNHIVGSPFKAKVTGQRLVSPGSANETSSILVESVTRSSTETCYSAIPKASSDASKVTSKGAGLSKAFVGQKSSFLVDCSKAGSNMLLIGVHGPTTPCEEVSMKHVGNQQYNVTYVVKERGDYVLAVKWGEEHIPGSPFHVTVP

SEQ ID NO: 5842 - protein, 194 aa, Homo sapiens
MYTPMAPGNYLISVKYGGPNHIVGSPFKAKVTGQRLVSPGSANETSSILVESVTRSSTETCYSAIPKASSDASKVTSKGAGLSKAFVGQKSSFLVDCSKAGSNMLLIGVHGPTTPCEEVSMKHVGNQQYNVTYVVKERGDYVLAVKWGNTSLAALFMSQCLKTVFSNPGESSCGCFCCLFVIHFIQSPPACLWG

SEQ ID NO: 5843 - protein, 606 aa, Homo sapiens
MLHTAISCWQPFLGLAVVLIFMGSTIGCPARCECSAQNKSVSCHRRRLIAIPEGIPIETKILDLSKNRLKSVNPEEFISYPLLEEIDLSDNIIANVEPGAFNNLFNLRSLRLKGNRLKLVPLGVFTGLSNLTKLDISENKIVILLDYMFQDLHNLKSLEVGDNDLVYISHRAFSGLLSLEQLTLEKCNLTAVPTEALSHLRSLISLHLKHLNINNMPVYAFKRLFHLKHLEIDYWPLLDMMPANSLYGLNLTSLSVTNTNLSTVPFLAFKHLVYLTHLNLSYNPISTIEAGMFSDLIRLQELHIVGAQLRTIEPHSFQGLRFLRVLNVSQNLLETLEENVFSSPRALEVLSINNNPLACDCRLLWILQRQPTLQFGGQQPMCAGPDTIRERSFKDFHSTALSFYFTCKKPKIREKKLQHLLVDEGQTVQLECSADGDPQPVISWVTPRRRFITTKSNGRATVLGDGTLEIRFAQDQDSGMYVCIASNAAGNDTFTASLTVKGFASDRFLYANRTPMYMTDSNDTISNGTNANTFSLDLKTILVSTAMGCFTFLGVVLFCFLLLFVWSRGKGKHKNSIDLEYVPRKNNGAVVEGEVAGPRRFNMKMI

SEQ ID NO: 5844 - protein, 1317 aa, Homo sapiens
MASTPKEEHCYLLHSFEEFEALARRALHEDLPSGSFIQDDMVHCSYLCDEGKDCCDRMGSCKCGTHTGHFECICEKGYYGKGLQYECTACPSGTYKPEGSPGGISSCIPCPDENHTSPPGSTSPEDCVCREGYRASGQTCELVHCPALKPPENGYFIQNTCNNHFNAACGVRCHPGFDLVGSSIILCLPNGLWSGSESYCRVRTCPHLRQPKHGHISCSTREMLYKTTCLVACDEGYRLEGSDKLTCQGNSQWDGPEPRCVERHCSTFQMPKDVIISPHNCGKQPAKFGTICYVSCRQGFILSGVKEMLRCTTSGKWNVGVQAAVCKDVEAPQINCPKDIEAKTLEQQDSANVTWQIPTAKDNSGEKVSVHVHPAFTPPYLFPIGDVAIVYTATDLSGNQASCIFHIKVIDAEPPVIDWCRSPPPVQVSEKVHAASWDEPQFSDNSGAELVITRSHTQGDLFPQGETIVQYTATDPSGNNRTCDIHIVIKGSPCEIPFTPVNGDFICTPDNTGVNCTLTCLEGYDFTEGSTDKYYCAYEDGVWKPTYTTEWPDCAKKRFANHGFKSFEMFYKAARCDDTDLMKKFSEAFETTLGKMVPSFCSDAEDIDCRLEENLTKKYCLEYNYDYENGFAIGPGGWGAANRLDYSYDDFLDTVQETATSIGNAKSSRIKRSAPLSDYKIKLIFNITASVPLPDERNDTLEWENQQRLLQTLETITNKLKRTLNKDPMYSFQLASEILIADSNSLETKKASPFCRPGSVLRGRMCVNCPLGTYYNLEHFTCESCRIGSYQDEEGQLECKLCPSGMYTEYIHSRNISDCKAQCKQGTYSYSGLETCESCPLGTYQPKFGSRSCLSCPENTSTVKRGAVNISACGVPCPEGKFSRSGLMPCHPCPRDYYQPNAGKAFCLACPFYGTTPFAGSRSITECSSFSSTFSAAEESVVPPASLGHIKKRHEISSQASFHECFFNPCHNSGTCQQLGRGYVCLCPLGYTGLKCETDIDECSPLPCLNNGVCKDLVGEFICECPSGYTGQRCEENINECSSSPCLNKGICVDGVAGYRCTCVKGFVGLHCETEVNECQSNPCLNNAVCEDQVGGFLCKCPPGFLGTRCGKNVDECLSQPCKNGATCKDGANSFRCLCAAGFTGSHCELNINECQSNPCRNQATCVDELNSYSCKCQPGFSGKRCETEQSTGFNLDFEVSGIYGYVMLDGMLPSLHALTCTFWMKSSDDMNYGTPISYAVDNGSDNTLLLTDYNGWVLYVNGREKITNCPSVNDGRWHHIAITWTSANGIWKVYIDGKLSDGGAGLSVGLPIPGMF

SEQ ID NO: 5845 - protein, 925 aa, Homo sapiens
AAPLPMNSMNPMKPALPPAPHGDGSFAYESVPWQQSATQPAGSLSVVTTVWGVGNATQSQVLGNPMGPAGSPSGSSMMPGVAGGSSALTSPQCLGQQAFAEGGANKGYVQQGVYSRGGYPGAPGFTTGYAGGPGGLGLPSHAARPSTDFTQAAAAAAVAAAAATATATATATVAALQEKQSQELSQYGAMGAGQSFNSQFLQHGGPRGPSVPAGMNPTGIGGVMGPSGLSPLAMNPTRAAGMTPLYAGQRLPQHGYPGPPQAQPLPRQGVKRTYSEVYPGQQYLQGGQYAPSTAQFAPSPGQPPAPSPSYPGHRLPLQQGMTQSLSVPGPTGLHYKPTEQFNGQGASFNGGSVSYSQPGLSGPTRSIPGYPSSPLPGNPTPPMTPSSSVPYMSPNQEVKSPFLPDLKPNLNSFHSSPSGSGPCDELRLTFPVRDGVVLEPFRLQHNLAVSNHVFQLRDSVYKTLIMRPDLELQFKCYHHEDRQMNTNWPASVQVSVNATPLTIERGDNKTSHKPLYLKHVCQPGRNTIQITVTACCCSHLFVLQLVHRPSVRSVLQGLLKKRLLPAEHCITKIKRNFSSGTIPGTPGPNGEDGVEQTAIKVSLKCPITFRRIQLPARGHDCRHIQCFDLESYLQLNCERGTWRCPVCNKTALLEGLEVDQYMLGILIYIQNSDYEEITIDPTCSWKPVPVKPDMHIKEEPDGPALKRCRTVSPAHVLMPSVMEMIAALGPGAAPFAPLQPPSVPAPSDYPGQGSSFLGPGTFPESFPPTTPSTPTLAEFTPGPPPISYQSDIPSSLLTSEKSTACLPSQMAPAGHLDPTHNPGTPGLHTSNLGAPPGPQLHHSNPPPASRQSLGQASLGPTGELAFSPATGVMGPPSMSGAGEAPEPALDLLPELTNPDELLSYLGPPDLPTNNNDDLLSLFENN

SEQ ID NO: 5846 - protein, 655 aa, Homo sapiens
LYAGQRLPQHGYPGPPQAQPLPRQGVKRTYSEVYPGQQYLQGGQYAPSTAQFAPSPGQPPAPSPSYPGHRLPLQQGMTQSLSVPGPTGLHYKPTRSIPGYPSSPLPGNPTPPMTPSSSVPYMSPNQEVKSPFLPDLKPNLNSLHSSPSGSGPCDELRLTFPVRDGVVLEPFRLQHNLAVSNHVFQLRDSVYKTLIMRPDLELQFKCYHHEDRQMNTNWPASVQVSVNATPLTIERGDNKTSHKPLYLKHVCQPGRNTIQITVTACCCSHLFVLQLVHRPSVRSVLQGLLKKRLLPAEHCITKIKRNFSSGTIPGTPGPNGEDGVEQTAIKVSLKCPITFRRIQLPARGHDCRHIQCFDLESYLQLNCERGTWRCPVCNKTALLEGLEVDQYMLGILIYIQNSDYEEITIDPTCSWKPVPVKPDMHIKEEPDGPALKRCRTVSPAHVLMPSVMEMIAALGPGAAPFAPLQPPSVPAPSDYPGQGSSFLGPGTFPESFPPTMPSTPTLAEFTPGPPPISYQSDIPSSLLTSEKSTACLPSQMAPAGHLDPTHNPGTPGLHTSNLGAPPGPQLHHSNPPPASRQSLGQASLGPTGELAFSPATGVMGPPSMSGAGEAPEPALDLLPELTNPDELLSYLGPPDLPTNNNDDLLSLFENN

SEQ ID NO: 5847 - protein, 546 aa, Homo sapiens
MRPRTEGFFPPAGASLPFSTRNKQPAVPAAAARAAEHAPGAGPGRDSGAGTAPPALRRRASPCGLLPPFLPPGSAGGGGGGARRGPPSAAPPPRAGAGGAGPASASRGGSSAARRRGQRAPHSNLPRKDSLRPTMHRGGQPLKKRRGSSKMAELDQLPDESSSAKALVSLKEGSLSNTWNEKYSSLQKTPVWKGRNTSSAVEMPFRNSKRSRLFSDEDDRQINTRSPKRNQRVAMVPQKFTATMSTPDKKASQKIGFRLRNLLKLPKAHKWCIYEWFYSNIDKPLFEGDNDFCVCLKESFPNLKTRKLTRVEWGKIRRLMGKPRRCSSAFFEEERSALKQKRQKIRLLQQRKVADVSQFKDLPDEIPLPLVIGTKVTARLRGVHDGLFTGQIDAVDTLNATYRVTFDRTGLGTHTIPDYEVLSNEPHETMPIAALGQKQRPSRFFMTPPRLHYTPPLQSPIIDNDPLLGQSPWRSKISGSDTETLGGFPVEFLIQVTRLSKILMIHQGTYQEHQGHEHRSRNTGNHIACQSALDSRGDLRQSVSGT

SEQ ID NO: 5848 - protein, 692 aa, Homo sapiens [sequence omitted]

SEQ ID NO: 5849 - protein, 198 aa, Homo sapiens
MPSSTLPGWPGSSGGPVSRPSSLESSRNTSSNSSPLNLKGSSEQLHGRSESFSSEDLIPSRDLATLPREASTPGRNALGRHEYPLPRNGPLPQEGAQKRGTAPPYVGVRPCSASPSSEMVTLEEFLEESNRSSPTHDTPSCRDDLLSDYFRKASDPPAIGGQPGPPAKKEGAKMPTNFVAPTVKMAAPTSEGRPLKPG

SEQ ID NO: 5850 - protein, 731 aa, Homo sapiens
MSLFLSNLSTNDSSLWKENHNSTDLLNPPGTLNIYLFCLTCLMTFAALVGSIYSLISLLKMQNRTVVSMLVASWSVDDLMSVLSVTIFMFLQWPNEVPGYFQFLCTTSALMYLCQGLSSNLKATLLVSYNFYTMHRGVGSQTASRRSGQVLGVVLTVWAASLLLSALPLCGWGAFVRTPWGCLVDCSSSYVLFLSIVYALAFGLLVGLSVPLTHRLLCSEEPPRLHSNYQEISRGASIPGTPPTAGRVVSLSPEDAPGPSLRRSGGCSPSSDTVFGPGAPAAAGAEACRRENRGTLYGTRSFTVSVAQKRFALILALTKVVLWLPMMMHMVVQNVVGFQSLPLETFSFLLTLLATTVTPVFVLSKRWTHLPCGCIINCRQNAYAVASDGKKIKRKGFEFNLSFQKSYGIYKIAHEDYYDDDENSIFYHNLMNSECETTKDPQRDNRNIFNAIKVEISTTPSLDSSTQRGINKCTNTDITEAKQDSNNKKDAFSDKTGGDINYEETTFSEGPERRLSHEESQKPDLSDWEWCRSKSERTPRQRSGYALAIPLCAFQGTVSLHAPTGKTLSLSTYEVSAEGQKITPASKKIEVYRSKSVGHEPNSEDSSSTFVDTSVKIHLEVLEICDNEEALDTVSIISNISQSSTQVRSPSLRYSRKENRFVSCDLGETASYSLFLPTSNPDGDINISIPDTVEAHRQNSKRQHQERDGYQEEIQLLNKAYRKREEESKGS

SEQ ID NO: 5851 - protein, 491 aa, Homo sapiens [sequence omitted]

SEQ ID NO: 5852 - protein, 819 aa, Homo sapiens
MLPFLLATLGTTALNNSNPKDYCYSARIRSTVLQGLPFGGVPTVLALDFMCFLALLFLFSILRKVAWDYGRLALVTDADSVASAMHGDSHDRYERLTSVSSSVDFDQRDNGFCSWLTAIFRIKDDEIRDKCGGDAVHYLSFQRHIIGLLVVVGVLSVGIVLPVNFSGDLLENNAYSFGRTTIANLKSGNNLLWLHTSFAFLYLLLTVYSMRRHTSKMRYKEDDLVKRTLFINGISKYAESEKIKKHFEEAYPNCTVLEARPCYNVARLMFLDAERKKAERGKLYFTNLQSKENVPTMINPKPCGHLCCCVVRGCEQVEAIEYYTKLEQKLKEDYKREKEKVNEKPLGMAFVTFHNETITAIILKDFNVCKCQGCTCRGEPRPSSCSESLHISNWTVSYAPDPQNIYWEHLSIRGFIWWLRCLVINVVLFILLFFLTTPAIIITTMDKFNVTKPVEYLNNPIITQFFPTLLLWCFSALLPTIVYYSAFFEAHWTRSGENRTTMHKCYTFLIFMVLLLPSLGLSSLDLFFRWLFDKKFLAEAAIRFECVFLPDNGAFFVNYVIASAFIGNAMDLLRIPGLLMYMIRLCLARSAAERRNVKRHQAYEFQFGAAYAWMMCVFTVVMTYSITCPIIVPFGLMYMLLKHLVDRYNLYYAYLPAKLDKKIHSGAVNQVVAAPILCLFWLLFFSTMRTGFLAPTSMFTFVVLVITIVICLCHVCFGHFKYLSAHNYKIEHTETDTVDPRSNGRPPTAAAVPKSAKYIAQVLQDSEVDGDGDGAPGSSGDEPPSSSSQDEELLMPPDALTDTDFQSCEDSLIENEIHQ

SEQ ID NO: 5853 - protein, 151 aa, Homo sapiens
  VARIANT 12, 77, 78, 79, 80, 81, 132, 145, 146, 147: Xaa = Any Amino Acid
EDSQPMCYSNCXDGQSTAKTFLTVYWTPERVELAPLPSWQPVGKNLTLRCQVEGGAPRANLTVVLLRGEKELKREPXXXXXAEVTTTVLVRRDHHGANFSCRTELDLRPQGLELFENTSAPYQLQTFVLPAXPPQLVSPRVLEVXXXGTVV

SEQ ID NO: 5854 - protein, 1007 aa, Homo sapiens
MGAAGLLGVFLALVAPGVLGISCGSPPPILNGRISYYSTPIAVGTVIRYSCSGTFRLIGEKSLLCITKDKVDGTWDKPAPKCEYFNKYSSCPEPIVPGGYKIRGSTPYRHGDSVTFACKTNFSMNGNKSVWCQANNMWGPTRLPTCVSVFPLECPALPMIHNGHHTSENVGSIAPGLSVTYSCESGYLLVGEKIINCLSSGKWSAVPPTCEEARCKSLGRFPNGKVKEPPILRVGVTANFFCDEGYRLQGPPSSRCVIAGQGVAWTKMPVCEEIFCPSPPPILNGRHIGNSLANVSYGSIVTYTCDPDPEEGVNFILIGESTLRCTVDSQKTGTWSGPAPRCELSTSAVQCPHPQILRGRMVSGQKDRYTYNDTVIFACMFGFTLKGSKQIRCNAQGTWEPSAPVCEKECQAPPNILNGQKEDRHMVRFDPGTSIKYSCNPGYVLVGEESIQCTSEGVWTPPVPQCKVAACEATGRQLLTKPQHQFVRPDVNSSCGEGNHLPTTPCYLQWGTHREFLRRFSIWNHGHLHMNPGPERGVEFSLIGESTIRCTSNDQERGTWSGPAPLCKLSLLAVQCSHVHIANGYKISGKEAPYFYNDTVTFKCYSGFTLKGSSQIRCKADNTWDPEIPVCEKETCQHVRQSLQELPAGSRVELVNTSCQDGYQLTGHAYQMCQDAENGIWFKKIPLCKVIHCHPPPVIVNGKHTGMMAENFLYGNEVSYECDQGFYLLGEKKLQCRSDSKGHGSWSGPSPQCLRSPPVTRCPNPEVKHGYKLNKTHSAYSHNDIVYVDCNPGFIMNGSRVIRCHTDNTWVPGVPTCIKKAFIGCPPPPKTPNGNHTGGNIARFSPGMSILYSCDQGYLLVGEALLLCTHEGTWSQPAPHCKEVNCSSPADMDGIQKGLEPRKMYQYGAVVTLECEDGYMLEGSPQSQCQSDHQWNPPLAVCRSRSLAPVLCGIAAGLILLTFLIVITLYVISKHRERNYYTDTSQKEAFHLEAREVYSVDPYNPAS

SEQ ID NO: 5855 - protein, 1033 aa, Homo sapiens [sequence omitted]

SEQ ID NO: 5856 - protein, 1092 aa, Homo sapiens
MGAAGLLGVFLALVAPGVLGISCGSPPPILNGRISYYSTPIAVGTVIRYSCSGTFRLIGEKSLLCITKDKVDGTWDKPAPKCEYFNKYSSCPEPIVPGGYKIRGSTPYRHGDSVTFACKTNFSMNGNKSVWCQANNMWGPTRLPTCVSVFPLECPALPMIHNGHHTSENVGSIAPGLSVTYSCESGYLLVGEKIINCLSSGKWSAVPPTCEEARCKSLGRFPNGKVKEPPILRVGVTANFFCDEGYRLQGPPSSRCVIAGQGVAWTKMPVCEEIFCPSPPPILNGRHIGNSLANVSYGSIVTYTCDPDPEEGVNFILIGESTLRCTVDSQKTGTWSGPAPRCELSTSAVQCPHPQILRGRMVSGQKDRYTYNDTVIFACMFGFTLKGSKQIRCNAQGTWEPSAPVCEKECQAPPNILNGQKEDRHMVRFDPGTSIKYSCNPGYVLVGEESIQCTSEGVWTPPVPQCKVAACEATGRQLLTKPQHQFVRPDVNSSCGEGYKLSGSVYQECQGTIPWFMEIRLCKEITCPPPPVIYNGAHTGSSLEDFPYGTTVTYTCNPGPERGVEFSLIGESTIRCTSNDQERGTWSGPAPLCKLSLLAVQCSHVHIANGYKISGKEAPYFYNDTVTFKCYSGFTLKGSSQIRCKADNTWDPEIPVCEKGCQPPPGLHHGRHTGGNTVFFVSGMTVDYTCDPGYLLVGNKSIHCMPSGNWSPSAPRCEETCQHVRQSLQELPAGSRVELVNTSCQDGYQLTGHAYQMCQDAENGIWFKKIPLCKVIHCHPPPVIVNGKHTGMMAENFLYGNEVSYECDQGFYLLGEKKLQCRSDSKGHGSWSGPSPQCLRSPPVTRCPNPEVKHGYKLNKTHSAYSHNDIVYVDCNPGFIMNGSRVIRCHTDNTWVPGVPTCIKKAFIGCPPPPKTPNGNHTGGNIARFSPGMSILYSCDQGYLLVGEALLLCTHEGTWSQPAPHCKEVNCSSPADMDGIQKGLEPRKMYQYGAVVTLECEDGYMLEGSPQSQCQSDHQWNPPLAVCRSRSLAPVLCGIAAGLILLTFLIVITLYVISKHRERNYYTDTSQKEAFHLEAREVYSVDPYNPAS

SEQ ID NO: 5857 - protein, 1084 aa, Homo sapiens
MGAAGLLGVFLALVAPGVLGISCGSPPPILNGRISYYSTPIAVGTVIRYSCSGTFRLIGEKSLLCITKDKVDGTWDKPAPKCEYFNKYSSCPEPIVPGGYKIRGSTPYRHGDSVTFACKTNFSMNGNKSVWCQANNMWGPTRLPTCVSVFPLECPALPMIHNGHHTSENVGSIAPGLSVTYSCESGYLLVGEKIINCLSSGKWSAVPPTCEEARCKSLGRFPNGKVKEPPILRVGVTANFFCDEGYRLQGPPSSRCVIAGQGVAWTKMPVCEEIFCPSPPPILNGRHIGNSLANVSYGSIVTYTCDPDPEEGVNFILIGESTLRCTVDSQKTGTWSGPAPRCELSTSAVQCPHPQILRGRMVSGQKDRYTYNDTVIFACMFGFTLKGSKQIRCNAQGTWEPSAPVCEKECQAPPNILNGQKEDRHMVRFDPGTSIKYSCNPGYVLVGEESIQCTSEGVWTPPVPQCKVAACEATGRQLLTKPQHQFVRPDVNSSCGEGYKLSGSVYQECQGTIPWFMEIRLCKEITCPPPPVIYNGAHTGSSLEDFPYGTTVTYTCNPGPERGVEFSLIGESTIRCTSNDQERGTWSGPAPLCKLSLLAVQCSHVHIANGYKISGKEAPYFYNDTVTFKCYSGFTLKGSSQIRCKADNTWDPEIPVCEKGCQPPPGLHHGRHTGGNTVFFVSGMTVDYTCDPGYLLVGNKSIHCMPSGNWSPSAPRCEETCQHVRQSLQELPAGSRVELVNTSCQDGYQLTGHAYQMCQDAENGIWFKKIPLCKVIVNGKHTGMMAENFLYGNEVSYECDQGFYLLGEKKLQCRSDSKGHGSWSGPSPQCLRSPPVTRCPNPEVKHGYKLNKTHSAYSHNDIVYVDCNPGFIMNGSRVIRCHTDNTWVPGVPTCIKKAFIGCPPPPKTPNGNHTGGNIARFSPGMSILYSCDQGYLLVGEALLLCTHEGTWSQPAPHCKEVNCSSPADMDGIQKGLEPRKMYQYGAVVTLECEDGYMLEGSPQSQCQSDHQWNPPLAVCRSRSLAPVLCGIAAGLILLTFLIVITLYVISKHRERNYYTDTSQKEAFHLEAREVYSVDPYNPAS

SEQ ID NO: 5858 - protein, 331 aa, Homo sapiens
MSSTPHDPFYSSPFGPFYRRHTPYMVQPEYRIYEMNKRLQSRTEDSDNLWWDAFATEFFEDDATLTLSFCLEDGPKRYTIGRTLIPRYFSTVFEGGVTDLYYILKHSKESYHNSSITVDCDQCTMVTQHGKPMFTKVCTEGRLILEFTFDDLMRIKTWHFTIRQYRELVPRSILAMHAQDPQVLDQLSKNITRMGLTNFTLNYLRLCVILEPMQELMSRHKTYNLSPRDCLKTCLFQKWQRMVAPPAEPTRQPTTKRRKRKNSTSSTSNSSAGNNANSTGSKKKTTAANLSLSSQVPGLGAIPNCSLNPGRDGDLCHSTAVTPSGQFKEKH

SEQ ID NO: 5859 - protein, 373 aa, Homo sapiens
MSSTPHDPFYSSPFGPFYRRHTPYMVQPEYRIYEMNKRLQSRTEDSDNLWWDAFATEFFEDDATLTLSFCLEDGPKRYTIGRTLIPRYFSTVFEGGVTDLYYILKHSKESYHNSSITVDCDQCTMVTQHGKPMFTKVCTEGRLILEFTFDDLMRIKTWHFTIRQYRELVPRSILAMHAQDPQVLDQLSKNITRMGLTNFTLNYLRLCVILEPMQELMSRHKTYNLSPRDCLKTCLFQKWQRMVAPPAEPTRQPTTKRRKRKNSTSSTSNSSAGNNANSTGSKKKTTAANLSLSSQVPDVMVVGEPTLMGGEFGDEDERLITRLENTQYDAANGMDDEEDFNNSPALGNNSPWNSKPPATQETKSENPPPQASQ

SEQ ID NO: 5860 - protein, 492 aa, Homo sapiens
MATGGGTRSMTSVYGHLLGLQKLNLLDCASYITGLSGATWTMATLYRDPDWSSKNLEPAIFEARRHVVKDKLPSLFPDQLRKFQEELRQRSQEGYRVTFTDFWGLLIETCLGDERNECKLSDQRAPLSCGQNPLPIYLTINVKDDVSNQDFREWFEFSPYEVGLQKYGAFIPSELFGSEFFMGRLVKRIPESRICYMLGLWSSIFSLNLLDAWNLSHTSEEFFHRWTREKVQDIEDEPILPEIPKCDANILETTVVIPGSWLSNSFREILTHRSFVSEFHNFLSGLQLHTNYLQNGQFSRWKDTVLDGFPNQLAESANHLCLLDTAFFVNSSYPPLLRPERKADLIIHLNYCAGSQTKPLKQTCEYCTVQNIPFPKYELPDENENLKEYYLMENPQEPDAPIVTFFPLINDTFRKYKAPGVERSPEELEQGQVDIYGPKTPYATKELTYTEATFDKLVKLSEYNILNNKDTLLQALRLAVEKKKRLKGQCPS

SEQ ID NO: 5861 - protein, 147 aa, Homo sapiens
CTFDNLSPGLEYNVSVYTVKDDKESVPISDTIIPEVPQLTDLSFVDITDSSIGLRWTPLNSSTIIGYRITVVAAGEGIPIFEDFVDSSVGYYTVTGLEPGIDYDISVITLINGGESAPTTLTQQTAVPPPTDLRFTNIGPDTMRVTW

SEQ ID NO: 5862 - protein, 1237 aa, Homo sapiens
MQKSVRYNEGHALYLAFLARKEGTKRGFLSKKTAEASRWHEKWFALYQNVLFYFEGEQSCRPAGMYLLEGCSCERTPAPPRAGAGQGGVRDALDKQYYFTVLFGHEGQKPLELRCEEEQDGKEWMEAIHQASYADILIEREVLMQKYIHLVQIVETEKIAANQLRHQLEDQDTEIERLKSEIIALNKTKERMRPYQSNQEDEDPDIKKIKKVQSFMRGWLCRRKWKTIVQDYICSPHAESMRKRNQIVFTMVEAESEYVHQLYILVNGFLRPLRMAASSKKPPISHDDVSSIFLNSETIMFLHEIFHQGLKARIANWPTLILADLFDILLPMLNIYQEFVRNHQYSLQVLANCKQNRDFDKLLKQYEANPACEGRMLETFLTYPMFQIPRYIITLHELLAHTPHEHVERKSLEFAKSKLEELSRVMHDEVSDTENIRKNLAIERMIVEGCDILLDTSQTFIRQGSLIQVPSVERGKLSKVRLGSLSLKKEGERQCFLFTKHFLICTRSSGGKLHLLKTGGVLSLIDCTLIEEPDASDDDSKGSGQVFGHLDFKIVVEPPDRAAFTVVLLAPSRQEKAAWMSDISQCVDNIRCNGLMTIVFEENSKVTVPHMIKSDARLHKDDTDICFSKTLNSCKVPQIRYASVERLLERLTDLRFLSIDFLNTFLHTYRIFTTAAVVLGKLSDIYKRPFTSIPVRSLELFFATSQNNRGEHLVDGKSPRLCRKFSSPPPLAVSRTSSPVRARKLSLTSPLNSKIGALDLTTSSSPTTTTQSPAASPPPHTGQIPLDLSRGLSSPEQSPGTVEENVDNPRVDLCNKLKRSIQKAVLESAPADRAGVESSPAADTTELSPCRSPSTPRHLRYRQPGGQTADNAHCSVSPASAFAIATAAAGHGSPPGFNNTERTCDKEFIIRRTATNRVLNVLRHWVSKHAQDFELNNELKMNVLNLLEEVLRDPDLLPQERKAAANILRALSQDDQDDIHLKLEDIIQMTDCMKAECFESLSAMELAEQITLLDHVIFRSIPYEEFLGQGWMKLDKNERTPYIMKTSQHFNDMSNLVASQIMNYADVSSRANAIEKWVAVADICRCLHNYNGVLEITSALNRSAIYRLKKTWAKVSKQTKALMDKLQKTVSSEGRFKNLRETLKNCNPPAVPYLGMYLTDLAFIEEGTPNFTEEGLVNFSKMRMISHIIREIRQFQQTSYRIDHQPKVAQYLLDKDLIIDEDTLYELSLKIEPRLPA

SEQ ID NO: 5863 - protein, 1237 aa, Homo sapiens
MQKSVRYNEGHALYLAFLARKEGTKRGFLSKKTAEASRWHEKWFALYQNVLFYFEGEQSCRPAGMYLLEGCSCERTPAPPRAGAGQGGVRDALDKQYYFTVLFGHEGQKPLELRCEEEQDGKEWMEAIHQASYADILIEREVLMQKYIHLVQIVETEKIAANQLRHQLEDQDTEIERLKSEIIALNKTKERMRPYQSNQEDEDPDIKKIKKVQSFMRGWLCRRKWKTIVQDYICSPHAESMRKRNQIVFTMVEAESEYVHQLYILVNGFLRPLRMAASSKKPPISHDDVSSIFLNSETIMFLHEIFHQGLKARIANWPTLILADLFDILLPMLNIYQEFVRNHQYSLQVLANCKQNRDFDKLLKQYEANPACEGRMLETFLTYPMFQIPRYIITLHELLAHTPHEHVERKSLEFAKSKLEELSRVMHDEVSDTENIRKNLAIERMIVEGCDILLDTSQTFIRQGSLIQVPSVERGKLSKVRLGSLSLKKEGERQCFLFTKHFLICTRSSGGKLHLLKTGGVLSLIDCTLIEEPDASDDDSKGSGQVFGHLDFKIVVEPPDAAAFTVVLLAPSRQEKAAWMSDISQCVDNIRCNGLMTIVFEENSKVTVPHMIKSDARLHKDDTDICFSKTLNSCKVPQIRYASVERLLERLTDLRFLSIDFLNTFLHTYRIFTTAAVVLGKLSDIYKRPFTSIPVRSLELFFATSQNNRGEHLVDGKSPRLCRKFSSPPPLAVSRTSSPVRARKLSLTSPLNSKIGALDLTTSSSPTTTTQSPAASPPPHTGQIPLDLSRGLSSPEQSPGTVEENVDNPRVDLCNKLKRSIQKAVLESAPADRAGVESSPAADTTELSPCRSPSTPRHLRYRQPGGQTADNAHCSVSPASAFAIATAAAGHGSPPGFNNTERTCDKEFIIRRTATNRVLNVLRHWVSKHAQDFELNNELKMNVLNLLEEVLRDPDLLPQERKAAANILRALSQDDQDDIHLKLEDIIQMTDCMKAECFESLSAMELAEQITLLDHVIFRSIPYEEFLGQGWMKLDKNERTPYIMKTSQHFNDMSNLVASQIMNYADVSSRANAIEKWVAVADICRCLHNYNGVLEITSALNRSAIYRLKKTWAKVSKQTKALMDKLQKTVSSEGRFKNLRETLKNCNPPAVPYLGMYLTDLAFIEEGTPNFTEEGLVNFSKMRMISHIIREIRQFQQTSYRIDHQPKVAQYLLDKDLIIDEDTLYELSLKIEPRLPA

SEQ ID NO: 5864 - protein, 713 aa, Homo sapiens
MQPRTPLVLCVLLSQVLLLTSAEDLDCTPGFQQKVFHINQPAEFIEDQSILNLTFSDCKGNDKLRYEVSSPYFKVNSDGGLVALRNITAVGKTLFVHARTPHAEDMAELVIVGGKDIQGSLQDIFKFARTSPVPRQKRSIVVSPILIPENQRQPFPRDVGKVVDSDRPERSKFRLTGKGVDQEPKGIFRINENTGSVSVTRTLDREVIAVYQLFVETTDVNGKTLEGPVPLEVIVIDQNDNRPIFREGPYIGHVMEGSPTGTTVMRMTAFDADDPATDNALLRYNIRQQTPDKPSPNMFYIDPEKGDIVTVVSPALLDRETLENPKYELIIEAQDMAGLDVGLTGTATATIMIDDKNDHSPKFTKKEFQATVEEGAVGVIVNLTVEDKDDPTTGAWRAAYTIINGNPGQSFEIHTNPQTNEGMLSVVKPLDYEISAFHTLLIKVENEDPLVPDVSYGPSSTATVHITVLDVNEGPVFYPDPMMVTRQEDLSVGSVLLTVNATDPDSLQHQTIRYSVYKDPAGWLNINPINGTVDTTAVLDRESPFVDNSVYTALFLAIDSGNPPATGTGTLLITLEDVNDNAPFIYPTVAEVCDDAKNLSVVILGASDKDLHPNTDPFKFEIHKQAVPDKVWKISKINNTHALVSLLQNLNKANYNLPIMVTDSGKPPMTNITDLRVQVCSCRNSKVDCNAAGALRFSLPSVLLLSLFSLACL

SEQ ID NO: 5865 - protein, 1278 aa, Homo sapiens
MTLTERLREKISRAFYNHGLLCASYPIPIILFTGFCILACCYPLLKLPLPGTGPVEFTTPVKDYSPPPVDSDRKQGEPTEQPEWYVGAPVAYVQQIFVKSSVFPWHKNLLAVDVFRSPLSRAFQLVEEIRNHVLRDSSGIRSLEELCLQVTDLLPGLRKLRNLLPEHGCLLLSPGNFWQNDWERFHADPDIIGTIHQHEPKTLQTSATLKDLLFGVPGKYSGVSLYTRKRMVSYTITLVFQHYHAKFLGSLRARLMLLHPSPNCSLRAESLVHVHFKEEIGVAELIPLVTTYIILFAYIYFSTRKIDMVKSKWGLALAAVVTVLSSLLMSVGLCTLFGLTPTLNGGEIFPYLVVVIGLENVLVLTKSVVSTPVDLEVKLRIAQGLSSESWSIMKNMATELGIILIGYFTLVPAIQEFCLFAVVGLVSDFFLQMLFFTTVLSIDIRRMELADLNKRLPPEACLPSAKPVGQPTRYERQLAVRPSTPHTITLQPSSFRNLRLPKRLRVVYFLARTRLAQRLIMAGTVVWIGILVYTDPAGLRNYLAAQVTEQSPLGEGALAPMPVPSGMLPPSHPDPAFSIFPPDAPKLPENQTSPGESPERGGPAEVVHDSPVPEVTWGPEDEELWRKLSFRHWPTLFSYYNITLAKRYISLLPVIPVTLRLNPREALEGRHPQDGRSAWPPPGPIPAGHWEAGPKGPGGVQAHGDVTLYKVAALGLATGIVLVLLLLCLYRVLCPRNYGQLGGGPGRRRRGELPCDDYGYAPPETEIVPLVLRGHLMDIECLASDGMLLVSCCLAGHVCVWDAQTGDCLTRIPRPGQRRDSGVGSGLEAQESWERLSDGGKAGPEEPGDSPPLRHRPRGPPPPSLFGDQPDLTCLIDTNFSAQPRSSQPTQPEPRHRAVCGRSRDSPGYDFSCLVQRVYQEEGLAAVCTPALRPPSPGPVLSQAPEDEGGSPEKGSPSLAWAPSAEGSIWSLELQGNLIVVGRSSGRLEVWDAIEGVLCCSSEEVSSGITALVFLDKRIVAARLNGSLDFFSLETHTALSPLQFRGTPGRGSSPASPVYSSSDTVACHLTHTVPCAHQKPITALKAAAGRLVTGSQDHTLRVFRLEDSCCLFTLQGHSGAITTVYIDQTMVLASGGQDGAICLWDVLTGSRVSHVFAHRGDVTSLTCTTSCVISSGLDDLISIWDRSTGIKFYSIQQDLGCGASLGVISDNLLVTGGQGCVSFWDLNYGDLLQTVYLGKNSEAQPARQILVLDNAAIVCNFGSELSLVYVPSVLEKLD

SEQ ID NO: 5866 - protein, 905 aa, Homo sapiens
MTLTERLREKISRAFYNHGLLCASYPIPIILIGYFTLVPAIQEFCLFAVVGLVSDFFLQMLFFTTVLSIDIRRMELADLNKRLPPEACLPSAKPVGQPTRYERQLAVRPSTPHTITLQPSSFRNLRLPKRLRVVYFLARTRLAQRLIMAGTVVWIGILVYTDPAGLRNYLAAQVTEQSPLGEGALAPMPVPSGMLPPSHPDPAFSIFPPDAPKLPENQTSPGESPERGGPAEVVHDSPVPEVTWGPEDEELWRKLSFRHWPTLFSYYNITLAKRYISLLPVIPVTLRLNPREALEGRHPQDGRSAWPPPGPIPAGHWEAGPKGPGGVQAHGDVTLYKVAALGLATGIVLVLLLLCLYRVLCPRNYGQLGGGPGRRRRGELPCDDYGYAPPETEIVPLVLRGHLMDIECLASDGMLLVSCCLAGHVCVWDAQTGDCLTRIPRPGQRRDSGVGSGLEAQESWERLSDGGKAGPEEPGDSPPLRHRPRGPPPPSLFGDQPDLTCLIDTNFSAQPRSSQPTQPEPRHRAVCGRSRDSPGYDFSCLVQRVYQEEGLAAVCTPALRPPSPGPVLSQAPEDEGGSPEKGSPSLAWAPSAEGSIWSLELQGNLIVVGRSSGRLEVWDAIEGVLCCSSEEVSSGITALVFLDKRIVAARLNGSLDFFSLETHTALSPLQFRGTPGRGSSPASPVYSSSDTVACHLTHTVPCAHQKPITALKAAAGRLVTGSQDHTLRVFRLEDSCCLFTLQGHSGAITTVYIDQTMVLASGGQDGAICLWDVLTGSRVSHVFAHRGDVTSLTCTTSCVISSGLDDLISIWDRSTGIKFYSIQQDLGCGASLGVISDNLLVTGGQGCVSFWDLNYGDLLQTVYLGKNSEAQPARQILVLDNAAIVCNFGSELSLVYVPSVLEKLD

SEQ ID NO: 5867 - protein, 886 aa, Homo sapiens
MKNMATELGIILIGYFTLVPAIQEFCLFAVVGLVSDFFLQMLFFTTVLSIDIRRMELADLNKRLPPEACLPSAKPVGQPTRYERQLAVRPSTPHTITLQPSSFRNLRLPKRLRVVYFLARTRLAQRLIMAGTVVWIGILVYTDPAGLRNYLAAQVTEQSPLGEGALAPMPVPSGMLPPSHPDPAFSIFPPDAPKLPENQTSPGESPERGGPAEVVHDSPVPEVTRGPEDEELWRKLSFRHWPTLFSYYNITLAKRYISLLPVIPVTLRLNPREALEGRHPQDGRSAWPPPGPIPAGHWEAGPKGPGGVQAHGDVTLYKVAALGLATGIVLVLLLLCLYRVLCPRNYGQLGGGPGRRRRGEQPCDDYGYAPPETEIVPLVLRGHLMDIECLASDGMLLVSCCLAGHICVWDAQTGDCLTRIPRPGQRRDSGVGSGLEAQESWERLSDGGKAGPEEPGDSPPLRHRPRGPPPPSLFGDQPDLTCLIDTNFSAQPRSSQPTQPEPRHRAVCGRSRDSPGYDFSCLVQRVYQEEGLAAVCTPALRPPSPGPALSQAPEDEGGSPEKGSPSLAWAPSAEGSIWSLELQGNLIVVGRSSGRLEVWDAIEGVLCCSSEEVSSGITALVFLDKRIVAARLNGSLDFFSLGTHTALSPLQFRGTPGRGSSPASPVYSSSDTVACHLTHTVPCAHQEPITALKAAAGRLVTGSQDHTLRVFRLEDSCCLFTLQGHSGAITTVYIDQTMVLASGGQDGAICLWDVLTGSRVSHVFAHRGDVTSLTCTTSCVISSGLDDLISIWDRSTGIKFYSIQQDLGCGASLGVISDNLLVTGGQGCVSFWDLNYGDLLQTVYLGKNSEAQPARQILVLDNAAIVCNFGSELSLVYVPSVLEKLD

SEQ ID NO: 5868 - protein, 771 aa, Homo sapiens
MTLTERLREKISRAFYNHGLLCASYPIPIILFTGFCILACCYPLLKLPLPGTGPVEFTTPVKDYSPPPVDSDRKQGEPTEQPEWYVGAPVAYVQQIFVKSSVFPWHKNLLAVDVFRSPLSRAFQLVEEIRNHVLRDSSGIRSLEELCLQVTDLLPGLRKLRNLLPEHGCLLLSPGNFWQNDWERFHADPDIIGTIHQHEPKTLQTSATLKDLLFGVPGKYSGVSLYTRKRMVSYTITLVFQHYHAKFLGSLRARLMLLHPSPNCSLRAESLVHVHFKEEIGVAELIPLVTTYIILFAYIYFSTRKIDMVKSKWGLALAAVVTVLSSLLMSVGLCTLFGLTPTLNGGEIFPYLVVVIGLENVLVLTKSVVSTPVDLEVKLRIAQGLSSESWSIMKNMATELGIILIGYFTLVPAIQEFCLFAVVGLVSDFFLQMLFFTTVLSIDIRRMELADLNKRLPPEACLPSAKPVGQPTRYERSSGRLEVWDAIEGVLCCSSEEVSSGITALVFLDKRIVAARLNGSLDFFSLETHTALSPLQFRGTPGRGSSPASPVYSSSDTVACHLTHTVPCAHQKPITALKAAAGRLVTGSQDHTLRVFRLEDSCCLFTLQGHSGAITTVYIDQTMVLASGGQDGAICLWDVLTGSRVSHVFAHRGDVTSLTCTTSCVISSGLDDLISIWDRSTGIKFYSIQQDLGCGASLGVISDNLLVTGGQGCVSFWDLNYGDLLQTVYLGKNSEAQPARQILVLDNAAIVCNFGSELSLVYVPSVLEKLD

SEQ ID NO: 5869 - protein, 152 aa, Homo sapiens
MEELDRQKIGGFWREVGVASDQSLVLTAPKRVEGLFLTLSGSNLTVKVAYNSSGSCEIEKIVGSEIDSTGKFAFPGHREIHVLDTDYEGYAILRVSLMWRGRNFRVLKYFTRSLEDKDRLGFWKFRELTADTGLYLAARPGRCAELLKEELI

SEQ ID NO: 5870 - protein, 126 aa, Homo sapiens
MEELDRQKIGGFWREVGVASDQSLVLTAPKRVEGLFLTLSGSNLTVKVAYNSSGSCEIEKIVGSEIDSTGKFAFPGKCSCPVMAGGTRLCTQLGLIVPHAVPCTVPHAVPCTVLCAVPCTVPHAVP

SEQ ID NO: 5871 - protein, 224 aa, Homo sapiens
MHSRTTTTTQDPKNPEHVKTFTFDLAYWSHNGFQRDKDGVLISADPSRKFAGQRDVFHDLGRGILDSAWQGYNATLLAYGQTGSGKSYSMIGFGANRIRDLLSRTKKPGGLRIREDQQLGFYVEGLKSVPCENYAQIERLMEQGTKIRTTASTNMNASSSRSHLVITIQFKQVFLDRDLTKQSSINLVDLARSERQKSSGSEGDRLREGSCVNLSLTNLGSVIR

SEQ ID NO: 5872 - protein, 1139 aa, Homo sapiens
MQTPEVPAERSPRRRSISGTSTSEKPNSMDTANTSPFKVPGFFSKRLKGSIKRTKSQSKLDRNTSFRLPSLRSTDDRSRGLPKLKESRSHESLLSPCSTVECLDLGRGEPVSVKPLHSSILGQDFCFEVTYLSGSKCFSCNSASERDKWMENLRRTVQPNKDNCRRAENVLRLWIIEAKDLAPKKKYFCELCLDDTLFARTTSKTKADNIFWGEHFEFFSLPPLHSITVHIYKDVEKKKKKDKNNYVGLVNIPTASVTGRQFVEKWYPVSTPTPNKGKTGGPSIRIKSRFQTITILPMEQYKEFAEFVTSNYTMLCSVLEPVISVRNKEELACALVHILQSTGRAKDFLTDLVMSEVDRCGEHDVLIFRENTIATKSIEEYLKLVGQQYLHDALGEFIKALYESDENCEVDPSKCSSSELIDHQSNLKMCCELAFCKIINSYCVFPRELKEVFASWKQQCLNRGKQDISERLISASLFLRFLCPAIMSPSLFNLMQEYPDDRTSRTLTLIAKVIQNLANFAKFGNKEEYMAFMNDFLEHEWGGMKRFLLEISNPDTISNTPGFDGYIDLGRELSVLHSLLWEVVSQLDKGENSFLQATVAKLGPLPRVLADITKSLTNPTPIQQQLRRFTEHNSSPNVSGSLSSGLQKIFEDPTDSDLHKLKSPSQDNTDSYFRGKTLLLVQQASSQSMTYSEKDERESSLPNGRSVSLMDLQDTHAAQVEHASVMLDVPIRLTGSQLSITQVASIKQLRETQSTPQSAPQVRRPLHPALNQPGGLQPLSFQNPVYHLNNPIPAMPKASIDSSLENLSTASSRSQSNSEDFKLSGPSNSSMEDFTKRSTQSEDFSRRHTVPDRHIPLALPRQNSTGQAQIRKVDQGGLGARAKAPPSLPHSASLRSTGSMSVVSAALVAEPVQNGSRSRQQSSSSRESPVPKVRAIQRQQTQQVQSPVDSATMSPVERTAAWVLNNGQYEEDVEETEQNLDEAKHAEKYEQEITKLKERLRVSSRRLEEYERRLLVQEQQMQKLLLEYKARLEDSEERLRRQQEEKDSQMKSIISRLMAVEEELKKDHAEMQAVIDAKQKIIDAQEKRIVSLDSANTRLMSALTQVKERYSMQVRNGISPTNPTKLSITENGEFKNSSC

SEQ ID NO: 5873 - protein, 1269 aa, Homo sapiens
MFPALESDSPLPPEDLDAVVPVSGAVAGGMLDRILLESVCQQQSWVRVYDGKGPPTHRLSCGQSPYTETTTWERKYCILTDSQLVLLNKEKEIPVEGGQEQQTDSTKGRCLRRTVSVPSEGQFPEYPPEGATKLEVPAERSPRRRSISGTSTSEKPNSMDTANTSPFKVPGFFSKRLKGSIKRTKSQSKLDRNTSFRLPSLRSTDDRSRGLPKLKESRSHESLLSPCSTVECLDLGRGEPVSVKPLHSSILGQDFCFEVTYLSGSKCFSCNSASERDKWMENLRRTVQPNKDNCRRAENVLRLWIIEAKDLAPKKKYFCELCLDDTLFARTTSKTKADNIFWGEHFEFFSLPPLHSITVHIYKDVEKKKKKDKNNYVGLVNIPTASVTGRQFVEKWYPVSTPTPNKGKTGGPSIRIKSRFQTITILPMEQYKEFAEFVTSNYTMLCSVLEPVISVRNKEELACALVHILQSTGRAKDFLTDLVMSEVDRCGEHDVLIFRENTIATKSIEEYLKLVGQQYLHDALGEFIKALYESDENCEVDPSKCSSSELIDHQSNLKMCCELAFCKIINSYCVFPRELKEVFASWKQQCLNRGKQDISERLISASLFLRFLCPAIMSPSLFNLMQEYPDDRTSRTLTLIAKVIQNLANFAKFGNKEEYMAFMNDFLEHEWGGMKRFLLEISNPDTISNTPGFDGYIDLGRELSVLHSLLWEVVSQLDKGENSFLQATVAKLGPLPRVLADITKSLTNPTPIQQQLRRFTEHNSSPNVSGSLSSGLQKIFEDPTDSDLHKLKSPSQDNTDSYFRGKTLLLVQQASSQSMTYSEKDERESSLPNGRSVSLMDLQDTHAAQVEHASVMLDVPIRLTGSQLSITQVASIKQLRETQSTPQSAPQVRRPLHPALNQPGGLQPLSFQNPVYHLNNPIPAMPKASIDSSLENLSTASSRSQSNSEDFKLSGPSNSSMEDFTKRSTQSEDFSRRHTVPDRHIPLALPRQNSTGQAQIRKVDQGGLGARAKAPPSLPHSASLRSTGSMSVVSAALVAEPVQNGSRSRQQSSSSRESPVPKVRAIQRQQTQQVQSPVDSATMSPVERTAAWVLNNGQYEEDVEETEQNLDEAKHAEKYEQEITKLKERLRVSSRRLEEYERRLLVQEQQMQKLLLEYKARLEDSEERLRRQQEEKDSQMKSIISRLMAVEEELKKDHAEMQAVIDAKQKIIDAQEKRIVSLDSANTRLMSALTQVKERYSMQVRNGISPTNPTKLSITENGEFKNSSC

SEQ ID NO: 5874 - protein, 1297 aa, Homo sapiens
MQQAPQPYEFFSEENSPKWRGLLVSALRKVQEQVHPTLSANEESLYYIEELIFQLLNKLCMAQPRTVQDVEERVQKTFPHPIDKWAIADAQSAIEKRKRRNPLLLPVDKIHPSLKEVLGYKVDYHVSLYIVAVLEYISADILKLAGNYVFNIRHYEISQQDIKVSMCADKVLMDMFDQDDIGLVSLCEDEPSSSGELNYYDLVRTEIAEERQYLRELNMIIKVFREAFLSDRKLFKPSDIEKIFSNISDIHELTVKLLGLIEDTVEMTDESSPHPLAGSCFEDLAEEQAFDPYETLSQDILSPEFHEHFNKLMARPAVALHFQSIADGFKEAVRYVLPRLMLVPVYHCWHYFELLKQLKACSEEQEDRECLNQAITALMNLQGSMDRIYKQYSPRRRPGDPVCPFYSHQLRSKHLAIKKMNEIQKNIDGWEGKDIGQCCNEFIMEGPLTRIGAKHERHIFLFDGLMISCKPNHGQTRLPGYSSAEYRLKEKFVMRKIQICDKEDTCEHKHAFELVSKDENSIIFAAKSAEEKNNWMAALISLHYRSTLDRMLDSVLLKEENEQPLRLPSPEVYRFVVKDSEENIVFEDNLQSRSGIPIIKGGTVVKLIERLTYHMYADPNFVRTFLTTYRSFCKPQELLSLLIERFEIPEPEPTDADKLAIEKGEQPISADLKRFRKEYVQPVQLRILNVFRHWVEHHFYDFERDLELLERLESFISSVRGKAMKKWVESIAKIIRRKKQAQANGVSHNITFESPPPPIEWHISKPGQFETFDLMTLHPIEIARQLTLLESDLYRKVQPSELVGSVWTKEDKEINSPNLLKMIRHTTNLTLWFEKCIVEAENFEERVAVLSRIIEILQVFQDLNNFNGVLEIVSAVNSVSVYRLDHTFEALQERKRKILDEAVELSQDHFKKYLVKLKSINPPCVPFFGIYLTNILKTEEGNNDFLKKKGKDLINFSKRRKVAEITGEIQQYQNQPYCLRIEPDMRRFFENLNPMGSASEKEFTDYLFNKSLEIEPRNCKQPPRFPRKSTFSLKSPGIRPNTGRHGSTSGTLRGHPTPLEREPCKISFSRIAETELESTVSAPTSPNTPSTPPVSASSDLSVFLDVDLNSSCESFFSSCGSLHKLSEEPLIPPPLPPRKKFDHDASNSKVKPRVPVPTGAFDGPLHSPPPPPPRDPLPDTPPPVPLRPPEHFINCPFNLQPPPLGHLHRDSDWLRDISTCPNSPSTPPSTPSPRVPRRCYVLSSSQNNLAHPPAPPVPPRQNSSPHLPKLPPKTYKRELSHPPLYRLPLLENAETPQ

SEQ ID NO: 5875 - protein, 1332 aa, Homo sapiens
MQQAPQPYEFFSEENSPKWRGLLVSALRKVQVQVHPTLSANEESLYYIEELIFQLLNKLCMAQPRTVQDVEERVQKTFPHPIDKWAIADAQSAIEKRKRRNPLLLPVDKIHPSLKEVLGYKVDYHVSLYIVAVLEYISADILKLAGNYVFNIRHYEISQQDIKVSMCADKVLMDMFDQDDIGLVSLCEDEPCSSGELNYYDLVRTEIAEERQYLRELNMIIKVFREAFLSDRKLFKPSVYEKIFSNISDIHELTVKLLGLIEDTVEMTDESSPHPLAGSCFEDLAEEQAFDPYETLSQDILSPEFHEHFNKLMARPAVALHFQSIADGFKEAVRYVLPRLMLVPVYHCWHYFELLKQLKACSEEQEDRECLNQAITALMNHQGSMDRIYKQYSPRRRPGDPVCPFYSHQLRSKHLAIKKMNEIQKNIDGWEGKDIGQCCNEFIMEGPLTRIGAKHERHIFLFDGLMISCKPNHGQTRLPGYTSAEYRLKEKFVMRKIQICDKEDTCEHKHAFELVSKDENSIIFAAKSAEEKNNWMAALISLHYRSTLDRMLDSVLLKEENEQPLRLPSPEVYRFVVKDSEENIVFEDNLQSRSGIPIIKGGTVVKLIERLTYHMYADPNFVRTFLTTYRSFCKPQELLSLLIERFEIPEPEPTDADKLAIEKGEQPISADLKRFRKEYVQPVQLRVLNVFRHWVDHHYYDFERDLELLERLESFISSVRGKAMKKWVESIAKIIRRKKQAQANGVSHNITFESPPPPIEWHISKPGQFETFDLMTLDPIEIARQLTLLESDLYRKVQPSELVGSVWTKEDKEINSPNLLKMIRHTTNLTLWFEKCIVEAENFEERVAVLSRIIEILQVFQDLNNFNGVLEIVSAVNSVSVYRLDHTFEALQERKRKILDEAVELSQDHFKKYLVKLKSINPPCVPFFGIYLTNILKTEEGNNDFLKRKGKDLINFSKRRKVAEITGEIQQYQNQPYCLRIEPDMRRFFENLNPMGSASEKEFTDYLFNKSLEIEPRNCKQPPRFPRKSTFSLKSPGIRPNTGRHGSTSGTLRGHPTPLEREPCKISFSRIAETELESTVSAPTSPNTPSTPPVSASSDLSVFLDVDLNSSCGSNSIFAPVLLPHSKSFFSSCGSLHKLSEEPLIPPPLPPRKKFDHDASNSKGNMKSDDDPPAIPPRQPPPPKVKPRVPVPTGAFDGPLHSPPPPPPRDPLPDTPPPVPLRPPEHFINCPFNLQPPPLGHLHRDSDWLRDISTCPNSPSTPPSTPSPRVPRRCYVLSSSQNNLAHPPAPPVPPRQNSSPHLPKLPPKTYKRELSHPPLYRLPLLENAETPQ

SEQ ID NO: 5876 - protein, 2205 aa, Homo sapiens
MAVNFLKFLVRSYVCGFAGPEYADVVFLVDSSDRLGSKSFPFVKMFITKMISSLPIEADKYRVALAQYSDKLHSEFHLSTFKGRSPMLNHLRKNFGFIGGSLQIGKALQEAHRTYFSAPANGRDKKQFPPILVVLASSESEDNVEEASKALRKDGVKIISVGVQKASEENLKAMATSQFHFNLRTVRDLSMFSQNMTHIIKDVIKYKEGAVDDIFVEACQGPSMADVVFLLDMSINGSEENFDYLKGFLEESVSALDIKENCMRVGLVAYSNETKVINSLSMGINKSEVLQHIQNLSPRTGKAYTGAAIKKLRKEVFSARNGSRKNQGVPQIAVLVTHRDSEDNVTKAAVNLRREGVTIFTLGIEGASDTQLEKIASHPAEQYVSKLKTFADLAAHNQTFLKKLRNQITHTVSVFSERTETLKSGCVDTEEADIYLLIDGSGSTQATDFHEMKTFLSEVVGMFNIAPHKVRVGAVQYADSWDLEFEINKYSNKQDLGKAIENIRQMGGNTNTGAALNFTLSLLQKAKKQRGNKVPCHLVVLTNGMSKDSILEPANRLREEHIRVYAIGIKEANQTQLREIAGEEKRVYYVHDFDALKDIRNQVVQEICTEEACKEMKADIMFLVDSSGSIGPENFSKMKTFMKNLVSKSQIGPDRVQIGVVQFSDINKEEFQLNRFMSQSDISNAIDQMAHIGQTTLTGSALSFVSQYFSPTKGARPNIRKFLILITDGEAQDIVKEPAVVLRQEGVIIYSVGVFGSNVTQLEEISGRPEMVFYVENFDILQRIEDDLVFGICSPREECKRIEVLDVVFVIDSSGSIDYDEYNIMKDFMIGLVKKADVGKNQVRFGALKYADDPEVLFYLDDFGTKLEVISVLQNDQAMGGSTYTAEALGFSDHMFTEARGSRLNKGVPQVLIVITDGESHDADKLNATAKALRDKGILVLAVGIDGANPVELLAMAGSSDKYFFVETFGGLKGIFSDVTASVCNSSKVDCEIDKVDLVFLMDGSTSIQPNDFKKMKEFLASVVQDFDVSLNRVRIGAAQFSDTYHPEFPLGTFIGEKEISFQIENIKQIFGNTHIGAALREVEHYFRPDMGSRINTGTPQVLLVLTDGQSQDEVAQAAEALRHRGIDIYSVGIGDVDDQQLIQITGTAEKKLTVHNFDELKKVNKRIVRNICTTAGESSVRKRPLFAIWLVSEVEEQCLKERKYLTDFWLLGNTAYRAAKSCGTDCFVDVVVGFDVSTQEKGQTLLEGQPWMETYLQDILRAISSLNGVSCEVGTETQVSVAFQVTNAMEKYSPKFEIYSENILNSLKDITVKGPSLLNANLLDSLWDTFQNKSAARGKVVLLFSDGLDDDVEKLEQKSDELRKEGLNALITVALDGPADSSDLADLPYIEFGKGFEYRTQLSIGMRELGSRLSKQLGPPGFKGSEGYLGEEGIAGERGAPGPVGEQGTKGCYGTKGPKGNRGLNGQEGEVGENGIDGLNGEQGDNGLPGRKGEKGDEGSQGSPGKRGTPGDRGAKGLRGDPGAPGVDSSIEGPTGLKGERGRQGTAGIPGPDGLEGSLGLKGPQGPRGEAGVKGEKGGVGSKGPQGEPGDLGEKGAVGFPGPRGLQGNDGSPGYGSVGRKGAKGQEGFPGESGPKGEIGDPGGPGETGLKGARGKMGYGLLGKPECPVHPTELVFALDHSRDVTEQEFERMKEMMAFLVRDIKVRENSCPVGAHIAILSYNSHARHLVRFSDAYKKSQLLREIETIPYERSSASREIGRAMRFISRNVFKRTLPGAHTRKIATFFSSGQSADAHSITTAAMEFGALEIIPVVITFSNVPSIDDTGTFQVIVVPSGADYIPALERLQRCTFCYVTQSNFWFTDVCKPDASCDQARPPPVQSYMDAAFLLDASRNMGSAEFEDIRAFLGALLDHFEITPEPETSVTGDRVALLSHAPPDFLPNTQKSPVRAEFNLTTYRSKRLMKRHVHESVKQLNGDAFIGHALQWTLDNVFLSTPNLRRNKVIFVISAGETSHLDGEILKKESLRAKCQGYALFVFSLGPIWDDKELEDLASHPLDHHLVQLGRIHKPDHSYGVKFVKSFINSIRRAINKYPPINLKIKCNRLNSIDPKQPPRPFRRRAGLPVLQVSGSLEKGHRQDAVHVTLAEDSIFGMEEKYEWEEGIHSAFGQEVSSSFVTLPQIHWMLSFSYVFEMVKCQQMAGASRN

SEQ ID NO: 5877 - protein, 389 aa, Homo sapiens [sequence omitted]

SEQ ID NO: 5878 - protein, 331 aa, Homo sapiens
MDWVMKHNGPNDASDGTVRLRGLPFGCSKEEIVQFFQGLEIVPNGITLTMDYQGRSTGEAFVQFASKEIAENALGKHKERIGHRYIEIFRSSRSEIKGFYDPPRRLLGQRPGPYDRPIGGRGGYYGAGRGSYGGFDDYGGYNNYGYGNDGFDDRMRDGRGMGGHGYGGAGDASSGFHGGHFVHMRGLPFRATENDIANFFSPLNPIRVHIDIGADGRATGEADVEFVTHEDAVAAMSKDKNNMQHRYIELFLNSTPGGGSGMGGSGMGGYGRDGMDNQGGYGSVGRMGMGNNYSGGYGTPDGLGGYGRGGGGSGGYYGQGGMSGGGWRGMY

SEQ ID NO: 5879 - protein, 346 aa, Homo sapiens
MDWVMKHNGPNDASDGTVRLRGLPFGCSKEEIVQFFQGLEIVPNGITLTMDYQGRSTGEAFVQFASKEIAENALGKHKERIGHRYIEIFRSSRSEIKGFYDPPRRLLGQRPGPYDRPIGGRGGYYGAGRGSMYDRMRRGGDGYDGGYGGFDDYGGYNNYGYGNDGFDDRMRDGRGMGGHGYGGAGDASSGFHGGHFVHMRGLPFRATENDIANFFSPLNPIRVHIDIGADGRATGEADVEFVTHEDAVAAMSKDKNNMQHRYIELFLNSTPGGGSGMGGSGMGGYGRDGMDNQGGYGSVGRMGMGNNYSGGYGTPDGLGGYGRGGGGSGGYYGQGGMSGGGWRGMY

SEQ ID NO: 5880 - protein, 297 aa, Homo sapiens
MDYQGRSTGEAFVQFASKEIAENALGKHKERIGHRYIEIFRSSRSEIKGFYDPPRRLLGQRPGPYDRPIGGRGGYYGAGRGSMYDRMRRGGDGYDGGYGGFDDYGGYNNYGYGNDGFDDRMRDGRGMGGHGYGGAGDASSGFHGGHFVHMRGLPFRATENDIANFFSPLNPIRVHIDIGADGRATGEADVEFVTHEDAVAAMSKDKNNMQHRYIELFLNSTPGGGSGMGGSGMGGYGRDGMDNQGGYGSVGRMGMGNNYSGGYGTPDGLGGYGRGGGGSGGYYGQGGMSGGGWRGMY

SEQ ID NO: 5881 - protein, 215 aa, Homo sapiens
MYDRMRRGGDGYDGGYGGFDDYGGYNNYGYGNDGFDDRMRDGRGMGGHGYGGAGDASSGFHGGHFVHMRGLPFRATENDIANFFSPLNPIRVHIDIGADGRATGEADVEFVTHEDAVAAMSKDKNNMQHRYIELFLNSTPGGGSGMGGSGMGGYGRDGMDNQGGYGSVGRMGMGNNYSGGYGTPDGLGGYGRGGGGSGGYYGQGGMSGGGWRGMY

SEQ ID NO: 5882 - protein, 724 aa, Homo sapiens
GEKGGMKPPAHWTGGLQPELQGSPAGWDSTEGWTWGDGEHGLGAAAMPTWGARPASPDRFAVSAEAENKVREQQPHVERIFSVGVSVLPKDCPDNPHIWLQLEGPKENASRAKEYLKGLCSPELQDEIHYPPKLHCIFLGAQGFFLDCLAWSTSAHLVPRAPGSLMISGLTEAFVMAQSRVEELAERLSWDFTPGPSSGASQCTGVLRDFSALLQSPGDAHREALLQLPLAVQEELLSLVQEASSGQGPGALASWEGRSSALLGAQCQGVRAPPSDGRESLDTGSMGPGDCRGARGDTYAVEKEGGTQGGPREMDLGWKELPGEEAWEREVALRPQSVGGGARESAPLKGKALGKEEIALGGGGFCVHREPPGAHGSCHRAAQSRGASLLQRLHNGNASPPRVPSPPPAPEPPWHCGDRGDCGDRGDVGDRGDKQQGMARGRGPQWKRGARGGNLVTGTQRFKEALQDPFTLCLANVPGQPDLRHIVIDGSNVAMVHGLQHYFSSRGIAIAVQYFWDRGHRDITVFVPQWRFSKDAKVRESHFLQKLYSLSLLSLTPSRVMDGKRISSYDDRFMVKLAEETDGIIVSNDQFRDLAEESEKWMAIIRERLLPFTFVGNLFMVPDDPLGRNGPTLDEFLKKPARTQGSSKAQHPSRGFAEHGKQQQGREEEKGSGGIRKTRETERLRRQLLEVFWGQDHKVDFILQREPYCRDINQLSEALLSLNF

SEQ ID NO: 5883 - protein, 641 aa, Homo sapiens
MGPPLKLFKNQKYQELKQECIKDSRLFCDPTFLPENDSLFYNRLLPGKVVWKRPQDICDDPHLIVGNISNHQLTQGRLGHKPMVSAFSCLAVQESHWTKTIPNHKEQEWDPQKTEKYAGIFHFRFWHFGEWTEVVIDDLLPTINGDLVFSFSTSMNEFWNALLEKAYAKLLGCYEALDGLTITDIIVDFTGTLAETVDMQKGRYTELVEEKYKLFGELYKTFTKGGLICCSIESPNQEEQEVETDWGLLKGHTYTMTDIRKIRLGERLVEVFSAEKVYMVRLRNPLGRQEWSGPWSEISEEWQQLTASDRKNLGLVMSDDGEFWMSLEDFCRNFHKLNVCRNVNNPIFGRKELESVLGCWTVDDDPLMNRSGGCYNNRDTFLQNPQYIFTVPEDGHKVIMSLQQKDLRTYRRMGRPDNYIIGFELFKVEMNRKFRLHHLYIQERAGTSTYIDTRTVFLSKYLKKGNYVLVPTMFQHGRTSEFLLRIFSEVPVQLRELTLDMPKMSCWNLARGYPKVVTQITVHSAEDLEKKYANETVNPYLVIKCGKEEVRSPVQKNTVHAIFDTQAIFYRRTTDIPIIVQVWNSRKFCDQFLGQVTLDADPSDCRDLKSLYLRKKGGPTAKVKQGHISFKVISSDDLTEL

SEQ ID NO: 5884 - protein, 974 aa, Homo sapiens [sequence omitted]

SEQ ID NO: 5885 - protein, 476 aa, Homo sapiens
MDEAGSSASGGGFRPGVDSLDEPPNSRIFLVISKYTPESVLRERFSPFGDIQDIWVVRDKHTKESKGIAFVKFARSSQACRAMEEMHGQCLGPNDTKPIKVFIAQSRSSGSHRDVEDEELTRIFVMIPKSYTEEDLREKFKVYGDIEYCSIIKNKVTGESKGLGYVRYLKPSQAAQAIENCDRSFRAILAEPKNKASESSEQDYYSNMRQEALGHEPRVNMFPFVGEQQSEFSSFDKNDSRGQEAISKRLSVVSRVPFTEEQLFSIFDIVPGLEYCEVQRDPYSNYGHGVVQYFNVASAIYAKYKLHGFQYPPGNRIGVSFIDDGSNATDLLRKMATQMVAAQLASMVWNNPSQQQFMQFGGSSGSQLPQIQTDVVLPSCKKKAPAETPVKERLFIVFNPHPLPLDVLEDIFCRFGNLIEVYLVSGKNVGYAKYADRISANDAIATLHGKILNGVRLKVMLADSPREESNKRQRTY

SEQ ID NO: 5886 - protein, 1719 aa, Homo sapiens [sequence omitted]

SEQ ID NO: 5887 - protein, 1638 aa, Homo sapiens [sequence omitted]

SEQ ID NO: 5888 - protein, 1638 aa, Homo sapiens [sequence omitted]

SEQ ID NO: 5889 - protein, 703 aa, Homo sapiens
MAAATGDPGLSKLQFAPFSSALDVGFWHELTQKKLNEYRLDEAPKDIKGYYYNGDSAGLPARLTLEFSAFDMSAPTPARCCPAIGTLYNTNTLESFKTADKKLLLEQAANEIWESIKSGTALENPVLLNKFLLLTFADLKKYHFYYWFCYPALCLPESLPLIQGPVGLDQRFSLKQIEALECAYDNLCQTEGVTALPYFLIKYDENMVLVSLLKHYSDFFQGQRTKITIGVYDPCNLAQYPGWPLRNFLVLAAHRWSSSFQSVEVVCFRDRTMQGARDVAHSIIFEVKLPEMAFSPDCPKAVGWEKNQKGGMGPRMVNLSECMDPKRLAESSVDLNLKLMCWRLVPTLDLDKVVSVKCLLLGAGTLGCNVARTLMGWGVRHITFVDNAKISYSNPVRQPLYEFEDCLGGGKPKALAAADRLQKIFPGVNARGFNMSIPMPGHPVNFSSVTLEQARRDVEQLEQLIESHDVVFLLMDTRESRWLPAVIAASKRKLVINAALGFDTFVVMRHGLKKPKQQGAGDLCPNHPVASADLLGSSLFANIPGYKLGCYFCNDVVAPGDSTRDRTLDQQCTVSRPGLAVIAGALAVELMVSVLQHPEGGYAIASSSDDRMNEPPTSLGLVPHQIRGFLSRFDNVLPVSLAFDKCTACSSKVLDQYEREGFNFLAKVFNSSHSFLEDLTGLTLLHQETQAAEIWDMSDDETI

SEQ ID NO: 5890 - protein, 676 aa, Homo sapiens
MAAATGDPGLSKLQFAPFSSALDVGFWHELTQKKLNEYRLDEAPKDIKGYYYNGDSAGLPARLTLEFSAFDMSAPTPARCCPAIGTLYNTNTLESFKTADKKLLLEQAANEIWESIKSGTALENPVLLNKFLLLTFADLKKYHFYYWFCYPALCLPESLPLIQGPVGLDQRFSLKQIEALECAYDNLCQTEGVTALPYFLIKYDENMVLVSLLKHYSDFFQGQRTKITIGVYDPCNLAQYPGWPLRNFLVLAAHRWSSSFQSVEVVCFRDRTMQGARDVAHSIIFEVKLPEMAFSPDCPKAVGWEKNQKGGMGPRMVNLSECMDPKRLAESSVDLNLKLMCWRLVPTLDLDKVVSVKCLLLGAGTLGCNVARTLMGWGVRHITFVDNAKISYSNPVRQPLYEFEDCLGGGKPKALAAADRLQKIFPGVNARGFNMSIPMPGHPVNFSSVTLEQARRDVEQLEQLIESHDVVFLLMDTRESRWLPAVIAASKRKLVINAALGFDTFVVMRHGLKKPKQQGAGDLCPNHPVASADLLGSSLFANIPGYKLGCYFCNDVVAPGDSTRDRTLDQQCTVSRPGLAVIAGALAVELMVSVLQHPEGGYAIASSSDDRMNEPPTSLGLVPHQVLDQYEREGFNFLAKVFNSSHSFLEDLTGLTLLHQETQAAEIWDMSDDETI

SEQ ID NO: 5891 - protein, 878 aa, Homo sapiens
MEQWRQCGRWLIDCKVLPPNHRVVWPSAVVFDLAQALRDGVLLCQLLHNLSPGSIDLKDINFRPQMSQFLCLKNIRTFLKVCHDKFGLRNSELFDPFDLFDVRDFGKVISAVSRLSLHSIAQNKGIRPFPSEETTENDDDVYRSLEELADEHDLGEDIYDCVPCEDGGDDIYEDIIKVEVQQPMIRYMQKMGMTEDDKRNCCLLEIQETEAKYYRTLEDIEKNYMSPLRLVLSPADMAAVFINLEDLIKVHHSFLRAIDVSVMVGGSTLAKVFLDFKERLLIYGEYCSHMEHAQNTLNQLLASREDFRQKVEECTLKVQDGKFKLQDLLVVPMQRVLKYHLLLKELLSHSAERPERQQLKEALEAMQDLAMYINEVKRDKETLRKISEFQSSIENLQVKLEEFGRPKIDGELKVRSIVNHTKQDRYLFLFDKVVIVCKRKGYSYELKEIIELLFHKMTDDPMNNKDVKKSHGKMWSYGFYLIHLQGKQGFQFFCKTEDMKRKWMEQFEMAMSNIKPDKANANHHSFQMYTFDKTTNCKACKMFLRGTFYQGYMCTKCGVGAHKECLEVIPPCKFTSPADLDASGAGPGPKMVAVQNYHGNPAPPGKPVLTFQTGDVLELLRGDPESPWWEGRLVQTRKSGYFPSSSVKPCPVDGRPPISRPPSREIDYTAYPWFAGNMERQQTDNLLKSHASGTYLIRERPAEAERFAISIKFNDEVKHIKVVEKDNWIHITEAKKFDSLLELVEYYQCHSLKESFKQLDTTLKYPYKSRERSASRASSRSPASCASYNFSFLSPQGLSFASQGPSAPFWSVFTPRVIGTAVARYNFAARDMRELSLREGDVVRIYSRIGGDQGWWKGETNGRIGWFPSTYVEEEGIQ

SEQ ID NO: 5892 - protein, 332 aa, Homo sapiens
MSEAGEEQPMETTGATENGHEAVPEGESPAGAGTGAAAGAGGATAAPPSGNQNGAEGDQINASKNEEDAGKMFVGGLSWDTSKKDLKDYFTKFGEVVDCTIKMDPNTGRSRGFGFILFKDAASVEKVLDQKEHRLDGRVIDPKKAMAMKKDPVKKIFVGGLNPEATEEKIREYFGEFGEIEAIELPMDPKLNKRRGFVFITFKEEEPVKKVLEKKFHTVSGSKCEIKVAQPKEVYQQQQYGSGGRGNRNRGNRGSGGGGGGGGQSQSWNQGYGNYWNQGYGYQQGYGPGYGGYDYSPYGYYGYGPGYDYSQGSTNYGKSQRRGGHQNNYKPY

SEQ ID NO: 5893 - protein, 285 aa, Homo sapiens
MSEAGEEQPMETTGATENGHEAVPEGESPAGAGTGAAAGAGGATAAPPSGNQNGAEGDQINASKNEEDAGKMFVGGLSWDTSKKDLKDYFTKFGEVVDCTIKMDPNTGRSRGFGFILFKDAASVEKVLDQKEHRLDGRVIDPKKAMAMKKDPVKKIFVGGLNPEATEEKIREYFGEFGEIEAIELPMDPKLNKRRGFVFITFKEEEPVKKVLEKKFHTVSGSKCEIKVAQPKEVYQQQQYGSGGRGNRNRGNRGSGGGGGGGGQGSTNYGKSQRRGGHQNNYKPY

SEQ ID NO: 5894 - protein, 628 aa, Homo sapiens
MAAAGAGPGQEAGAGPGPGAVANATGAEEGEMKPVAAGAAAPPGEGISAAPTVEPSSGEAEGGEANLVDVSGGLETESSNGKDTLEGAGDTSEVMDTQAGSVDEENGRQLGEVELQCGICTKWFTADTFGIDTSSCLPFMTNYSFHCNVCHHSGNTYFLRKQANLKEMCLSALANLTWQSRTQDEHPKTMFSKDKDIIPFIDKYWECMTTRQRPGKMTWPNNIVKTMSKERDVFLVKEHPDPGSKDPEEDYPKFGLLDQDLSNIGPAYDNQKQSSAVSTSGNLNGGIAAGSSGKGRGAKRKQQDGGTTGTTKKARSDPLFSAQRLPPHGYPLEHPFNKDGYRYILAEPDPHAPDPEKLELDCWAGKPIPGDLYRACLYERVLLALHDRAPQLKISDDRLTVVGEKGYSMVRASHGVRKGAWYFEITVDEMPPDTAARLGWSQPLGNLQAPLGYDKFSYSWRSKKGTKFHQSIGKHYSSGYGQGDVLGFYINLPEDTETAKSLPDTYKDKALIKFKSYLYFEEKDFVDKAEKSLKQTPHSEIIFYKNGVNQGVAYKDIFEGVYFPAISLYKSCTVSINFGPCFKYPPKDLTYRPMSDMGWGAVVEHTLADVLYHVETEVDGRRSPPWEP

SEQ ID NO: 5895 - protein, 534 aa, Homo sapiens
MDTQAGSVDEENGRQLGEVELQCGICTKWFTADTFGIDTSSCLPFMTNYSFHCNVCHHSGNTYFLRKQANLKEMCLSALANLTWQSRTQDEHPKTMFSKDKDIIPFIDKYWECMTTRQRPGKMTWPNNIVKTMSKERDVFLVKEHPDPGSKDPEEDYPKFGLLDQDLSNIGPAYDNQKQSSAVSTSGNLNGGIAAGSSGKGRGAKRKQQDGGTTGTTKKARSDPLFSAQRLPPHGYPLEHPFNKDGYRYILAEPDPHAPDPEKLELDCWAGKPIPGDLYRACLYERVLLALHDRAPQLKISDDRLTVVGEKGYSMVRASHGVRKGAWYFEITVDEMPPDTAARLGWSQPLGNLQAPLGYDKFSYSWRSKKGTKFHQSIGKHYSSGYGQGDVLGFYINLPEDTETAKSLPDTYKDKALIKFKSYLYFEEKDFVDKAEKSLKQTPHSEIIFYKNGVNQGVAYKDIFEGVYFPAISLYKSCTVSINFGPCFKYPPKDLTYRPMSDMGWGAVVEHTLADVLYHVETEVDGRRSPPWEP

SEQ ID NO: 5896 - protein, 501 aa, Homo sapiens
MDTQAGSVDEENGRQLGEVELQCGICTKWFTADTFGIDTSSCLPFMTNYSFHCNVCHHSGNTYFLRKQANLKEMCLSALANLTWQSRTQDEHPKTMFSKDKDIIPFIDKYWECMTTRQRPGKMTWPNNIVKTMSKERDVFLVKEHPDPGSKDPEEDYPKFGLLDQDLSNIGPAYDNQKQSSAVSTSGNLNGGIAAGSSGKGRGAKRKQQDGGTTGTTKKARSDPLFSAQRLPPHGYPLEHPFNKDGYRYILAEPDPHAPDPEKLELDCWAGKPIPGDLYRACLYERVLLALHDRAPQLKISDDRLTVVGEKGYSMVRASHGVRKGAWYFEITVDEMPPDTAARLGWSQPLGNLQAPLGYDKFSYSWRSKKGTKFHQSIGKHYSSGYGQGDVLGFYINLPEDTETAKSLPDTYKDKALIKFKSYLYFEEKDFVDKAEKSLKQTPHSEVSINFGPCFKYPPKDLTYRPMSDMGWGAVVEHTLADVLYHVETEVDGRRSPPWEP

SEQ ID NO: 5897 - protein, 1147 aa, Homo sapiens
ESPEPHPLQDNGSFLWFSMMSQSMGGDNLSSLDTNEAEIEPENMREKFFRSLARLLENKSNNTKIFSKAKYCQLIKEVKEAKAKAKKESVDYRRLARFDVILVQGNEKLIEAVNGETDKIRYYLHSEDLFDILHNTHLSIGHGGRTRMEKELQAKYKNITKEVIMLYLTLCKPCQQKNSKLKKVLTSKSIKEVSSRCQVDLIDMQLNPDGEYRFILHYQDLCTKLTFLRSLKSKRPTEVAHALLDIFTIIGAPSVLQSDNGREFSSQVVSELSNIWPELKIVHGKSQTCQSQSSAEQTEDIRKRIFSWMQTNNSSHWTEFLWFIQMSQNQPYHRSMQQTPCESAFSSEAKLGLSHSQLTEELVASLHTENELDQADKELENTLRAQYEENIETGTDSSDIEENLSVTPKVAEKSPPESRLRFLSCVVCEKECTGVNSCISCDGNIHAICGVPSQHGTEGCGRQITCSLCYETSTMKRKHDEIQRSLPVKPSKMLKPSGTPFSPDKVGDWMAKQASLDFFVKKRHAFSEHSSSNKRNVNNRSYPEEGKTKRVHASFTRKYDPSYIEFGFVAVIDGEVLKPQCIICGDVLANEAMKPSKLKRHLYSKHKEISSQPKEFFERKSSELKSQPKQVFNVSHINISALRASYKVALPVAKSKTPYTIAETLVKDCIKEVCLEMLGESAAKKVAQVPLSNDTIARRIQELANDMEDQLIEQIKLAKYFSLQLDECRDIANMIILLVYVRFEHDDDIKEEFFFSASLPTNTTSSELYEAVKNYIVNKCGLEFKFCVGVCSDGAASMTGKHSEVVTQIKELAPECKTTHCFIHRESLAMKKISAELNSVLNDIVKIVNYIKSNSLNSRLFSLLCDNMEADHKQLLLHAEIRWLSRGKVLSRMFEIRNELLVFLQGKKPMWSQLFKDVNWTARLAYLSDIFSIFNDLNASMQGKNATYFSMADKVEGQKQKLEAWKNRISTDCYDMFHNLTTIINEVGNDLDIAHLRKVISEHLTNLLECFEFYFPSKEDPRIGNLWIQNPFLSSKDNLNLTVTLQDKLLKLATDEGLKISFENTASLPSFWIKAKNDYPELAEIALKLLLLFPSTYLCETGFSTLSVIKTKHRNSLNIHYPLRVALSSIQPRLDKLTSKKQAHLSH

SEQ ID NO: 5898 - protein, 782 aa, Homo sapiens
MEAVSRVFPALAGQAPEEQGEIIKVKVKEEDHTWDQESALRRNLSYTRELSRQRFRQFCYQETPGPREALSQLRELCRQWLNPEIHTKEQILELLVLEQFLTILPEELQSWVREHNPESGEEVVTLLEDLERELDEPRQQVSQGTYGQEVSMEEMIPLDSAKESLGTQLQSMEDRMECESPEPHPLQDNGSFLWFSMMSQSMGGDNLSSLDTNEAEIEPENMREKFFRSLARLLENKSNNTKIFSKAKYCQLIKEVKEAKAKAKKESVDYRRLARFDVILVQGNEKLIEAVNGETDKIRYYLHSEDLFDILHNTHLSIGHGGRTRMEKELQAKYKNITKEVIMLYLTLCKPCQQKNSKLKKVLTSKSIKEVSSRCQVDLIDMQLNPDGEYRFILHYQDLCTKLTFLRSLKSKRPTEVAHALLDIFTIIGAPSVLQSDNGREFSSQVVSELSNIWPELKIVHGKSQTCQSQSSAEQTEDIRKRIFSWMQTNNSSHWTEFLWFIQMSQNQPYHRSMQQTPCESAFSSEAKLGLSHSQLTEELVASLHTENELDQADKELENTLRAQYEENIETGTDSSDIEENLSVTPKVAEKSPPESRLRFLSCVVCEKECTGVNSCISCDGNIHAICGVPSQHGTEGCGRQITCSLCYETSTMKRKHDEIQRSLPVKPSKMLKPSGTPFSPDKVGDWMAKQASLDFFVKKRHAFSEHSSSNKRNVNNRSYPEEGKTKRVHASFTRKYDPSYIEFGFVAVIDGEVLKPQCIICGDVLANEAMKPSKLKRHLYS

SEQ ID NO: 5899 - protein, 891 aa, Homo sapiens
MPDLRRKKTLPIVRDVAMTLAARKSGLSLAMVIRTSLNNEELKMHVFKKTLQALIYPMSSTIPHNFEVWTATTPTYCYECEGLLWGIARQGMKCLECGVKCHEKCQDLLNADCLQRAAEKSSKHGAEDKTQTIITAMKERMKIREKNRPEVFEVIQEMFQISKEDFVQFTKAAKQSVLDGTSKWSAKITITVVSAQGLQAKDKTGSSDPYVTVQVGKNKRRTKTIFGNLNPVWDEKFYFECHNSTDRIKVRVWDEDDDIKSRVKQHFKKESDDFLGQTIVEVRTLSGEMDVWYNLEKRTDKSAVSGAIRLKINVEIKGEEKVAPYHIQYTCLHENLFHYLTEVKSNGGVKIPEVKGDEAWKVFFDDASQEIVDEFAMRYGIESIYQAMTHFSCLSSKYMCPGVPAVMSTLLANINAFYAHTTVSTNIQVSASDRFAATNFGREKFIKLLDQLHNSLRIDLSKYRENFPASNTERLQDLKSTVDLLTSITFFRMKVLELQSPPKASMVVKDCVRACLDSTYKYIFDNCHELYSQLTDPSKKQDIPREDQGPTTKNLDFWPQLITLMVTIIDEDKTAYTPVLNQFPQELNMGKISAEIMWTLFALDMKYALEEHENQRLCKSTDYMNLHFKVKWFYNEYVRELPAFKDAVPEYSLWFEPFVMQWLDENEDVSMEFLHGALGRDKKDGFQQTSEHALFSCSVVDVFAQLNQSFEIIKKLECPNPEALSHLMRRFAKTINKVLLQYAAIVSSDFSSHCDKENVPCILMNNIQQLRVQLEKMFESMGGKELDSEASTILKELQVKLSGVLDELSVTYGESFQVIIEECIKQMSFELNQMRANGNTTSNKNSAAMDAEIVLRSLMDFLDKTLSLSAKICEKTVLKRVLKELWKLVLN

SEQ ID NO: 5900 - protein, 892 aa, Homo sapiens
MDVWYNLEKRTDKSAVSGAIRLKINVEIKGEEKVAPYHIQYTCLHENLFHYLTEVKSNGGVKIPEVKGDEAWKVFFDDASQEIVDEFAMRYGIESIYQAMTHFSCLSSKYMCPGVPAVMSTLLANINAFYAHTTVSTNIQVSASDRFAATNFGREKFIKLLDQLHNSLRIDLSKYRENFPASNTERLQDLKSTVDLLTSITFFRMKVLELQSPPKASMVVKDCVRACLDSTYKYIFDNCHELYSQLTDPSKKQDIPREDQGPTTKNLDFWPQLITLMVTIIDEDKTAYTPVLNQFPQELNMGKISAEIMWTLFALDMKYALEEHENQRLCKSTDYMNLHFKVKWFYNEYVRELPAFKDAVPEYSLWFEPFVMQWLDENEDVSMEFLHGALGRDKKDGFQQTSEHALFSCSVVDVFAQLNQSFEIIKKLECPNPEALSHLMRRFAKTINKVLLQYAAIVSSDFSSHCDKENVPCILMNNIQQLRVQLEKMFESMGGKELDSEASTILKELQVKLSGVLDELSVTYGESFQVIIEECIKQMSFELNQMRANGNTTSNKNSAAMDAEIVLRSLMDFLDKTLSLSAKICEKTVLKRVLKELWKLVLNKIEKQIVLPPLTDQTGPQMIFIAAKDLGQLSKLKEHMIREDARGLTPRQCAIMEVVLATIKQYFHAGGNGLKKNFLEKSPDLQSLRYALSLYTQTTDALIKKFIDTQTSQSRSSKDAVGQISVHVDITATPGTGDHKVTVKVIAINDLNWQTTAMFRPFVEVCILGPNLGDKKRKQGTKTKSNTWSPKYNETFQFILGKENRPGAYELHLSVKDYCFAREDRIIGMTVIQLQNIAEKGSYGAWYPLLKNISMDETGLTILRILSQRTSDDVAKEFVRLKSETRSTEESA

SEQ ID NO: 5901 - protein, 2147 aa, Homo sapiens
MAAFGLLSYEQRPLKRPRLGPPDVYPQDPKQKEDELTAVNVKQGFNNQPAFTGDEHGSARNIVINPSKIGAYFSSILAEKLKLNTFQDTGKKKPQVNAKDNYWLVTARSQSAIHSWFSDLAGNKPLSILAKKVPILSKKEDVFAYLAKYSVPMVRATWLIKMTCAYYSAISEAKIKKRQAPDPNLEWTQISTRYLREQLAKISDFYHMASSTGDGPVPVPPEVEQAMKQWEYNEKLAFHMFQEGMLEKHEYLTWILDVLEKIRPMDDDLLKLLLPLMLQYSDEFVQSAYLSRRLAYFCARRLSLLLSDSPNLLAAHSPHMMIGPNNSSIGAPSPGPPGPGMSPVQLAFSDFLSCAQHGPLVYGLSCMLQTVTLCCPSALVWNYSTNENKSANPGSPLDLLQVAPSSLPMPGGNTAFNQQVRARIYEVEQQIKQRGRAVEVRWSFDKCQESTAGVTISRVLHTLEVLDRHCFDRTDSSNSMETLYHKIFWANQNKDNQEVAPNDEAVVTLLCEWAVSCKRSGKHRAMAVAKLLEKRQAEIEAERCGESEVLDEKESISSSSLAGSSLPVFQNVLLRFLDTQAPSLSDPNSECEKVEFVNLVLLFCEFIRHDVFSHDAYMCTLISRGDLSVTASTRPRSPVGENADEHYSKDHDVKMEIFSPMPGESCENANTSLGRRMSVNCEKLVKREKPRELIFPSNYDLLRHLQYATHFPIPLDESSSHECNQRTILLYGVGKERDEARHQLKKITKDILKILNKKSTTETGVGDEGQKARKNKQETFPTLETVFTKLQLLSYFDQHQVTSQISNNVLEQITSFASGTSYHLPLAHHIQLIFDLMEPALNINGLIDFAIQLLNELSVVEAELLLKSSSLAGSYTTGLCVCIVAVLRRYHSCLILNPDQTAQVFEGLCGVVKHVVNPSECSSPERCILAYLYDLYVSCSHLRSKFGDLFSSACSKVKQTIYNNVMPANSNLRWDPDFMMDFIENPSARSINYSMLGKILSDNAANRYSFVCNTLMNVCMGHQDAGRINDIANFSSELTACCTVLSSEWLGVLKALCCSSNHVWGFNDVLCTVDVSDLSFHDSLATFIAILIARQCFSLEDVVQHVALPSLLAAACGDADAEPGARMTCRLLLHLFRAPQACFLPQATGKPFPGIRSSCDRHLLAAAHNSIEVGAVFAVLKAIMMLGDAKIGNNSVSSLKNDDFTMRGLRCDGNADDIWTASQNPKSCGKSISIETANLREYARYVLRTICQQEWVGEHCLKEPERLCTDKELILDPVLSNMQAQKLLQLICYPHGIKECTEGDNLQRQHIKRILQNLEQWTLRQSWLELQLMIKQCLKDPGSGSVAEMNNLLDNIAKATIEVFQQSADLNNSSNSGMSLFNPNSIGSADTSSTRQNGIKTFLSSSERRGVWLVAPLIARLPTSVQGRVLKAAGEELEKGQHLGSSSKKERDRQKQKSMSLLSQQPFLSLVLTCLKGQDEQREGLLTSLQNQVNQILSNWREERYQDDIKARQMMHEALQLRLNLVGGMFDTVQRSTQWTTDWALLLLQIITSGTVDMHTNNELFTTVLDMLGVLINGTLASDLSNASPGGSEENKRAYMNLVKKLKKELGDKRSESIDKVRQLLPLPKQTCDVITCEPMGSLIDTKGNKIAGFDSIDKKQARGLQVSTKQKVSPWDLFEGQKNPAPLSWAWFGTVRVDRRVIKYEEQHHLLLYHTHPMPKPRSYYLQPLPLPPEEEEEEPTSPVSQEPERKSAELSDQGKTTTDEEKKTKGRKRKTKSSSRVDEYPQSNIYRVPPNYSPISSQMMHHPQSTLWGYNLVGQPQQPGFFLQNQSLTPGGSRLDPAGSFVPTNTKQALSNMLQRRSGAMMQPPSLHAITSQQQLIQMKLLQQQQQQRLLRQAQTRPFQQGQPGDQAALFAAQARPSPQLPQYPGLQQAQTMPQGYTMYGTQMPLQQTSQQQAGSVVLSPSYNSRAYPAAHSNPVLMERLRQIQQQPSGYVQQQASPYLQPLTGSQRLNHQALQQSPLVGGGIDAVLTSAHPNLPSVPLPQDPMRPRQPQVRQQQRLLQMQQPQQPQPQQPPQPQQSSQSQSQTLGLQAMQPQQPLFPRQGLQQTQQQQQTAALVRQLQKQLSSNQPQQGVTPYGHPSHF

SEQ ID NO: 5902 - protein, 255 aa, Homo sapiens
MVMSSYMVNSKYVDPKFPPCEEYLQGGYLGEQGADYYGGGAQGADFQPPGLYPRPDFGEQPFGGSGPGPGSALPARGHGQEPGGPGGHYAAPGEPCPAPPAPPPAPLPGARAYSQSDPKQPPSGTALKQPAVVYPWMKKVHVNSVNPNYTGGEPKRSRTAYTRQQVLELEKEFHFNRYLTRRRRIEIAHTLCLSERQIKIWFQNRRMKWKKDHKLPNTKGRSSSSSSSSSCSSSVAPSQHLQPMAKDHHTDLTTL

SEQ ID NO: 5903 - protein, 1137 aa, Homo sapiens
MSDIVEKTLTALPGLFLQNQPGGGPAAAKASFSSRLGSLVRGITALTSKHEEEKLIQQELSSLKATVSAPTTTLKMMKECMVRLIYCEMLGYDASFGYIHAIKLAQQGNLLEKRVGYLAVSLFLHESHELLLLLVNTVVKDLQSTNLVEVCMALTVVSQIFPREMIPAVLPLIEDKLQHSKEIVRRKAVLALYKFHLIAPNQVQHIHIKFRKALCDRDVGVMAASLHIYLRMIKENSSGYKDLTGSFVTILKQVVGGKLPVEFNYHSVPAPWLQIQLLRILGLLGKDDQRTSELMYDVLDESLRRAELNHNVTYAILFECVHTVYSIYPKSELLEKAAKCIGKFVLSPKINLKYLGLKALTYVIQQDPTLALQHQMTIIECLDHPDPIIKRETLELLYRITNAQNITVIVQKMLEYLHQSKEEYVIVNLVGKIAELAEKYAPDNAWFIQTMNAVFSVGGDVMHPDIPNNFLRLLAEGFDDETEDQQLRLYAVQSYLTLLDMENVFYPQRFLQVMSWVLGEYSYLLDKETPEEVIAKLYKLLMNDSVSSETKAWLIAAVTKLTSQAHSSNTVERLIHEFTISLDTCMRQHAFELKHLHENVELMKSLLPVDRSCEDLVVDASLSFLDGFVAEGLSQGAAPYKPPHQRQEEKLSQEKVLNFEPYGLSFSSSGFTGRQSPAGISLGSDVSGNSAETGLKETNSLKLEGIKKLWGKEGYLPKKESKTGDESGALPVPQESIMENVDQAITKKDQSQVLTQSKEEKEKQLLASSLFVGLGSESTINLLGKADTVSHKFRRKSKVKEAKSGETTSTHNMTCSSFSSLSNVAYEDDYYSNTLHDTGDKELKKFSLTSELLDSESLTELPLVEKFSYCSLSTPSLFANNNMEIFHPPQSTAASVAKESSLASSFLEETTEYIHSNAMEVCNNETISVSSYKIWKDDCLLMVWSVTNKSGLELKSADLEIFPAENFKVTEQPGCCLPVMEAESTKSFQYSVQIEKPFTEGNLTGFISYHMMDTHSAQLEFSVNLSLLDFIRPLKISSDDFGKLWLSFANDVKQNVKMSESQAALPSALKTLQQKLRLHIIEIIGNEGLLACQLLPSIPCLLHCRVHADVLALWFRSSCSTLPDYLLYQCQKVMEGS

SEQ ID NO: 5904 - protein, 851 aa, Homo sapiens
MAKSALRENGTNSETFRQRFRRFHYQEVAGPREAFSQLWELCCRWLRPEVRTKEQIVELLVLEQFLTVLPGEIQNWVQEQCPENGEEAVTLVEDLEREPGRPRSSVTVSVKGQEVRLEKMTPPKSSQELLSVRQESVEPQPRGVPKKERARSPDLGPQEQMNPKEKLKPFQRSGLPFPKSGVVSRLEQGEPWIPDLLGSKEKELPSGSHIGDRRVHADLLPSKKDRRSWVEQDHWSFEDEKVAGVHWGYEETRTLLAILSQTEFYEALRNCHRNSQVYGAVAERLREYGFLRTLEQCRTKFKGLQKSYRKVKSGHPPETCPFFEEMEALMSAQVIALPSNGLEAAASHSGLVGSDAETEEPGQRGWQHEEGAEEAVAQESDSDDMDLEATPQDPNSAAPVVFRSPGGVHWGYEETKTYLAILSETQFYEALRNCHRNSQLYGAVAERLWEYGFLRTPEQCRTKFKSLQTSYRKVKNGQAPETCPFFEEMDALVSVRVAAPPNDGQEETASCPVQGTSEAEAQKQAEEADEATEEDSDDDEEDTEIPPGAVITRAPVLFQSPRGFEAGFENEDNSKRDISEEVQLHRTLLARSERKIPRYLHQGKGNESDCRSGRQWAKTSGEKRGKLTLPEKSLSEVLSQQRPCLGERPYKYLKYSKSFGPNSLLMHQVSHQVENPYKCADCGKSFSRSARLIRHRRIHTGEKPYKCLDCGKSFRDSSNFITHRRIHTGEKPYQCGECGKCFNQSSSLIIHQRTHTGEKPYQCEECGKSFNNSSHFSAHRRIHTGERPHVCPDCGKSFSKSSDLRAHHRTHTGEKPYGCHDCGKCFSKSSALNKHGEIHAREKLLTQSAPK

SEQ ID NO: 5905 - protein, 1093 aa, Homo sapiens
MAGAAGLTAEVSWKVLERRARTKRSGSVYEPLKSINLPRPDNETLWDKLDHYYRIVKSTLLLYQSPTTGLFPTKTCGGDQKAKIQDSLYCAAGAWALALAYRRIDDDKGRTHELEHSAIKCMRGILYCYMRQADKVQQFKQDPRPTTCLHSVFNVHTGDELLSYEEYGHLQINAVSLYLLYLVEMISSGLQIIYNTDEVSFIQNLVFCVERVYRVPDFGVWERGSKYNNGSTELHSSSVGLAKAALEAINGFNLFGNQGCSWSVIFVDLDAHNRNRQTLCSLLPRESRSHNTDAALLPCISYPAFALDDEVLFSQTLDKVVRKLKGKYGFKRFLRDGYRTSLEDPNRCYYKPAEIKLFDGIECEFPIFFLYMMIDGVFRGNPKQVQEYQDLLTPVLHHTTEGYPVVPKYYYVPADFVEYEKNNPGSQKRFPSNCGRDGKLFLWGQALYIIAKLLADELISPKDIDPVQRYVPLKDQRNVSMRFSNQGPLENDLVVHVALIAESQRLQVFLNTYGIQTQTPQQVEPIQIWPQQELVKAYLQLGINEKLGLSGRPDRPIGCLGTSKIYRILGKTVVCYPIIFDLSDFYMSQDVFLLIDDIKNALQFIKQYWKMHGRPLFLVLIREDNIRGSRFNPILDMLAALKKGIIGGVKVHVDRLQTLISGAVVEQLDFLRISDTEELPEFKSFEELEPPKHSKVKRQSSTPSAPELGQQPDVNISEWKDKPTHEILQKLNDCSCLASQAILLGILLKREGPNFITKEGTVSDHIERVYRRAGSQKLWLAVRYGAAFTQKFSSSIAPHITTFLVHGKQVTLGAFGHEEEVISNPLSPRVIQNIIYYKCNTHDEREAVIQQELVIHIGWIISNNPELFSGMLKIRIGWIIHAMEYELQIRGGDKPALDLYQLSPSEVKQLLLDILQPQQNGRCWLNRRQIDGSLNRTPTGFYDRVWQILERTPNGIIVAGKHLPQQPTLSDMTMYEMNFSLLVEDTLGNIDQPQYRQIVVELLMVVSIVLERNPELEFQDKVDLDRLVKEAFNEFQKDQSRLKEIEKQDDMTSFYNTPPLGKRGTCSYLTKAVMNLLLEGEVKPNNDDPCLIS

SEQ ID NO: 5906 - protein, 1086 aa, Homo sapiens
MACSPDAVVSPSSAFLRSGSVYEPLKSINLPRPDNETLWDKLDHYYRIVKSTLLLYQSPTTGLFPTKTCGGDQKAKIQDSLYCAAGAWALALAYRRIDDDKGRTHELEHSAIKCMRGILYCYMRQADKVQQFKQDPRPTTCLHSVFNVHTGDELLSYEEYGHLQINAVSLYLLYLVEMISSGLQIIYNTDEVSFIQNLVFCVERVYRVPDFGVWERGSKYNNGSTELHSSSVGLAKAALEAINGFNLFGNQGCSWSVIFVDLDAHNRNRQTLCSLLPRESRSHNTDAALLPCISYPAFALDDEVLFSQTLDKVVRKLKGKYGFKRFLRDGYRTSLEDPNRCYYKPAEIKLFDGIECEFPIFFLYMMIDGVFRGNPKQVQEYQDLLTPVLHHTTEGYPVVPKYYYVPADFVEYEKNNPGSQKRFPSNCGRDGKLFLWGQALYIIAKLLADELISPKDIDPVQRYVPLKDQRNVSMRFSNQGPLENDLVVHVALIAESQRLQVFLNTYGIQTQTPQQVEPIQIWPQQELVKAYLQLGINEKLGLSGRPDRPIGCLGTSKIYRILGKTVVCYPIIFDLSDFYMSQDVFLLIDDIKNALQFIKQYWKMHGRPLFLVLIREDNIRGSRFNPILDMLAALKKGIIGGVKVHVDRLQTLISGAVVEQLDFLRISDTEELPEFKSFEELEPPKHSKVKRQSSTPSAPELGQQPDVNISEWKDKPTHEILQKLNDCSCLASQAILLGILLKREGPNFITKEGTVSDHIERVYRRAGSQKLWSVVRRAASLLSKVVDSLAPSITNVLVQGKQVTLGAFGHEEEVISNPLSPRVIQNIIYYKCNTHDEREAVIQQELVIHIGWIISNNPELFSGMLKIRIGWIIHAMEYELQIRGGDKPALDLYQLSPSEVKQLLLDILQPQQNGRCWLNRRQIDGSLNRTPTGFYDRVWQILERTPNGIIVAGKHLPQQPTLSDMTMYEMNFSLLVEDTLGNIDQPQYRQIVVELLMVVSIVLERNPELEFQDKVDLDRLVKEAFNEFQKDQSRLKEIEKQDDMTSFYNTPPLGKRGTCSYLTKAVMNLLLEGEVKPNNDDPCLIS

SEQ ID NO: 5907 - protein, 1235 aa, Homo sapiens
MRSRSNSGVRLDGYARLVQQTILCYQNPVTGLLSASHEQKDAWVRDNIYSILAVWGLGMAYRKNADRDEDKAKAYELEQNVVKLMRGLLQCMMRQVAKVEKFKHTQSTKDSLHAKYNTATCGTVVGDDQWGHLQVDATSLFLLFLAQMTASGLRIIFTLDEVAFIQNLVFYIEAAYKVADYGMWERGDKTNQGIPELNASSVGMAKAALEAIDELDLFGAHGGRKSVIHVLPDEVEHCQSILFSMLPRASTSKEIDAGLLSIISFPAFAVEDVNLVNVTKNEIISKLQGRYGCCRFLRDGYKTPREDPNRLHYDPAELKLFENIECEWPVFWTYFIIDGVFSGDAVQVQEYREALEGILIRGKNGIRLVPELYAVPPNKVDEEYKNPHTVDRVPMGKVPHLWGQSLYILSSLLAEGFLAAGEIDPLNRRFSTSVKPDVVVQVTVLAENNHIKDLLRKHGVNVQSIADIHPIQVQPGRILSHIYAKLGRNKNMNLSGRPYRHIGVLGTSKLYVIRNQIFTFTPQFTDQHHFYLALDNEMIVEMLRIELAYLCTCWRMTGRPTLTFPISRTMLTNDGSDIHSAVLSTIRKLEDGYFGGARVKLGNLSEFLTTSFYTYLTFLDPDCDEKLFDNASEGTFSPDSDSDLVGYLEDTCNQESQDELDHYINHLLQSTSLRSYLPPLCKNTEDRHVFSAIHSTRDILSVMAKAKGLEVPFVPMTLPTKVLSAHRKSLNLVDSPQPLLEKVPESDFQWPRDDHGDVDCEKLVEQLKDCSNLQDQADILYILYVIKGPSWDTNLSGQHGVTVQNLLGELYGKAGLNQEWGLIRYISGLLRKKVEVLAEACTDLLSHQKQLTVGLPPEPREKIISAPLPPEELTKLIYEASGQDISIAVLTQEIVVYLAMYVRAQPSLFVEMLRLRIGLIIQVMATELARSLNCSGEEASESLMNLSPFDMKNLLHHILSGKEFGVERSVRPIHSSTSSPTISIHEVGHTGVTKTERSGINRLRSEMKQMTRRFSADEQFFSVGQAASSSAHSSKSARSSTPSSPTGTSSSDSGGHHIGWGERQGQWLRRRRLDGAINRVPVGFYQRVWKILQKCHGLSIDGYVLPSSTTREMTPHEIKFAVHVESVLNRVPQPEYRQLLVEAIMVLTLLSDTEMTSIGGIIHVDQIVQMASQLFLQDQVSIGAMDTLEKDQATGICHFFYDSAPSGAYGTMTYLTRAVASYLQELLPNSGCQMQ

SEQ ID NO: 5908 - protein, 316 aa, Homo sapiens
SVQWSDPLPECREIYCPAPPQIDNGIIQGERDHYGYRQSVTYACNKGFTMIGEHSIYCTVNNDEGEWSGPPPECRGKSLTSKVPPTVQKPTTVNVPTTEVSPTSQKTTTKTTTPNAQGTETPSVLQKHTTENVSATRTPPTPQKPTTVNVPATIVTPTPQKPTTINVPATGVSSTPQRHTIVNVSATGTLPTLQKPTRANDSATKSPAAAQTSFISKTLSTKTPSAAQNPMMTNASATQATLTAQKFTTAKVAFTQSPSAAPTRSTPVSRTTKHFHETTPNKGSGTTSGTTRLLSGHTCFTLTGLLGTLVTMGLLT

SEQ ID NO: 5909 - protein, 750 aa, Homo sapiens
MMEELHSLDPRRQELLEARFTGVGVSKGPLNSESSNQSLCSVGSLSDKEVETPEKKQNDQRNRKRKAEPYETSQGKGTPRGHKISDYFEFAGGSAPGTSPGRSVPPVARSSPQHSLSNPLPRRVEQPLYGLDGSAAKEATEEQSALPTLMSVMLAKPRLDTEQLAQRGAGLCFTFVSAQQNSPSSTGSGNTEHSCSSQKQISIQHRQTQSDLTIEKISALENSKNSDLEKKEGRIDDLLRANCDLRRQIDEQQKMLEKYKERLNRCVTMSKKLLIEKSKQEKMACRDKSMQDRLRLGHFTTVRHGASFTEQWTDGYAFQNLIKQQERINSQREEIERQRKMLAKRKPPAMGQAPPATNEQKQRKSKTNGAENETLTLAEYHEQEEIFKLRLGHLKKEEAEIQAELERLERVRNLHIRELKRIHNEDNSQFKDHPTLNDRYLLLHLLGRGGFSEVYKAFDLTEQRYVAVKIHQLNKNWRDEKKENYHKHACREYRIHKELDHPRIVKLYDYFSLDTDSFCTVLEYCEGNDLDFYLKQHKLMSEKEARSIIMQIVNALKYLNEIKPPIIHYDLKPGNILLVNGTACGEIKITDFGLSKIMDDDSYNSVDGMELTSQGAGTYWYLPPECFVVGKEPPKISNKVDVWSVGVIFYQCLYGRKPFGHNQSQQDILQENTILKATEVQFPPKPVVTPEAKAFIRRCLAYRKEDRIDVQQLACDPYLLPHIRKSVSTSSPAGAAIASTSGASNNSSSN

SEQ ID NO: 5910 - protein, 772 aa, Homo sapiens
MMEELHSLDPRRQELLEARFTGVGVSKGPLNSESSNQSLCSVGSLSDKEVETPEKKQNDQRNRKRKAEPYETSQGKGTPRGHKISDYFEFAGGSAPGTSPGRSVPPVARSSPQHSLSNPLPRRVEQPLYGLDGSAAKEATEEQSALPTLMSVMLAKPRLDTEQLAQRGAGLCFTFVSAQQNSPSSTGSGNTEHSCSSQKQISIQHRQTQSDLTIEKISALENSKNSDLEKKEGRIDDLLRANCDLRRQIDEQQKMLEKYKERLNRCVTMSKKLLIEKSKQEKMACRDKSMQDRLRLGHFTTVRHGASFTEQWTDGYAFQNLIKQQERINSQREEIERQRKMLAKRKPPAMGQAPPATNEQKQRKSKTNGAENETPSSGNTELKDTAPALGAHSLLRLTLAEYHEQEEIFKLRLGHLKKEEAEIQAELERLERVRNLHIRELKRIHNEDNSQFKDHPTLNDRYLLLHLLGRGGFSEVYKAFDLTEQRYVAVKIHQLNKNWRDEKKENYHKHACREYRIHKELDHPRIVKLYDYFSLDTDSFCTVLEYCEGNDLDFYLKQHKLMSEKEARSIIMQIVNALKYLNEIKPPIIHYDLKPGNILLVNGTACGEIKITDFGLSKIMDDDSYNSVDGMELTSQGAGTYWYLPPECFVVGKEPPKISNKVDVWSVGVIFYQCLYGRKPFGHNQSQQDILQENTILKATEVQFPPKPVVTPEAKAFIRRCLAYRKEDRIDVQQLACDPYLLPHIRKSVSTSSPAGAAIASTSGASNNSSSN

SEQ ID NO: 5911 - protein, 750 aa, Homo sapiens
MMEELHSLDPRRQKLLEARFTGVGVSKGPLNSESSNQSLCSVGSLSDKEVETPKKKQNDQRNRKRKAEPYESSQGKGTPRGHKISDYFEFAGGSGPGTSPGRSVPPVARSSLQHSLSNPLPRRVEQPLYGLDGSAAKEATEEQSALPTLMSVMLAKPRLDTEQLAQRGAGLCFTFVSAQQNSPSSTGSGNTEHSCSSQKQISIQHRQTQSDLTIEKISALENSKNSDLEKKEGRIDDLLRAICDLRRQIDEQQKMLEKYKERLNRCVTMSKKLLIEKSKQEKMACRDKSMQDRLRLGYFTTFRHGAKFTEQWTDGYAFQNLIKQQERINSQREEIERQRKMLAKRKPPAMGQAPPATNEQKQWKSKTNGAENETLTLKEYHEQEEIFKLRLGHLKKEEAEIQAELERLERVRKLHIREVKRIHNEDNSQFKYHPTLNDRYLLLHLLGRGGFSEVYKAFDLTEQRYVAVKIHQLNKNWRDEKKENYHKHACREYRIHKELDHPRIVKLYDYFSLDTDSFCTVLEYCEGNDLDFYLKQHKLMSEKEARSIIMQIVNALKYLNEIKPPIIHYDLKPGNILLENGTGCGEIKITDFGLSKIMDDDSYNSVDGMELTSQGAGTYWYLPPECFVVGKEPPKISNKVDVWSVGVIFYQCLYGRKPFGHNQSQQDILQENTILKATEVQFPPKPVVTPEAKALIRRCLAYRKEDRIDVQQLACDPYLLPHIQKSVSTSSPAGAAIASTSGASNNSSSN

SEQ ID NO: 5912 - protein, 718 aa, Homo sapiens
MMEELHSLDPRRQELLEARFTGVGVSKGPLNSESSNQSLCSVGSLSDKEVETPEKKQNDQRNRKRKAEPYETSQGKGTPRGHKISDYFERRVEQPLYGLDGSAAKEATEEQSALPTLMSVMLAKPRLDTEQLAQRGAGLCFTFVSAQQNSPSSTGSGNTEHSCSSQKQISIQHRQTQSDLTIEKISALENSKNSDLEKKEGRIDDLLRANCDLRRQIDEQQKMLEKYKERLNRCVTMSKKLLIEKSKQEKMACRDKSMQDRLRLGHFTTVRHGASFTEQWTDGYAFQNLIKQQERINSQREEIERQRKMLAKRKPPAMGQAPPATNEQKQRKSKTNGAENETLTLAEYHEQEEIFKLRLGHLKKEEAEIQAELERLERVRNLHIRELKRIHNEDNSQFKDHPTLNDRYLLLHLLGRGGFSEVYKAFDLTEQRYVAVKIHQLNKNWRDEKKENYHKHACREYRIHKELDHPRIVKLYDYFSLDTDSFCTVLEYCEGNDLDFYLKQHKLMSEKEARSIIMQIVNALKYLNEIKPPIIHYDLKPGNILLVNGTACGEIKITDFGLSKIMDDDSYNSVDGMELTSQGAGTYWYLPPECFVVGKEPPKISNKVDVWSVGVIFYQCLYGRKPFGHNQSQQDILQENTILKATEVQFPPKPVVTPEAKAFIRRCLAYRKEDRIDVQQLACDPYLLPHIRKSVSTSSPAGAAIASTSGASNNSSSN

SEQ ID NO: 5913 - protein, 431 aa, Homo sapiens
MYRTKVGLKDRQQLYKLIISQLLYDGYISIANGLINEIKPQSVCAPSEQLLHLIKLGMENDDTAVQYAIGRSDTVAPGTGIDLEFDADVQTMSPEASEYETCYVTSHKGPCRVATYSRDGQLIATGSADASIKILDTERMLAKSAMPIEVMMNETAQQNMENHPVIRTLYDHVDEVTCLAFHPTEQILASGSRDYTLKLFDYSKPSAKRAFKYIQEAEMLRSISFHPSGDFILVGTQHPTLRLYDINTFQCFVSCNPQDQHTDAICSVNYNSSANMYVTGSKDGCIKLWDGVSNRCITTFEKAHDGAEVCSAIFSKNSKYILSSGKDSVAKLWEISTGRTLVRYTGAGLSGRQVHRTQAVFNHTEDYVLLPDERTISLCCWDSRTAERRNLLSLGHNNIVRCIVHSPTNPGFMTCSDDFRARFWYRRSTTD

SEQ ID NO: 5914 - protein, 508 aa, Homo sapiens
MEKQRQEEQRKRTEEERKRRIEQDMLEKRKIQRELAKRAEQIEDINNTGTESASEEGDDSLLITVVPVKSYKTSGKMKKNFEDLEKEREEKERIKYEEDKRIRYEEQRPSLKEAKCLSLVMVNEDEENQDTAKIFKGYRPGKLKLSFEEMERQRREDEKRKAEEEARRRIEEEKKAFAEARRNMVVDDDSPEMYKTISQEFLTPGKLEINFEELLKQKMEEEKRRTEEERKHKLEMEKQEFEQLRQEMGEEEEENETFGLSREYEELIKLKRSGSIQAKNLKSKFEKIGQLSEKEIQKKIEEERARRRAIDLEIKEREAENFHEEDDVDVRPARKSEAPFTHKVNMKARFEQMAKAREEEEQRRIEEQKLLRMQFEQREIDAALQKKREEEEEEEGSIMNGSTAEDEEQTRSGAPWFKKPLKNTSVVDSEPVRFTVKVTGEPKPEITWWFEGEILQDGEDYQYIERGETYCLYLPETFPEDGGEYMCKAVNNKGSAASTCILTIESKN

SEQ ID NO: 5915 - protein, 448 aa, Homo sapiens [sequence omitted]

SEQ ID NO: 5916 - protein, 1395 aa, Homo sapiens [sequence omitted]

SEQ ID NO: 5917 - protein, 387 aa, Homo sapiens
  VARIANT 332: Xaa = Any Amino Acid
MATTGSSSHFPEVYKLQDTQDAQMLSTGNLHKQLKVNSGEKINLGKHDFFSAYACGIIEIADFSMPAFPHFLEDHGFKKVKPSLLCENMRLKCWRLRAREQPPLLRRWLLRRGRCFVTTTQVAVSETADAAALALSGLRGSLDGLCQCPTLLFRTPRQAATLSQQPERPEMAAWTASHWPVKGILKNKTSTASSMVASAEQPSGSVEEELSKKSQKWEEMNILATYHPADKDYGLMKIVEPSTPSCRKMGDGEDACSGIETTEAVAPDILAKKLAVAEGLNPKYRVQEQESSGEEASDLSPEEREKRRQFQMKRKLHYNEGLNIKLARELIXKDLHDDKDEEMLKTAGGESMKTEESNQSSTTSDQRQNTFSKFIEELCSTLQLFAR

SEQ ID NO: 5918 - protein, 1642 aa, Homo sapiens
MGITKMNMNVMEEAIGYFEQQLAMLQQLSGNESVLDRGRAYGNLGDCYEALGDYEEAIKYYEQYLSVAQSLNRMQDQAKAYRGLGNGHRAMGSLQQALVCFEKRLVVAHELGEAFNKAQAYGELGSLHSQLGNYEQAISCLERQLNIARDMKDRALESDAACGLGGVYQQMGEYDTALQYHQLDLQIAEETNNPTCQGRAYGNLGLTYESLGTFERAVVYQEQHLSIAAQMNDLAAKTVSYSSLGRTHHALQNYSQAVMYLQEGLRLAEQLGRREDEAKIRHGLGLSLWASGNLEEAQHQLYRASALFETIRHEAQLSTDYKLSLFDLQTSSYQALQRVLVSLGHHDEALAVAERGRTRAFADLLVERQTGQQDSDPYSPVTIDQILEMVNGQRGLVLYYSLAAGYLYSWLLAPGAGIVKFHEHYLGENTVENSSDFQASSSVTLPTATGSALEQHIASVREALGVESHYSRACASSETESEAGDIMDQQFEEMNNKLNSVTDPTGFLRMVRRNNLFNRSCQSMTSLFSNTVSPTQDGTSSLPRRQSSFAKPPLRALYDLLIAPMEGGLMHSSGPVGRHRQLILVLEGELYLIPFALLKGSSSNEYLYERFGLLAVPSIRSLSVQSKSHLRKNPPTYSSSTSMAAVIGNPKLPSAVMDRWLWGPMPSAEEEAYMVSELLGCQPLVGSVATKERVMSALTQAECVHFATHISWKLSALVLTPSMDGNPASSKSSFGHPYTIPESLRVQDDASDGESISDCPPLQELLLTAADVLDLQLPVKLVVLGSSQESNSKVTADGVIALTRAFLAAGAQCVLVSLWPVPVAASKMFIHAFYSSLLNGLKASAALGEAMKVVQSSKAFSHPSNWAGFMLIGSDVKLNSPSSLIGQALTEILQHPERARDALRVLLHLVEKSLQRIQNGQRNAMYTSQQSVENKVGGIPGWQALLTAVGFRLDPPTSGLPAAVFFPTSDPGDRLQQCSSTLQSLLGLPNPALQALCKLITASETGEQLISRAVKNMVGMLHQVLVQLQAGEKEQDLASAPIQVSISVQLWRLPGCHEFLAALGFDLCEVGQEEVILKTGKQANRRTVHFALQSLLSLFDSTELPKRLSLDSSSSLESLASAQSVSNALPLGYQQPPFSPTGADSIASDAISVYSLSSIASSMSFVSKPEGGSEGGGPGGRQDHDRSKNAYLQRSTLPRSQLPPQTRPAGNKDEEEYEGFSIISNEPLATYQENRNTCFSPDHKQPQPGTAGGMRVSVSSKGSISTPNSPVKMTLIPSPNSPFQKVGKLASSDTGESDQSSTETDSTVKSQEESNPKLDPQELAQKILEETQSHLIAVERLQRSGGQVSKSNNPEDGVQAPSSTAVFRASETSAFSRPVLSHQKSQPSPVTVKPKPPARSSSLPKVSSGYSSPTTSEMSIKDSPSQHSGRPSPGCDSQTSQLDQPLFKLKYPSSPYSAHISKSPRNMSPSSGHQSPAGSAPSPALSYSSAGSARSSPADAPDIDKLKMAAIDEKVQAVHNLKMFWQSTPQHSTGPMKIFRGAPGTMTSKRDVLSLLNLSPRHNKKEEGVDKLELKELSLQQHDGAPPKAPPNGHWRTETTSLGSLPLPAGPPATAPARPLRLPSGNGYKFLSPGRFFPSSKC

SEQ ID NO: 5919 - protein, 1533 aa, Homo sapiens [sequence omitted]

SEQ ID NO: 5920 - protein, 625 aa, Homo sapiens
MPRNKMSFSSPGQQVMYPPGYKTQGHGAEPSTSPLSSINYIIQSTETRRSLDKLLKGDIDIGSQNGTDLFGFGNTHEYPDLQMILSGALWCNIHKVSGKACLIFPHRGYNSSKLHNRGICLSLRSRSTVPLVTRNIEPRHLCRQTLPSVRSELECVTNITLANVIRQLGSLSKYAEDIFGELFTQANTFASPVSSLAERVDGLQVKVTQLDPKEEEVSLQVINTRKAFRSSTIQDQKLFDRNSLPVPVLETYNTCDTPPPLNNLTPYRDDGTEALKFYTDPSYFFDLWKKKMLQDTRDIMKEKRKHRKEKKDNPNRGNVNPRKIKTRKEEWEKIKMGQEFVESKEKLGPFGYPPTLVYQNGSIGCVENVDASSYPPPSQSDSASSPSPSFSEDNLPPPPAEFSYPVDNQRGSGLAGPKRSSVVSPSHPPPAPPLGSPPSSKPGFAPPPAPPPPPPPMIGIPPPPPPIGFGSPGTPPPPSSPSFPPHPDFAAPPPLPPPPAADYPTLPPPPLSQPTRGAPPPPPPPPPGPPPPPFTGADGQPAVPPPLSDTTKPKSSLPAISDAHSDLLSAICQGFQLRRVEEQQEQEKWDVVGNDVATILSRRIAVEYSDSEDDSSEFDGDDWSN

SEQ ID NO: 5921 - protein, 1187 aa, Homo sapiens
MRPRGAAFAAGPPGDLHLGTAIGFAGAIWRSRSPAMSTLLDIKSSVLRQVQVCPSFRRRTEQDPGSASADPQEPATGAWKPGDGVEFFAHMRLMLKKGEGRQGLPCLEVPLRSGSPAPPEPVDPSLGLRALAPEEVEMLYEEALYTVLYRAGTMGPDQVDDEEALLSYLQQVFGTSLEEHTEAIERVRKAKAPTYALKVSVMRAKNLLAKDPNGFSDPYCMLGILPASDATREPRAQKEQRFGFRKGSKRGGPLPAKCIQVTEVKSSTLNPVWKEHFLFEIEDVSTDQLHLDIWDHDDDVSLVEACRKLNEVIGLKGMGRYFKQIVKSARANGTAGPTEDHTDDFLGCLNIPVREVPVAGVDRWFKLEPRSSASRVQGHCHLVLKLITTQRDTAMSQRGRSGFLSHLLLLSHLLRLEHSAEEPNSSSWRGELSTPAATILCLHGAQSNLSPLQLAVLHWQVSSRHHQTCTLDYSYLLGLLEDMQAHWEEAPSLPQEQEESLADSLSAFSEFGLQLLRQLRDYFPATNSTAVHRLELLLKCLGKLQLFQPSFEICPFESELNMDIAAALKRGNREWYDRILNDKSPREQPGPQRLPGLVVLADAVYDDLQFCYSVYASLFHSILNVDVFTLTFRQLERLVAEEAWVLTEELSPKMTLEVASGLFELYLTLADLQRFWDSIPGRDSRSLALAGIHAPFLPAVKLWFQVLRDQAKWRLQGAVDMDTLEPVDASSRHSSSAATAGLCLSHIQELWVRLAWPDPAQAQGLGTQLGQDVCEATLFYTELLRKKVDTQPGAAGEAVSEALCVVLNNVELVRKAAGQALKGLAWPEGATGPEGVLPRPLLSCTQALDDDLQREAHTVTAHLTSKMVGDIRKYVQHISLSPDSIQNDEAVAPLMKYLDEKLALLNASLVKGNLSRVLEALWELLLQAILQALGANRDVSADFYSRFHFTLEALVSFFHAEGQGLPLESLRDGSYKRLKEELRLHKCSTRECIEQFYLDKLKQRTLEQNRFGRLSVRCHYEAAEQRLAVEVLHAADLLPLDANGLSDPFVIVELGPPHLFPLVRSQRTQVKTRTLHPVYDELFYFSVPAEACRRRAACVLFTVMDHDWLSTNDFAGEAALGLGGVTGVARPQVGGGARAGQPVTLHLCRPRAQVRSALRRLEGRTSKEAQEFVKKLKELEKCMEADP

SEQ ID NO: 5922 - protein, 1187 aa, Homo sapiens
MRPRGAAFAAGPPGDLHLGTAIGFAGAIWRSRSPAMSTLLDIKSSVLRQVQVCPSFRRRTEQDPGSASADPQEPATGAWKPGDGVEFFAHMRLMLKKGEGRQGLPCLEVPLRSGSPAPPEPVDPSLGLRALAPEEVEMLYEEALYTVLYRAGTMGPDQVDDEEALLSYLQQVFGTSLEEHTEAIERVRKAKAPTYALKVSVMRAKNLLAKDPNGFSDPYCMLGILPASDATREPRAQKEQRFGFRKGSKRGGPLPAKCIQVTEVKSSTLNPVWKEHFLFEIEDVSTDQLHLDIWDHDDDVSLVEACRKLNEVIGLKGMGRYFKQIVKSARANGTAGPTEDHTDDFLGCLNIPVREVPVAGVDRWFKLEPRSSASRVQGHCHLVLKLITTQRDTAMSQRGRSGFLSHLLLLSHLLRLEHSAEEPNSSSWRGELSTPAATILCLHGAQSNLSPLQLAVLHWQVSSRHHQTCTLDYSYLLGLLEDMQAHWEEAPSLPQEQEESLADSLSAFSEFGLQLLRQLRDYFPATNSTAVHRLELLLKCLGKLQLFQPSFEICPFESELNMDIAAALKRGNREWYDRILNAKSPREQPGPQRLPGLVVLADAVYDDLQFCYSVYASLFHSILNVDVFTLTFRQLERLVAEEAWVLTEELSPKMTLEVASGLFELYLTLADLQRFWDSIPGRDSRSLALAGIHAPFLPAVKLWFQVLRDQAKWRLQGAVDMDTLEPVDASSRHSSSAATAGLCLSHIQELWVRLAWPDPAQAQGLGTQLGQDVCEATLFYTELLRKKVDTQPGAAGEAVSEALCVVLNNVELVRKAAGQALKGLAWPEGATGPEGVLPRPLLSCTQALDDDLQREAHTVTAHLTSKMVGDIRKYVQHISLSPDSIQNDEAVAPLMKYLDEKLALLNASLVKGNLSRVLEALWELLLQAILQALGANRDVSADFYSRFHFTLEALVSFFHAEGQGLPLESLRDGSYKRLKEELRLHKCSTRECIEQFYLDKLKQRTLEQNRFGRLSVRCHYEAAEQRLAVEVLHAADLLPLDANGLSDPFVIVELGPPHLFPLVRSQRTQVKTRTLHPVYDELFYFSVPAEACRRRAACVLFTVMDHDWLSTNDFAGEAALGLGGVTGVARPQVGGGARAGQPVTLHLCRPRAQVRSALRRLEGRTSKEAQEFVKKLKELEKCMEADP

SEQ ID NO: 5923 - protein, 157 aa, Homo sapiens
MGGEQEEERFDGMLLAMAQQHEGGVQELVNTFFSFLRRKTDFFIGGEEGMAEKLITQTFSHHNQLAQKTRREKRARQEAERREKAERAARLAKEAKSETSGPQIKELTDEEAERLQLEIDQKKDAENHEAQLKNGSLDQGSRILRKMRRKMRRTKEN

SEQ ID NO: 5924 - protein, 546 aa, Homo sapiens
MSSAWKTPRGSDAMPEIMVKIIGSKHFQYLVEKPKIKENDSLKTETQTMHQKPMTDNARQMSRDTPVPINFTDQQTTDNPDDVKEKKHPENNQKSENNQKLLTGANSSRFLDGNIPSQANVHCSSVPTGDQSLSYVHGIPRRKLRDWSLEQMVRGSSDQPEDIGQSPSGTTNEDAFLLALVRRELKSRPLSSNLLEKLQKELKILDPISSGFLLQSQLSRLFLKHEVPLQLPTVKILCQRFSKRGSPEMVNYEKLLWFLNSAASDYPQQNKAAADLRKTESHGTHSQSTPPQHSSSQPEVNRSLLEILKMALRTTNGRLNIDNLNLSFRKEDRSFSGCLPLPKVRAICGKHGLYLTLSLLETLLNHQDLGYQNEIKWQNFVEMLTRASSDLLSDLPTGKNEKKAPAPPMEPEVPEMSQSKTEHMKTPEEELQPESSPAETSACKDPLKPLKIRPVSQPFVNPAVKNKAEECETWIDRFRKLENALYLCDLSNTGVLEKERARRLIHNYNLIYNLSLSPQKIDQALRRFRSGENMLLEPALRYLKEL

SEQ ID NO: 5925 - protein, 715 aa, Homo sapiens
MSKAHKPWPYRRRSQFSSRKYLKKEMNSFQQQPPPFGTVPPQMMFPPNWQGAEKDAAFLAKDFNFLTLNNQPPPGNRSQPRAMGPENNLYSQYEQKVRPCIDLIDSLRALGVEQDLALPAIAVIGDQSSGKSSVLEALSGVALPRGSGIVTRCPLVLKLKKQPCEAWAGRISYRNTELELQDPGQVEKEIHKAQNVMAGNGRGISHELISLEITSPEVPDLTIIDLPGITRVAVDNQPRDIGLQIKALIKKYIQRQQTINLVVVPCNVDIATTEALSMAHEVDPEGDRTIGILTKPDLMDRGTEKSVMNVVRNLTYPLKKGYMIVKCRGQQEITNRLSLAEATKKEITFFQTHPYFRVLLEEGSATVPRLAERLTTELIMHIQKSLPLLEGQIRESHQKATEELRRCGADIPSQEADKMFFLIEKIKMFNQDIEKLVEGEEVVRENETRLYNKIREDFKNWVGILATNTQKVKNIIHEEVEKYEKQYRGKELLGFVNYKTFEIIVHQYIQQLVEPALSMLQKAMEIIQQAFINVAKKHFGEFFNLNQTVQSTIEDIKVKHTAKAENMIQLQFRMEQMVFCQDQIYSVVLKKVREEIFNPLGTPSQNMKLNSHFPSNESSVSSFTEIGIHLNAYFLETSKRLANQIPFIIQYFMLRENGDSLQKAMMQILQEKNRYSWLLQEQSETATKRRILKERIYRLTQARHALCQFSSKEIH

SEQ ID NO: 5926 - protein, 970 aa, Homo sapiens
MATCIGEKIEDFKVGNLLGKGSFAGVYRAESIHSGLEVAIKMIDKKAMYKAGMVQRVQNEVKIHCQLKHPSILELYNYFEDSNYVYLVLEMCHNGEMNRYLKNRVKPFSENEARHFMHQIITGMLYLHSHGILHRDLTLSNLLLTRNMNIKIADFGLATQLKMPHEKHYTLCGTPNYISPEIATRSAHGLESDVWSLGCMFYTLLIGRPPFDTDTVKNTLNKVVLADYEMPTFLSIEAKDLIHQLLRRNPADRLSLSSVLDHPFMSRNSSTKSKDLGTVEDSIDSGHATISTAITASSSTSISGSLFDKRRLLIGQPLPNKMTVFPKNKSSTDFSSSGDGNSFYTQWGNQETSNSGRGRVIQDAEERPHSRYLRRAYSSDRSGTSNRQSQAKTYTMERCHSAEMLSVSKRSGGGENEERYSPTDNNANIFNFFKEKTSSSSGSFERPDNNQALSNHLCPGKTPFPFADPTPQTETVQQWFGNLQINAHLRKTTEYDSISPNRDFQGHPDLQKDTSKNAWTDTKVKKNSDASDNAHSVKQQNTMKYMTALHSKPEIIQQECVFGSDPLSEQSKTRGMEPPWGYQNRTLRSITSPLVAHRLKPIRQKTKKAVVSILDSEEVCVELVKEYASQEYVKEVLQISSDGNTITIYYPNGGRGFPLADRPPSPTDNISRYSFDNLPEKYWRKYQYASRFVQLLRSKSPKITYFTRYAKCILMENSPGADFEVWFYDGVKIHKTEDFIQVIEKTGKSYTLKSESEVNSLKEEIKMYMDHANEGHRICLALESIISEEERKTRSAPFFPIIIGRKPGSTSSPKALSPPPSVDSNYPTRDRASFNRMVMHSDASPTQAPILNPSMVTNEGLGLTTTASGTDISSNSLKDCLPKSAQLLKSVFVKNVGWATQLTSGAVWVQFNDGSQLVVQAGVSSISYTSPNGQTTRYGENEKLPDYIKQKLQCLSSILLMFSNPTPNFH

SEQ ID NO: 5927 - protein, 970 aa, Homo sapiens
MATCIGEKIEDFKVGNLLGKGSFAGVYRAESIHTGLEVAIKMIDKKAMYKAGMVQRVKNEVKIHCQLKHPSILELYNYFEDSNYVYLVLEMCHNGEMNRYLKNRVKPFSENEARHFMHQIITGMLYLHSHGILHRDLTLSNLLLTRNMNIKIADFGLATQLKMPHEKHYTLCGTPNYISPEIATRSAHGLESDVWSLGCMFYTLLIGRPPFDTDTVKNTLNKVVLADYEMPTFLSIEAKDLIHQLLRRNPADRLSLSSVLDHPFMSRNSSTKSKDLGTVEDSIDSGHATISTAITASSSTSISGSLFDKRRLLIGQPLPNKMTVFPKNKSSTDFSSSGDGNSFYTQWGNQETSNSGRGRVIQDAEERPHSRYLRRAYSSDRSGTSNSQSQAKTYTMERCHSAEMLSVSKRSGGGENEERYSPTDNNANIFNFFKEKTSSSSGSFERPDNNQALSNHLCPGKTPFPFADPTPQTETVQQWFGNLQINAHLRKTTEYDSISPNRDFQGHPDLQKDTSKNAWTDTKVKKNSDASDNAHSVKQQNTMKYMTALHSKPEIIQQECVFGSDPLSEQSKTRGMEPPWGYQNRTLRSITSPLVAHRLKPIRQKTKKAVVSILDSEEVCVELVKEYASQEYVKEVLQISSDGNTITIYYPNGGRGFPLADRPPSPTDNISRYSFDNLPEKYWRKYQYASRFVQLVRSKSPKITYFTRYAKCILMENSPGADFEVWFYDGVKIHKTEDFIQVIEKTGKSYTLKSESEVNSLKEEIKMFMDHANEGHRICLALESIISEEERKTRSAPFFPIIIGRKPGSTSSPKALSPPPSVDSNYPTRDRASFNRMVMHSAASPTQAPILNPSMVTNEGLGLTTTASGTDISSNSLKDCLPKSAQLLKSVFVKNVGWATQLTSGAVWVQFNDGSQLVVQAGVSSISYTSPNGQTTRYGENEKLPDYIKQKLQCLSSILLMFSNPTPNFH

SEQ ID NO: 5928 - protein, 1047 aa, Homo sapiens
MDAEAEDKTLRTRSKGTEVPMDSLIQELSVAYDCSMAKKRTAEDQALGVPVNKRKSLLMKPRHYSPKADCQEDRSDRTEDDGPLETHGHSTAEEIMIKPMDESLLSTAQENSSRKEDRYSCYQELMVKSLMHLGKFEKNVSVQTVSENLNDSGIQSLKAESDEADECFLIHSDDGRDKIDDSQPPFCSSDDNESNSESAENGWDSGSNFSEETKPPRVPKYVLTDHKKDLLEVPEIKTEGDKFIPCENRCDSETERKDPQNALAEPLDGNAQPSFPDVEEEDSESLAVMTEEGSDLEKAKGNLSLLEQAIALQAERGCVFHNTYKELDRFLLEHLAGERRQTKVIDMGGRQIFNNKHSPRPEKRETKCPIPGCDGTGHVTGLYPHHRSLSGCPHKVRVPLEILAMHENVLKCPTPGCTGRGHVNSNRNTHRSLSGCPIAAAEKLAMSQDKNQLDSPQTGQCPDQAHRTSLVKQIEFNFPSQAITSPRATVSKEQEKFGKVPFDYASFDAQVFGKRPLIQTVQGRKTPPFPESKHFPNPVKFPNRLPSAGAHTQSPGRASSYSYGQCSEDTHIAAAAAILNLSTRCREATDILSNKPQSLHAKGAEIEVDENGTLDLSMKKNRILDKSAPLTSSNTSIPTPSSSPFKTSSILVNAAFYQALCDQEGWDTPINYSKTHGKTEEEKEKDPVSSLENLEEKKFPGEASIPSPKPKLHARDLKKELITCPTPGCDGSGHVTGNYASHRSVSGCPLADKTLKSLMAANSQELKCPTPGCDGSGHVTGNYASHRSLSGCPRARKGGVKMTPTKEEKEDPELKCPVIGCDGQGHISGKYTSHRTASGCPLAAKRQKENPLNGASLSWKLNKQELPHCPLPGCNGLGHVNNVFVTHRSLSGCPLNAQVIKKGKVSEELMTIKLKATGGIESDEEIRHLDEEIKELNESNLKIEADMMKLQTQITSMESNLKTIEEENKLIEQNNESLLKELAGLSQALISSLADIQLPQMGPISEQNFEAYVNTLTDMYSNLERDYSPECKALLESIKQAVKGIHV

SEQ ID NO: 5929 - protein, 3427 aa, Homo sapiens
MERSGWARQTFLLALLLGATLRARAAAGYYPRFSPFFFLCTHHGELEGDGEQGEVLISLHIAGNPTYYVPGQEYHVTISTSTFFDGLLVTGLYTSTSVQASQSIGGSSAFGFGIMSDHQFGNQFMCSVVASHVSHLPTTNLSFIWIAPPAGTGCVNFMATATHRGQVIFKDALAQQLCEQGAPTDVTVHPHLAEIHSDSIILRDDFDSYHQLQLNPNIWVECNNCETGEQCGAIMHGNAVTFCEPYGPRELITTGLNTTTASVLQFSIGSGSCRFSYSDPSIIVLYAKNNSADWIQLEKIRAPSNVSTIIHILYLPEDAKGENVQFQWKQENLRVGEVYEACWALDNILIINSAHRQVVLEDSLDPVDTGNWLFFPGATVKHSCQSDGNSIYFHGNEGSEFNFATTRDVDLSTEDIQEQWSEEFESQPTGWDVLGAVIGTECGTIESGLSMVFLKDGERKLCTPSMDTTGYGNLRFYFVMGGICDPGNSHENDIILYAKIEGRKEHITLDTLSYSSYKVPSLVSVVINPELQTPATKFCLRQKNHQGHNRNVWAVDFFHVLPVLPSTMSHMIQFSINLGCGTHQPGNSVSLEFSTNHGRSWSLLHTECLPEICAGPHLPHSTVYSSENYSGWNRITIPLPNAALTRNTRIRWRQTGPILGNMWAIDNVYIGPSCLKFCSGRGQCTRHGCKCDPGFSGPACEMASQTFPMFISESFGSSRLSSYHNFYSIRGAEVSFGCGVLASGKALVFNKEGRRQLITSFLDSSQSRFLQFTLRLGSKSVLSTCRAPDQPGEGVLLHYSYDNGITWKLLEHYSYLSYHEPRIISVELPGDAKQFGIQFRWWQPYHSSQREDVWAIDEIIMTSVLFNSISLDFTNLVEVTQSLGFYLGNVQPYCGHDWTLCFTGDSKLASSMRYVETQSMQIGASYMIQFSLVMGCGQKYTPHMDNQVKLEYSTNHGLTWHLVQEECLPSMPSCQEFTSASIYHASEFTQWRRVIVLLPQKTWSSATRFRWSQSYYTAQDEWALDSIYIGQQCPNMCSGHGSCDHGICRCDQGYQGTECHPEAALPSTIMSDFENQNGWESDWQEVIGGEIVKPEQGCGVISSGSSLYFSKAGKRQLVSWDLDTSWVDFVQFYIQIGGESASCNKPDSREEGVLLQYSNNGGIQWHLLAEMYFSDFSKPRFVYLELPAAAKTPCTRFRWWQPVFSGEDYDQWAVDDIIILSEKQKQIIPVINPTLPQNFYEKPAFDYPMNQMSVWLMLANEGMVKNETFCAATPSAMIFGKSDGDRFAVTRDLTLKPGYVLQFKLNIGCANQFSSTAPVLLQYSHDAGMSWFLVKEGCYPASAGKGCEGNSRELSEPTMYHTGDFEEWTRITIVIPRSLASSKTRFRWIQESSSQKNVPPFGLDGVYISEPCPSYCSGHGDCISGVCFCDLGYTAAQGTCVSNVPNHNEMFDRFEGKLSPLWYKITGAQVGTGCGTLNDGKSLYFNGPGKREARTVPLDTRNIRLVQFYIQIGSKTSGITCIKPRTRNEGLIVQYSNDNGILWHLLRELDFMSFLEPQIISIDLPQDAKTPATAFRWWQPQHGKHSAQWALDDVLIGMNDSSQTGFQDKFDGSIDLQANWYRIQGGQVDIDCLSMDTALIFTENIGKPRYAETWDFHVSASTFLQFEMSMGCSKPFSNSHSVQLQYSLNNGKDWHLVTEECVPPTIGCLHYTESSIYTSERFQNWKRITVYLPLSTISPRTRFRWIQANYTVGADSWAIDNVVLASGCPWMCSGRGICDAGRCVCDRGFGGPYCVPVVPLPSILKDDFNGNLHPDLWPEVYGAERGNLNGETIKSGTSLIFKGEGLRMLISRDLDCTNTMYVQFSLRFIAKSTPERSHSILLQFSISGGITWHLMDEFYFPQTTNILFINVPLPYTAQTNATRFRLWQPYNNGKKEEIWIVDDFIIDGNNVNNPVMLLDTFDFGPREDNWFFYPGGNIGLYCPYSSKGAPEEDSAMVFVSNEVGEHSITTRDLNVNENTIIQFEINVGCSTDSSSADPVRLEFSRDFGATWHLLLPLCYHSSSHVSSLCSTEHHPSSTYYAGTMQGWRREVVHFGKLHLCGSVRFRWYQGFYPAGSQPVTWAIDNVYIGPQCEEMCNGQGSCINGTKCICDPGYSGPTCKISTKNPDFLKDDFEGQLESDRFLLMSGGKPSRKCGILSSGNNLFFNEDGLRMLMTRDLDLSHARFVQFFMRLGCGKGVPDPRSQPVLLQYSLNGGLSWSLLQEFLFSNSSNVGRYIALEIPLKARSGSTRLRWWQPSENGHFYSPWVIDQILIGGNISGNTVLEDDFTTLDSRKWLLHPGGTKMPVCGSTGDALVFIEKASTRYVVSTDVAVNEDSFLQIDFAASCSVTDSCYAIELEYSVDLGLSWHPLVRDCLPTNVECSRYHLQRILVSDTFNKWTRITLPLPPYTRSQATRFRWHQPAPFDKQQTWAIDNVYIGDGCIDMCSGHGRCIQGNCVCDEQWGGLYCDDPETSLPTQLKDNFNRAPSSQNWLTVNGGKLSTVCGAVASGMALHFSGGCSRLLVTVDLNLTNAEFIQFYFMYGCLITPNNRNQGVLLEYSVNGGITWNLLMEIFYDQYSKPGFVNILLPPDAKEIATRFRWWQPRHDGLDQNDWAIDNVLISGSADQRTVMLDTFSSAPVPQHERSPADAGPVGRIAFDMFMEDKTSVNEHWLFHDDCTVERFCDSPDGVMLCGSHDGREVYAVTHDLTPTEGWIMQFKISVGCKVSEKIAQNQIHVQYSTDFGVSWNYLVPQCLPADPKCSGSVSQPSVFFPTKGWKRITYPLPESLVGNPVRFRFYQKYSDMQWAIDNFYLGPGCLDNCRGHGDCLREQCICDPGYSGPNCYLTHTLKTFLKERFDSEEIKPDLWMSLEGGSTCTECGILAEDTALYFGGSTVRQAVTQDLDLRGAKFLQYWGRIGSENNMTSCHRPICRKEGVLLDYSTDGGITWTLLHEMDYQKYISVRHDYILLPEDALTNTTRLRWWQPFVISNGIVVSGVERAQWALDNILIGGAEINPSQLVDTFDDEGTSHEENWSFYPNAVRTAGFCGNPSFHLYWPNKKKDKTHNALSSRELIIQPGYMMQFKIVVGCEATSCGDLHSVMLEYTKDARSDSWQLVQTQCLPSSSNSIGCSPFQFHEATIYNSVNSSSWKRITIQLPDHVSSSATQFRWIQKGEETEKQSWAIDHVYIGEACPKLCSGHGYCTTGAICICDESFQGDDCSVFSHDLPSYIKDNFESARVTEANWETIQGGVIGSGCGQLAPYAHGDSLYFNGCQIRQAATKPLDLTRASKIMFVLQIGSMSQTDSCNSDLSGPHAVDKAVLLQYSVNNGITWHVIAQHQPKDFTQAQRVSYNVPLEARMKGVLLRWWQPRHNGTGHDQWALDHVEVVL

SEQ ID NO: 5930 - protein, 3458 aa, Homo sapiens
MERSGWARQTFLLALLLGATLRARAAAGYYPRFSPFFFLCTHHGELEGDGEQGEVLISLHIAGNPTYYVPGQEYHVTISTSTFFDGLLVTGLYTSTSVQASQSIGGSSAFGFGIMSDHQFGNQFMCSVVASHVSHLPTTNLSFIWIAPPAGTGCVNFMATATHRGQVIFKDALAQQLCEQGAPTDVTVHPHLAEIHSDSIILRDDFDSYHQLQLNPNIWVECNNCETGEQCGAIMHGNAVTFCEPYGPRELITTGLNTTTASVLQFSIGSGSCRFSYSDPSIIVLYAKNNSADWIQLEKIRAPSNVSTIIHILYLPEDAKGENVQFQWKQENLRVGEVYEACWALDNILIINSAHRQVVLEDSLDPVDTGNWLFFPGATVKHSCQSDGNSIYFHGNEGSEFNFATTRDVDLSTEDIQEQWSEEFESQPTGWDVLGAVIGTECGTIESGLSMVFLKDGERKLCTPSMDTTGYGNLRFYFVMGGICDPGNSHENDIILYAKIEGRKEHITLDTLSYSSYKVPSLVSVVINPELQTPATKFCLRQKNHQGHNRNVWAVDFFHVLPVLPSTMSHMIQFSINLGCGTHQPGNSVSLEFSTNHGRSWSLLHTECLPEICAGPHLPHSTVYSSENYSGWNRITIPLPNAALTRNTRIRWRQTGPILGNMWAIDNVYIGPSCLKFCSGRGQCTRHGCKCDPGFSGPACEMASQTFPMFISESFGSSRLSSYHNFYSIRGAEVSFGCGVLASGKALVFNKEGRRQLITSFLDSSQSRFLQFTLRLGSKSVLSTCRAPDQPGEGVLLHYSYDNGITWKLLEHYSYLSYHEPRIISVELPGDAKQFGIQFRWWQPYHSSQREDVWAIDEIIMTSVLFNSISLDFTNLVEVTQSLGFYLGNVQPYCGHDWTLCFTGDSKLASSMRYVETQSMQIGASYMIQFSLVMGCGQKYTPHMDNQVKLEYSTNHGLTWHLVQEECLPSMPSCQEFTSASIYHASEFTQWRRVIVLLPQKTWSSATRFRWSQSYYTAQDEWALDSIYIGQQCPNMCSGHGSCDHGICRCDQGYQGTECHPEAALPSTIMSDFENQNGWESDWQEVIGGEIVKPEQGCGVISSGSSLYFSKAGKRQLVSWDLDTSWVDFVQFYIQIGGESASCNKPDSREEGVLLQYSNNGGIQWHLLAEMYFSDFSKPRFVYLELPAAAKTPCTRFRWWQPVFSGEDYDQWAVDDIIILSEKQKQIIPVINPTLPQNFYEKPAFDYPMNQMSVWLMLANEGMVKNETFCAATPSAMIFGKSDGDRFAVTRDLTLKPGYVLQFKLNIGCANQFSSTAPVLLQYSHDAGMSWFLVKEGCYPASAGKGCEGNSRELSEPTMYHTGDFEEWTRITIVIPRSLASSKTRFRWIQESSSQKNVPPFGLDGVYISEPCPSYCSGHGDCISGVCFCDLGYTAAQGTCVSNVPNHNEMFDRFEGKLSPLWYKITGAQVGTGCGTLNDGKSLYFNGPGKREARTVPLDTRNIRLVQFYIQIGSKTSGITCIKPRTRNEGLIVQYSNDNGILWHLLRELDFMSFLEPQIISIDLPQDAKTPATAFRWWQPQHGKHSAQWALDDVLIGMNDSSQTGFQDKFDGSIDLQANWYRIQGGQVDIDCLSMDTALIFTENIGKPRYAETWDFHVSASTFLQFEMSMGCSKPFSNSHSVQLQYSLNNGKDWHLVTEECVPPTIGCLHYTESSIYTSERFQNWKRITVYLPLSTISPRTRFRWIQANYTVGADSWAIDNVVLASGCPWMCSGRGICDAGRCVCDRGFGGPYCVPVVPLPSILKDDFNGNLHPDLWPEVYGAERGNLNGETIKSGTSLIFKGEGLRMLISRDLDCTNTMYVQFSLRFIAKSTPERSHSILLQFSISGGITWHLMDEFYFPQTTNILFINVPLPYTAQTNATRFRLWQPYNNGKKEEIWIVDDFIIDGNNVNNPVMLLDTFDFGPREDNWFFYPGGNIGLYCPYSSKGAPEEDSAMVFVSNEVGEHSITTRDLNVNENTIIQFEINVGCSTDSSSADPVRLEFSRDFGATWHLLLPLCYHSSSHVSSLCSTEHHPSSTYYAGTMQGWRREVVHFGKLHLCGSVRFRWYQGFYPAGSQPVTWAIDNVYIGPQCEEMCNGQGSCINGTKCICDPGYSGPTCKISTKNPDFLKDDFEGQLESDRFLLMSGGKPSRKCGILSSGNNLFFNEDGLRMLMTRDLDLSHARFVQFFMRLGCGKGVPDPRSQPVLLQYSLNGGLSWSLLQEFLFSNSSNVGRYIALEIPLKARSGSTRLRWWQPSENGHFYSPWVIDQILIGGNISGNTVLEDDFTTLDSRKWLLHPGGTKMPVCGSTGDALVFIEKASTRYVVSTDVAVNEDSFLQIDFAASCSVTDSCYAIELEYSVDLGLSWHPLVRDCLPTNVECSRYHLQRILVSDTFNKWTRITLPLPPYTRSQATRFRWHQPAPFDKQQTWAIDNVYIGDGCIDMCSGHGRCIQGNCVCDEQWGGLYCDDPETSLPTQLKDNFNRAPSSQNWLTVNGGKLSTVCGAVASGMALHFSGGCSRLLVTVDLNLTNAEFIQFYFMYGCLITPNNRNQGVLLEYSVNGGITWNLLMEIFYDQYSKPGFVNILLPPDAKEIATRFRWWQPRHDGLDQNDWAIDNVLISGSADQRTVMLDTFSSAPVPQHERSPADAGPVGRIAFDMFMEDKTSVNEHWLFHDDCTVERFCDSPDGVMLCGSHDGREVYAVTHDLTPTEGWIMQFKISVGCKVSEKIAQNQIHVQYSTDFGVSWNYLVPQCLPADPKCSGSVSQPSVFFPTKGWKRITYPLPESLVGNPVRFRFYQKYSDMQWAIDNFYLGPGCLDNCRGHGDCLREQCICDPGYSGPNCYLTHTLKTFLKERFDSEEIKPDLWMSLEGGSTCTECGILAEDTALYFGGSTVRQAVTQDLDLRGAKFLQYWGRIGSENNMTSCHRPICRKEGVLLDYSTDGGITWTLLHEMDYQKYISVRHDYILLPEDALTNTTRLRWWQPFVISNGIVVSGVERAQWALDNILIGGAEINPSQLVDTFDDEGTSHEENWSFYPNAVRTAGFCGNPSFHLYWPNKKKDKTHNALSSRELIIQPGYMMQFKIVVGCEATSCGDLHSVMLEYTKDARSDSWQLVQTQCLPSSSNSIGCSPFQFHEATIYNSVNSSSWKRITIQLPDHVSSSATQFRWIQKGEETEKQSWAIDHVYIGEACPKLCSGHGYCTTGAICICDESFQGDDCSVFSHDLPSYIKDNFESARVTEANWETIQGGVIGSGCGQLAPYAHGDSLYFNGCQIRQAATKPLDLTRASKIMFVLQIGSMSQTDSCNSDLSGPHAVDKAVLLQYSVNNGITWHVIAQHQPKDFTQAQRVSYNVPLEARMKGVLLRWWQPRHNGTGHDQWALDHVEVVLTRKQNYMMNFSRQHGLRHFYNRRRRSLRRYP

SEQ ID NO: 5931 - protein, 3460 aa, Homo sapiens [sequence omitted]

SEQ ID NO: 5932 - protein, 420 aa, Homo sapiens
MLPGLRRLLQAPASACLLLMLLALPLAAPSCPMLCTCYSSPPTVSCQANNFSSVPLSLPPSTQRLFLQNNLIRTLRPGTFGSNLLTLWLFSNNLSTIYPGTFRHLQALEELDLGDNRHLRSLEPDTFQGLERLQSLHLYRCQLSSLPGNIFRGLVSLQYLYLQENSLLHLQDDLFADLANLSHLFLHGNRLRLLTEHVFRGLGSLDRLLLHGNRLQGVHRAAFRGLSRLTILYLFNNSLASLPGEALADLPSLEFLRLNANPWACDCRARPLWAWFQRARVSSSDVTCATPPERQGRDLRALREADFQACPPAAPTRPGSRARGNSSSNHLYGVAEAGAPPADPSTLYRDLPAEDSRGRQGGDAPTEDDYWGGYGGEDQRGEQMCPGAACQAPPDSRGPALSAGLPSPLLCLLLLVPHHL

SEQ ID NO: 5933 - protein, 657 aa, Homo sapiens
MQWRALVLGLVLLRLGLHGVLWLVFGLGPSMGFYQRFPLSFGFQRLRSPDGPASPTSGPVGRPGGVSGPSWLQPPGTGAAQSPRKAPRRPGPGMCGPANWGYVLGGRGRGPDEYEKRYSGAFPPQLRAQMRDLARGMFVFGYDNYMAHAFPQDELNPIHCRGRGPDRGDPSNLNINDVLGNYSLTLVDALDTLAIMGNSSEFQKAVKLVINTVSFDKDSTVQVFEATIRVLGSLLSAHRIITDSKQPFGDMTIKDYDNELLYMAHDLAVRLLPAFENTKTGIPYPRVNLKTGVPPDTNNETCTAGAGSLLVEFGILSRLLGDSTFEWVARRAVKALWNLRSNDTGLLGNVVNIQTGHWVGKQSGLGAGLDSFYEYLLKSYILFGEKEDLEMFNAAYQSIQNYLRRGREACNEGEGDPPLYVNVNMFSGQLMNTWIDSLQAFFPGLQVLIGDVEDAICLHAFYYAIWKRYGALPERYNWQLQAPDVLFYPLRPELVESTYLLYQATKNPFYLHVGMDILQSLEKYTKVKCGYATLHHVIDKSTEDRMESFFLSETCKYLYLLFDEDNPVHKSGTRYMFTTEGHIVSVDEHLRELPWKEFFSEEGGQDQGGKSVHRPKPHELKVINSSSNCNRVPDERRYSLPLKSIYMRQIDQMVGLI

SEQ ID NO: 5934 - protein, 336 aa, Homo sapiens
MWGLKVLLLPVVSFALYPEEILDTHWELWKKTHRKQYNNKVDEISRRLIWEKNLKYISIHNLEASLGVHTYELAMNHLGDMASIASAPTSEEVVQKMTGLKVPLSHSRSNDTLYIPEWEGRAPDSVDYRKKGYVTPVKNQGQCGSCWAFSSVGALEGQLKKKTGKLLNLSPQNLVDCVSENDGCGGGYMTNAFQYVQKNRGIDSEDAYPYVGQEESCMYNPTGKAAKCRGYREIPEGNEKALKRAVARVGPVSVAIDASLTSFQFYSKGVYYDESCNSDNLNHAVLAVGYGIQKGNKHWIIKNSWGENWGNKGYILMARNKNNACGIANLASFPKM

SEQ ID NO: 5935 - protein, 1363 aa, Homo sapiens
MQRGAALCLRLWLCLGLLDGLVSDYSMTPPTLNITEESHVIDTGDSLSISCRGQHPLEWAWPGAQEAPATGDKDSEDTGVVRDCEGTDARPYCKVLLLHEVHANDTGSYVCYYKYIKARIEGTTAASSYVFVRDFEQPFINKPDTLLVNRKDAMWVPCLVSIPGLNVTLRSQSSVLWPDGQEVVWDDRRGMLVSTPLLHDALYLQCETTWGDQDFLSNPFLVHITGNELYDIQLLPRKSLELLVGEKLVLNCTVWAEFNSGVTFDWDYPGKQAERGKWVPERRSQQTHTELSSILTIHNVSQHDLGSYVCKANNGIQRFRESTEVIVHENPFISVEWLKGPILEATAGDELVKLPVKLAAYPPPEFQWYKDGKALSGRHSPHALVLKEVTEASTGTYTLALWNSAAGLRRNISLELVVNVPPQIHEKEASSPSIYSRHSRQALTCTAYGVPLPLSIQWHWRPWTPCKMFAQRSLRRRQQQDLMPQCRDWRAVTTQDAVNPIESLDTWTEFVEGKNKTVSKLVIQNANVSAMYKCVVSNKVGQDERLIYFYVTTIPDGFTIESKPSEELLEGQPVLLSCQADSYKYEHLRWYRLNLSTLHDAHGNPLLLDCKNVHLFATPLAASLEEVAPGARHATLSLSIPRVAPEHEGHYVCEVQDRRSHDKHCHKKYLSVQALEAPRLTQNLTDLLVNVSDSLEMQCLVAGAHAPSIVWYKDERLLEEKSGVDLADSNQKLSIQRVREEDAGPYLCSVCRPKGCVNSSASVAVEGSEDKGSMEIVILVGTGVIAVFFWVLLLLIFCNMRRPAHADIKTGYLSIIMDPGEVPLEEQCEYLSYDASQWEFPRERLHLGRVLGYGAFGKVVEASAFGIHKGSSCDTVAVKMLKEGATASEQRALMSELKILIHIGNHLNVVNLLGACTKPQGPLMVIVEFCKYGNLSNFLRAKRDAFSPCAEKSPEQRGRFRAMVELARLDRRRPGSSDRVLFARFSKTEGGARRASPDQEAEDLWLSPLTMEDLVCYSFQVARGMEFLASRKCIHRDLAARNILLSESDVVKICDFGLARDIYKDPDYVRKGSARLPLKWMAPESIFDKVYTTQSDVWSFGVLLWEIFSLGASPYPGVQINEEFCQRVRDGTRMRAPELATPAIRHIMLNCWSGDPKARPAFSELVEILGDLLQGRGLQEEEEVCMAPRSSQSSEEGSFSQVSTMALHIAQADAEDSPPSLQRHSLAARYYNWVSFPGCLARGAETRGSSRMKTFEEFPMTPTTYKGSVDNQTDSGMVLASEEFEQIESRHRQESGFSCKGPGQNVAVTRAHPDSQGRRRRPERGARGGQVFYNSEYGELSEPSEEDHCSPSARVTFFTDNSY

SEQ ID NO: 5936 - protein, 1298 aa, Homo sapiens [sequence omitted]

SEQ ID NO: 5937 - protein, 679 aa, Homo sapiens
MISASRAAAARLVGAAASRGPTAARHQDSWNGLSHEAFRLVSRRDYASEAIKGAVVGIDLGTTNSCVAVMEGKQAKVLENAEGARTTPSVVAFTADGERLVGMPAKRQAVTNPNNTFYATKRLIGRRYDDPEVQKDIKNVPFKIVRASNGDAWVEAHGKLYSPSQIGAFVLMKMKETAENYLGHTAKNAVITVPAYFNDSQRQATKDAGQISGLNVLRVINEPTAAALAYGLDKSEDKVIAVYDLGGGTFDISILEIQKGVFEVKSTNGDTFLGGEDFDQALLRHIVKEFKRETGVDLTKDNMALQRVREAAEKAKCELSSSVQTDINLPYLTMDSSGPKHLNMKLTRAQFEGIVTDLIRRTIAPCQKAMQDAEVSKSDIGEVILVGGMTRMPKVQQTVQDLFGRAPSKAVNPDEAVAIGAAIQGGVLAGDVTDVLLLDVTPLSLGIETLGGVFTKLINRNTTIPTKKSQVFSTAADGQTQVEIKVCQGEREMAGDNKLLGQFTLIGIPPAPRGVPQIEVTFDIDANGIVHVSAKDKGTGREQQIVIQSSGGLSKDDIENMVKNAEKYAEEDRRKKERVEAVNMAEGIIHDTETKMEEFKDQLPADECNKLKEEISKMRELLARKDSETGENIRQAASSLQQASLKLFEMAYKKMASEREGSGSSGTGEQKEDQKEEKQ

SEQ ID NO: 5938 - protein, 374 aa, Homo sapiens
MGLPRGSFFWLLLLLTAACSGLLFALYFSAVQRYPGPAAGARDTTSFEAFFQSKASNSWTGKGQACRHLLHLAIQRHPHFRGLFNLSIPVLLWGDLFTPALWDRLSQHKAPYGWRGLSHQVIASTLSLLNGSESAKLFAPPRDTPPKCIRCAVVGNGGILNGSRQGPNIDAHDYVFRLNGAVIKGFERDVGTKTSFYGFTVNTMKNSLVSYWNLGFTSVPQGQDLQYIFIPSDIRDYVMLRSAILGVPVPEGLDKGDRPHAYFGPEASASKFKLLHPDFISYLTERFLKSKLINTHFGDLYMPSTGALMLLTALHTCDQVSAYGFITSNYWKFSDHYFERKMKPLIFYANHDLSLEAALWRDLHKAGILQLYQR

SEQ ID NO: 5939 - protein, 408 aa, Homo sapiens
MSKRDIVLTNVTVVQLLRQPCPVTRAPPPPEPKAEVEPQPQPEPTPVREEIKPPPPPLPPHPATPPPKMVSVARELTVGINGFGRIGRLVLRACMEKGVKVVAVNDPFIDPEYMVYMFKYDSTHGRYKGSVEFRNGQLVVDNHEISVYQCKEPKQIPWRAVGSPYVVESTGVYLSIQAASDHISAGAQRVVISAPSPDAPMFVMGVNENDYNPGSMNIVSNASCTTNCLAPLAKVIHERFGIVEGLMTTVHSYTATQKTVDGPSRKAWRDGRGAHQNIIPASTGAAKAVTKVIPELKGKLTGMAFRVPTPDVSVVDLTCRLAQPAPYSAIKEAVKAAAKGPMAGILAYTEDEVVSTDFLGDTHSSIFDAKAGIALNDNFVKLISWYDNEYGYSHRVVDLLRYMFSRDK

SEQ ID NO: 5940 - protein, 212 aa, Homo sapiens
MAAPPQLRALLVVVNALLRKRRYHAALAVLKGFRNGAVYGAKIRAPHALVMTFLFRNGSLQEKLWAILQATYIHSWNLARFVFTYKGLRALQSYIQGKTYPAHAFLAAFLGGILVFGENNNINSQINMYLLSRVLFALSRLAVEKGYIPEPRWDPFPLLTAVVWGLVLWLFEYHRSTLQPSLQSSMTYLYEDSNVWHDISDFLVYNKSRPSN

SEQ ID NO: 5941 - protein, 251 aa, Homo sapiens
MIYTMKKVHALWASVCLLLNLAPAPLNADSEEDEEHTIITDTELPPLKLMHSFCAFKADDGPCKAIMKRFFFNIFTRQCEEFIYGGCEGNQNRFESLEECKKMCTRDNANRIIKTTLQQEKPDFCFLEEDPGICRGYITRYFYNNQTKQCERFKYGGCLGNMNNFETLEECKNICEDGPNGFQVDNYGTQLNAVNNSLTPQSTKVPSLFVTKEGTNDGWKNAAHIYQVFLNAFCIHASMFFLGLDSISCLC

SEQ ID NO: 5942 - protein, 304 aa, Homo sapiens
MIYTMKKVHALWASVCLLLNLAPAPLNADSEEDEEHTIITDTELPPLKLMHSFCAFKADDGPCKAIMKRFFFNIFTRQCEEFIYGGCEGNQNRFESLEECKKMCTRDNANRIIKTTLQQEKPDFCFLEEDPGICRGYITRYFYNNQTKQCERFKYGGCLGNMNNFETLEECKNICEDGPNGFQVDNYGTQLNAVNNSLTPQSTKVPSLFEFHGPSWCLTPADRGLCRANENRFYYNSVIGKCRPFKYSGCGGNENNFTSKQECLRACKKGFIQRISKGGLIKTKRKRKKQRVKIAYEEIFVKNM

SEQ ID NO: 5943 - protein, 1224 aa, Homo sapiens
MEPLLLGRGLIVYLMFLLLKFSKAIEIPSSVQQVPTIIKQSKVQVAFPFDEYFQIECEAKGNPEPTFSWTKDGNPFYFTDHRIIPSNNSGTFRIPNEGHISHFQGKYRCFASNKLGIAMSEEIEFIVPSVPKFPKEKIDPLEVEEGDPIVLPCNPPKGLPPLHIYWMNIELEHIEQDERVYMSQKGDLYFANVEEKDSRNDYCCFAAFPRLRTIVQKMPMKLTVNSLKHANDSSSSTEIGSKANSIKQRKPKLLLPPTESGSESSITILKGEILLLECFAEGLPTPQVDWNKIGGDLPKGREAKENYGKTLKIENVSYQDKGNYRCTASNFLGTATHDFHVIVEEPPRWTKKPQSAVYSTGSNGILLCEAEGEPQPTIKWRVNGSPVDNHPFAGDVVFPREISFTNLQPNHTAVYQCEASNVHGTILANANIDVVDVRPLIQTKDGENYATVVGYSAFLHCEFFASPEAVVSWQKVEEVKPLEGRRYHIYENGTLQINRTTEEDAGSYSCWVENAIGKTAVTANLDIRNATKLRVSPKNPRIPKLHMLELHCESKCDSHLKHSLKLSWSKDGEAFEINGTEDGRIIIDGANLTISNVTLEDQGIYCCSAHTALDSAADITQVTVLDVPDPPENLHLSERQNRSVRLTWEAGADHNSNISEYIVEFEGNKEEPGRWEELTRVQGKKTTVILPLAPFVRYQFRVIAVNEVGRSQPSQPSDHHETPPAAPDRNPQNIRVQASQPKEMIIKWEPLKSMEQNGPGLEYRVTWKPQGAPVEWEEETVTNHTLRVMTPAVYAPYDVKVQAINQLGSGPDPQSVTLYSGEDYPDTAPVIHGVDVINSTLVKVTWSTVPKDRVHGRLKGYQINWWKTKSLLDGRTHPKEVNILRFSGQRNSGMVPSLDAFSEFHLTVLAYNSKGAGPESEPYIFQTPEGVPEQPTFLKVIKVDKDTATLSWGLPKKLNGNLTGYLLQYQIINDTYEIGELNDINITTPSKPSWHLSNLNATTKYKFYLRACTSQGCGKPITEESSTLGEGSKGIGKISGVNLTQKTHPVEVFEPGAEHIVRLMTKNWGDNDSIFQDVIETRGREYAGLYDDISTQGWFIGLMCAIALLTLLLLTVCFVKRNRGGKYSVKEKEDLHPDPEIQSVKDETFGEYSDSDEKPLKGSLRSLNRDMQPTESADSLVEYGEGDHGLFSEDGSFIGAYAGSKEKGSVESNGSSTATFPLRA

SEQ ID NO: 5944 - protein, 2852 aa, Homo sapiens
MALGKVLAMALVLALAVLGSLSPGARAGDCKGQRQVLREAPGFVTDGAGNYSVNGNCEWLIEAPSPQHRILLDFLFLDTECTYDYLFVYDGDSPRGPLLASLSGSTRPPPIEASSGKMLLHLFSDANYNLLGFNASFRFSLCPGGCQSHGQCQPPGVCACEPGWGGPDCGLQECSAYCGSHGTCASPLGPCRCEPGFLGRACDLHLWENQGAGWWHNVSARDPAFSARIGAAGAFLSPPGLLAVFGGQDLNNALGDLVLYNFSANTWESWDLSPAPAARHSHVAVAWAGSLVLMGGELADGSLTNDVWAFSPLGRGHWELLAPPASSSSGPPGLAGHAAALVDDVWLYVSGGRTPHDLFSSGLFRFRLDSTSGGYWEQVIPAGGRPPAATGHSMVFHAPSRALLVHGGHRPSTARFSVRVNSTELFHVDRHVWTTLKGRDGLQGPRERAFHTASVLGNYMVVYGGNVHTHYQEEKCYEDGIFFYHLGCHQWVSGAELAPPGTPEGRAAPPSGRYSHVAAVLGGSVLLVAGGYSGRPRGDLMAYKVPPFVFQAPAPDYHLDYCSMYTDHSVCSRDPECSWCQGACQAAPPPGTPLGACPAASCLGLGRLLGDCQACLAFSSPTAPPRGPGTLGWCVHNESCLPRPEQARCRGEQISGTVGWWGPAPVFVTSLEACVTQSFLPGLHLLTFQQPPNTSQPDKVSIVRSTTITLTPSAETDVSLVYRGFIYPMLPGGPGGPGAEDVAVWTRAQRLHVLARMARGPDTENMEEVGRWVAHQEKETRRLQRPGSARLFPLPGRDHKYAVEIQGQLNGSAGPGHSELTLLWDRTGVPGGSEISFFFLEPYRSSSCTSYSSCLGCLADQGCGWCLTSATCHLRQGGAHCGDDGAGGSLLVLVPTLCPLCEEHRDCHACTQDPFCEWHQSTSRKGDAACSRRGRGRGALKSPEECPPLCSQRLTCEDCLANSSQCAWCQSTHTCFLFAAYLARYPHGGCRGWDDSVHSEPRCRSCDGFLTCHECLQSHECGWCGNEDNPTLGRCLQGDFSGPLGGGNCSLWVGEGLGLPVALPARWAYARCPDVDECRLGLARCHPRATCLNTPLSYECHCQRGYQGDGISHCNRTCLEDCGHGVCSGPPDFTCVCDLGWTSDLPPPTPAPGPPAPRCSRDCGCSFHSHCRKRGPGFCDECQDWTWGEHCERCRPGSFGNATGSRGCRPCQCNGHGDPRRGHCDNLSGLCFCQDHTEGAHCQLCSPGYYGDPRAGGSCFRECGGRALLTNVSSVALGSRRVGGLLPPGGGAARAGPGLSYCVWVVSATEELQPCAPGTLCPPLTLTFSPDSSTPCTLSYVLAFDGFPRFLDTGVVQSDRSLIAAFCGQRRDRPLTVQALSGLLVLHWEANGSSSWGFNASVGSARCGSGGPGSCPVPQECVPQDGAAGAGLCRCPQGWAGPHCRMALCPENCNAHTGAGTCNQSLGVCICAEGFGGPDCATKLDGGQLVWETLMDSRLSADTASRFLHRLGHTMVDGPDATLWMFGGLGLPQGLLGNLYRYSVSERRWTQMLAGAEDGGPGPSPRSFHAAAYVPAGRGAMYLLGGLTAGGVTRDFWVLNLTTLQWRQEKAPQTVELPAVAGHTLTARRGLSLLLVGGYSPENGFNQQLLEYQLATGTWVSGAQSGTPPTGLYGHSAVYHEATDSLYVFGGFRFHVELAAPSPELYSLHCPDRTWSLLAPSQGAKRDRMRNVRGSSRGLGQVPGEQPGSWGFREVRKKMALWAALAGTGGFLEEISPHLKEPRPRLFHASALLGDTMVVLGGRSDPDEFSSDVLLYQVNCNAWLLPDLTRSASVGPPMEESVAHAVAAVGSRLYISGGFGGVALGRLLALTLPPDPCRLLSSPEACNQSGACTWCHGACLSGDQAHRLGCGGSPCSPMPRSPEECRRLRTCSECLARHPRTLQPGDGEASTPRCKWCTNCPEGACIGRNGSCTSENDCRINQREVFWAGNCSEAACGAADCEQCTREGKCMWTRQFKRTGETRRILSVQPTYDWTCFSHSLLNVSPMPVESSPPLPCPTPCHLLPNCTSCLDSKGADGGWQHCVWSSSLQQCLSPSYLPLRCMAGGCGRLLRGPESCSLGCAQATQCALCLRRPHCGWCAWGGQDGGGRCMEGGLSGPRDGLTCGRPGASWAFLSCPPEDECANGHHDCNETQNCHDQPHGYECSCKTGYTMDNMTGLCRPVCAQGCVNGSCVEPDHCRCHFGFVGRNCSTECRCNRHSECAGVGARDHCLLCRNHTKGSHCEQCLPLFVGSAVGGGTCRPCHAFCRGNSHICISRKELQMSKGEPKKYSLDPEEIENWVTEGPSEDEAVCVNCQNNSYGEKCESCLQGYFLLDGKCTKCQCNGHADTCNEQDGTGCPCQNNTETGTCQGSSPSDRRDCYKYQVRLQKLVCAKCRESFHGSPLGGQQCYRLISVEQECCLDPTSQTNCFHEPKRRALGPGRTVLFGVQPKFTNVDIRLTLDVTFGAVDLYVSTSYDTFVVRVAPDTGVHTVHIQPPPAPPPPPPPADGGPRGAGDPGGAGASSGPGAPAEPRVREVWPRGLITYVTVTEPSAVLVVRGVRDRLVITYPHEHHALKSSRFYLLLLGVGDPSGPGANGSADSQGLLFFRQDQAHIDLFVFFSVFFSCFFLFLSLCVLLWKAKQALDQRQEQRRHLQEMTKMASRPFAKVTVCFPPDPTAPASAWKPAGLPPPAFRRSEPFLAPLLLTGAGGPWGPMGGGCCPPAIPATTAGLRAGPITLEPTEDGMAGVATLLLQLPGGPHAPNGACLGSALVTLRHRLHEYCGGGGGAGGSGHGTGAGRKGLLSQDNLTSMSL

SEQ ID NO: 5945 - protein, 743 aa, Homo sapiens
MEAVAVAAAVGVLLLAGAGGAAGDEAREAAAVRALVARLLGPGPAADFSVSVERALAAKPGLDTYSLGGGGAARVRVRGSTGVAAAAGLHRYLRDFCGCHVAWSGSQLRLPRPLPAVPGELTEATPNRYRYYQNVCTQSYSFVWWDWARWEREIDWMALNGINLALAWSGQEAIWQRVYLALGLTQAEINEFFTGPAFLAWGRMGNLHTWDGPLPPSWHIKQLYLQHRVLDQMRSFGMTPVLPAFAGHVPEAVTRVFPQVNVTKMGSWGHFNCSYSCSFLLAPEDPIFPIIGSLFLRELIKEFGTDHIYGADTFNEMQPPSSEPSYLAAATTAVYEAMTAVDTEAVWLLQGWLFQHQPQFWGPAQIRAVLGAVPRGRLLVLDLFAESQPVYTRTASFQGQPFIWCMLHNFGGNHGLFGALEAVNGGPEAARLFPNSTMVGTGMAPEGISQNEVVYSLMAELGWRKDPVPDLAAWVTSFAARRYGVSHPDAGAAWRLLLRSVYNCSGEACRGHNRSPLVRRPSLQMNTSIWYNRSDVFEAWRLLLTSAPSLATSPAFRYDLLDLTRQAVQELVSLYYEEARSAYLSKELASLLRAGGVLAYELLPALDEVLASDSRFLLGSWLEQARAAAVSEAEADFYEQNSRYQLTLWGPEGNILDYANKQLAGLVANYYTPRWRLFLEALVDSVAQGIPFQQHQFDKNVFQLEQAFVLSKQRYPSQPRGDTVDLAKKIFLKYYPGWVAGSW

SEQ ID NO: 5946 - protein, 2377 aa, Homo sapiens
MTTLLWVFVTLRVITAAVTVETSDHDNSLSVSIPQPSPLRVLLGTSLTIPCYFIDPMHPVTTAPSTAPLAPRIKWSRVSKEKEVVLLVATEGRVRVNSAYQDKVSLPNYPAIPSDATLEVQSLRSNDSGVYRCEVMHGIEDSEATLEVVVKGIVFHYRAISTRYTLDFDRAQRACLQNSAIIATPEQLQAAYEDGFHQCDAGWLADQTVRYPIHTPREGCYGDKDEFPGVRTYGIRDTNETYDVYCFAEEMEGEVFYATSPEKFTFQEAANECRRLGARLATTGHVYLAWQAGMDMCSAGWLADRSVRYPISKARPNCGGNLLGVRTVYVHANQTGYPDPSSRYDAICYTGEDFVDIPENFFGVGGEEDITVQTVTWPDMELPLPRNITEGEARGSVILTVKPIFEVSPSPLEPEEPFTFAPEIGATAFAEVENETGEATRPWGFPTPGLGPATAFTSEDLVVQVTAVPGQPHLPGGVVFHYRPGPTRYSLTFEEAQQACPGTGAVIASPEQLQAAYEAGYEQCDAGWLRDQTVRYPIVSPRTPCVGDKDSSPGVRTYGVRPSTETYDVYCFVDRLEGEVFFATRLEQFTFQEALEFCESHNATATTGQLYAAWSRGLDKCYAGWLADGSLRYPIVTPRPACGGDKPGVRTVYLYPNQTGLPDPLSRHHAFCFRGISAVPSPGEEEGGTPTSPSGVEEWIVTQVVPGVAAVPVEEETTAVPSGETTAILEFTTEPENQTEWEPAYTPVGTSPLPGILPTWPPTGAETEESTEGPSATEVPSASEEPSPSEVPFPSEEPSPSEEPFPSVRPFPSVELFPSEEPFPSKEPSPSEEPSASEEPYTPSPPEPSWTELPSSGEESGAPDVSGDFTGSGDVSGHLDFSGQLSGDRASGLPSGDLDSSGLTSTVGSGLTVESGLPSGDEERIEWPSTPTVGELPSGAEILEGSASGVGDLSGLPSGEVLETSASGVGDLSGLPSGEVLETTAPGVEDISGLPSGEVLETTAPGVEDISGLPSGEVLETTAPGVEDISGLPSGEVLETTAPGVEDISGLPSGEVLETTAPGVEDISGLPSGEVLETAAPGVEDISGLPSGEVLETAAPGVEDISGLPSGEVLETAAPGVEDISGLPSGEVLETAAPGVEDISGLPSGEVLETAAPGVEDISGLPSGEVLETAAPGVEDISGLPSGEVLETAAPGVEDISGLPSGEVLETAAPGVEDISGLPSGEVLETAAPGVEDISGLPSGEVLETAAPGVEDISGLPSGEVLETAAPGVEDISGLPSGEVLETTAPGVEEISGLPSGEVLETTAPGVDEISGLPSGEVLETTAPGVEEISGLPSGEVLETSTSAVGDLSGLPSGGEVLEISVSGVEDISGLPSGEVVETSASGIEDVSELPSGEGLETSASGVEDLSRLPSGEEVLEISASGFGDLSGVPSGGEGLETSASEVGTDLSGLPSGREGLETSASGAEDLSGLPSGKEDLVGSASGDLDLGKLPSGTLGSGQAPETSGLPSGFSGEYSGVDLGSGPPSGLPDFSGLPSGFPTVSLVDSTLVEVVTASTASELEGRGTIGISGAGEISGLPSSELDISGRASGLPSGTELSGQASGSPDVSGEIPGLFGVSGQPSGFPDTSGETSGVTELSGLSSGQPGVSGEASGVLYGTSQPFGITDLSGETSGVPDLSGQPSGLPGFSGATSGVPDLVSGTTSGSGESSGITFVDTSLVEVAPTTFKEEEGLGSVELSGLPSGEADLSGKSGMVDVSGQFSGTVDSSGFTSQTPEFSGLPSGIAEVSGESSRAEIGSSLPSGAYYGSGTPSSFPTVSLVDRTLVESVTQAPTAQEAGEGPSGILELSGAHSGAPDMSGEHSGFLDLSGLQSGLIEPSGEPPGTPYFSGDFASTTNVSGESSVAMGTSGEASGLPEVTLITSEFVEGVTEPTISQELGQRPPVTHTPQLFESSGKVSTAGDISGATPVLPGSGVEVSSVPESSSETSAYPEAGFGASAAPEASREDSGSPDLSETTSAFHEANLERSSGLGVSGSTLTFQEGEASAAPEVSGESTTTSDVGTEAPGLPSATPTASGDRTEISGDLSGHTSQLGVVISTSIPESEWTQQTQRPAETHLEIESSSLLYSGEETHTVETATSPTDASIPASPEWKRESESTAADQEVCEEGWNKYQGHCYRHFPDRETWVDAERRCREQQSHLSSIVTPEEQEFVNNNAQDYQWIGLNDRTIEGDFRWSDGHPMQFENWRPNQPDNFFAAGEDCVVMIWHEKGEWNDVPCNYHLPFTCKKGTVACGEPPVVEHARTFGQKKDRYEINSLVRYQCTEGFVQRHMPTIRCQPSGHWEEPRITCTDATTYKRRLQKRSSRHPRRSRPSTAH

SEQ ID NO: 5947 - protein, 2415 aa, Homo sapiens
MTTLLWVFVTLRVITAAVTVETSDHDNSLSVSIPQPSPLRVLLGTSLTIPCYFIDPMHPVTTAPSTAPLAPRIKWSRVSKEKEVVLLVATEGRVRVNSAYQDKVSLPNYPAIPSDATLEVQSLRSNDSGVYRCEVMHGIEDSEATLEVVVKGIVFHYRAISTRYTLDFDRAQRACLQNSAIIATPEQLQAAYEDGFHQCDAGWLADQTVRYPIHTPREGCYGDKDEFPGVRTYGIRDTNETYDVYCFAEEMEGEVFYATSPEKFTFQEAANECRRLGARLATTGHVYLAWQAGMDMCSAGWLADRSVRYPISKARPNCGGNLLGVRTVYVHANQTGYPDPSSRYDAICYTGEDFVDIPENFFGVGGEEDITVQTVTWPDMELPLPRNITEGEARGSVILTVKPIFEVSPSPLEPEEPFTFAPEIGATAFAEVENETGEATRPWGFPTPGLGPATAFTSEDLVVQVTAVPGQPHLPGGVVFHYRPGPTRYSLTFEEAQQACPGTGAVIASPEQLQAAYEAGYEQCDAGWLRDQTVRYPIVSPRTPCVGDKDSSPGVRTYGVRPSTETYDVYCFVDRLEGEVFFATRLEQFTFQEALEFCESHNATATTGQLYAAWSRGLDKCYAGWLADGSLRYPIVTPRPACGGDKPGVRTVYLYPNQTGLPDPLSRHHAFCFRGISAVPSPGEEEGGTPTSPSGVEEWIVTQVVPGVAAVPVEEETTAVPSGETTAILEFTTEPENQTEWEPAYTPVGTSPLPGILPTWPPTGAETEESTEGPSATEVPSASEEPSPSEVPFPSEEPSPSEEPFPSVRPFPSVELFPSEEPFPSKEPSPSEEPSASEEPYTPSPPEPSWTELPSSGEESGAPDVSGDFTGSGDVSGHLDFSGQLSGDRASGLPSGDLDSSGLTSTVGSGLTVESGLPSGDEERIEWPSTPTVGELPSGAEILEGSASGVGDLSGLPSGEVLETSASGVGDLSGLPSGEVLETTAPGVEDISGLPSGEVLETTAPGVEDISGLPSGEVLETTAPGVEDISGLPSGEVLETTAPGVEDISGLPSGEVLETTAPGVEDISGLPSGEVLETAAPGVEDISGLPSGEVLETAAPGVEDISGLPSGEVLETAAPGVEDISGLPSGEVLETAAPGVEDISGLPSGEVLETAAPGVEDISGLPSGEVLETAAPGVEDISGLPSGEVLETAAPGVEDISGLPSGEVLETAAPGVEDISGLPSGEVLETAAPGVEDISGLPSGEVLETAAPGVEDISGLPSGEVLETAAPGVEDISGLPSGEVLETTAPGVEEISGLPSGEVLETTAPGVDEISGLPSGEVLETTAPGVEEISGLPSGEVLETSTSAVGDLSGLPSGGEVLEISVSGVEDISGLPSGEVVETSASGIEDVSELPSGEGLETSASGVEDLSRLPSGEEVLEISASGFGDLSGVPSGGEGLETSASEVGTDLSGLPSGREGLETSASGAEDLSGLPSGKEDLVGSASGDLDLGKLPSGTLGSGQAPETSGLPSGFSGEYSGVDLGSGPPSGLPDFSGLPSGFPTVSLVDSTLVEVVTASTASELEGRGTIGISGAGEISGLPSSELDISGRASGLPSGTELSGQASGSPDVSGEIPGLFGVSGQPSGFPDTSGETSGVTELSGLSSGQPGVSGEASGVLYGTSQPFGITDLSGETSGVPDLSGQPSGLPGFSGATSGVPDLVSGTTSGSGESSGITFVDTSLVEVAPTTFKEEEGLGSVELSGLPSGEADLSGKSGMVDVSGQFSGTVDSSGFTSQTPEFSGLPSGIAEVSGESSRAEIGSSLPSGAYYGSGTPSSFPTVSLVDRTLVESVTQAPTAQEAGEGPSGILELSGAHSGAPDMSGEHSGFLDLSGLQSGLIEPSGEPPGTPYFSGDFASTTNVSGESSVAMGTSGEASGLPEVTLITSEFVEGVTEPTISQELGQRPPVTHTPQLFESSGKVSTAGDVSGATPVLPGSGVEVSSVPESSSETSAYPEAGFGASAAPEASREDSGSPDLSETTSAFHEANLERSSGLGVSGSTLTFQEGEASAAPEVSGESTTTSDVGTEAPGLASATPTASGDRTEISGDLSGHTSQLGVVISTSIPESEWTQQTQRPAETHLEIESSSLLYSGEETHTVETATSPTDASIPASPEWKRESESTAAAPARSCAEEPCGAGTCKETEGHVICLCPPGYTGEHCNIDQEVCEEGWNKYQGHCYRHFPDRETWVDAERRCREQQSHLSSIVTPEEQEFVNNNAQDYQWIGLNDRTIEGDFRWSDGHPMQFENWRPNQPDNFFAAGEDCVVMIWHEKGEWNDVPCNYHLPFTCKKGTVACGEPPVVEHARTFGQKKDRYEINSLVRYQCTEGFVQRHMPTIRCQPSGHWEEPRITCTDPTTYKRRLQKRSSRHPRRSRPSTAH

SEQ ID NO: 5948 - protein, 2415 aa, Homo sapiens
MTTLLWVFVTLRVITAAVTVETSDHDNSLSVSIPQPSPLRVLLGTSLTIPCYFIDPMHPVTTAPSTAPLAPRIKWSRVSKEKEVVLLVATEGRVRVNSAYQDKVSLPNYPAIPSDATLEVQSLRSNDSGVYRCEVMHGIEDSEATLEVVVKGIVFHYRAISTRYTLDFDRAQRACLQNSAIIATPEQLQAAYEDGFHQCDAGWLADQTVRYPIHTPREGCYGDKDEFPGVRTYGIRDTNETYDVYCFAEEMEGEVFYATSPEKFTFQEAANECRRLGARLATTGHVYLAWQAGMDMCSAGWLADRSVRYPISKARPNCGGNLLGVRTVYVHANQTGYPDPSSRYDAICYTGEDFVDIPENFFGVGGEEDITVQTVTWPDMELPLPRNITEGEARGSVILTVKPIFEVSPSPLEPEEPFTFAPEIGATAFAEVENETGEATRPWGFPTPGLGPATAFTSEDLVVQVTAVPGQPHLPGGVVFHYRPGPTRYSLTFEEAQQACPGTGAVIASPEQLQAAYEAGYEQCDAGWLRDQTVRYPIVSPRTPCVGDKDSSPGVRTYGVRPSTETYDVYCFVDRLEGEVFFATRLEQFTFQEALEFCESHNATATTGQLYAAWSRGLDKCYAGWLADGSLRYPIVTPRPACGGDKPGVRTVYLYPNQTGLPDPLSRHHAFCFRGISAVPSPGEEEGGTPTSPSGVEEWIVTQVVPGVAAVPVEEETTAVPSGETTAILEFTTEPENQTEWEPAYTPVGTSPLPGILPTWPPTGAETEESTEGPSATEVPSASEEPSPSEVPFPSEEPSPSEEPFPSVRPFPSVELFPSEEPFPSKEPSPSEEPSASEEPYTPSPPEPSWTELPSSGEESGAPDVSGDFTGSGDVSGHLDFSGQLSGDRASGLPSGDLDSSGLTSTVGSGLTVESGLPSGDEERIEWPSTPTVGELPSGAEILEGSASGVGDLSGLPSGEVLETSASGVGDLSGLPSGEVLETTAPGVEDISGLPSGEVLETTAPGVEDISGLPSGEVLETTAPGVEDISGLPSGEVLETTAPGVEDISGLPSGEVLETTAPGVEDISGLPSGEVLETAAPGVEDISGLPSGEVLETAAPGVEDISGLPSGEVLETAAPGVEDISGLPSGEVLETAAPGVEDISGLPSGEVLETAAPGVEDISGLPSGEVLETAAPGVEDISGLPSGEVLETAAPGVEDISGLPSGEVLETAAPGVEDISGLPSGEVLETAAPGVEDISGLPSGEVLETAAPGVEDISGLPSGEVLETAAPGVEDISGLPSGEVLETTAPGVEEISGLPSGEVLETTAPGVDEISGLPSGEVLETTAPGVEEISGLPSGEVLETSTSAVGDLSGLPSGGEVLEISVSGVEDISGLPSGEVVETSASGIEDVSELPSGEGLETSASGVEDLSRLPSGEEVLEISASGFGDLSGVPSGGEGLETSASEVGTDLSGLPSGREGLETSASGAEDLSGLPSGKEDLVGSASGDLDLGKLPSGTLGSGQAPETSGLPSGFSGEYSGVDLGSGPPSGLPDFSGLPSGFPTVSLVDSTLVEVVTASTASELEGRGTIGISGAGEISGLPSSELDISGRASGLPSGTELSGQASGSPDVSGEIPGLFGVSGQPSGFPDTSGETSGVTELSGLSSGQPGVSGEASGVLYGTSQPFGITDLSGETSGVPDLSGQPSGLPGFSGATSGVPDLVSGTTSGSGESSGITFVDTSLVEVAPTTFKEEEGLGSVELSGLPSGEADLSGKSGMVDVSGQFSGTVDSSGFTSQTPEFSGLPSGIAEVSGESSRAEIGSSLPSGAYYGSGTPSSFPTVSLVDRTLVESVTQAPTAQEAGEGPSGILELSGAHSGAPDMSGEHSGFLDLSGLQSGLIEPSGEPPGTPYFSGDFASTTNVSGESSVAMGTSGEASGLPEVTLITSEFVEGVTEPTISQELGQRPPVTHTPQLFESSGKVSTAGDISGATPVLPGSGVEVSSVPESSSETSAYPEAGFGASAAPEASREDSGSPDLSETTSAFHEANLERSSGLGVSGSTLTFQEGEASAAPEVSGESTTTSDVGTEAPGLPSATPTASGDRTEISGDLSGHTSQLGVVISTSIPESEWTQQTQRPAETHLEIESSSLLYSGEETHTVETATSPTDASIPASPEWKRESESTAAAPARSCAEEPCGAGTCKETEGHVICLCPPGYTGEHCNIDQEVCEEGWNKYQGHCYRHFPDRETWVDAERRCREQQSHLSSIVTPEEQEFVNNNAQDYQWIGLNDRTIEGDFRWSDGHPMQFENWRPNQPDNFFAAGEDCVVMIWHEKGEWNDVPCNYHLPFTCKKGTVACGEPPVVEHARTFGQKKDRYEINSLVRYQCTEGFVQRHMPTIRCQPSGHWEEPRITCTDATTYKRRLQKRSSRHPRRSRPSTAH

SEQ ID NO: 5949 - protein, 2316 aa, Homo sapiens
MTTLLWVFVTLRVITAAVTVETSDHDNSLSVSIPQPSPLRVLLGTSLTIPCYFIDPMHPVTTAPSTAPLAPRIKWSRVSKEKEVVLLVATEGRVRVNSAYQDKVSLPNYPAIPSDATLEVQSLRSNDSGVYRCEVMHGIEDSEATLEVVVKGIVFHYRAISTRYTLDFDRAQRACLQNSAIIATPEQLQAAYEDGFHQCDAGWLADQTVRYPIHTPREGCYGDKDEFPGVRTYGIRDTNETYDVYCFAEEMEGEVFYATSPEKFTFQEAANECRRLGARLATTGHVYLAWQAGMDMCSAGWLADRSVRYPISKARPNCGGNLLGVRTVYVHANQTGYPDPSSRYDAICYTGEDFVDIPENFFGVGGEEDITVQTVTWPDMELPLPRNITEGEARGSVILTVKPIFEVSPSPLEPEEPFTFAPEIGATAFAEVENETGEATRPWGFPTPGLGPATAFTSEDLVVQVTAVPGQPHLPGGVVFHYRPGPTRYSLTFEEAQQACPGTGAVIASPEQLQAAYEAGYEQCDAGWLRDQTVRYPIVSPRTPCVGDKDSSPGVRTYGVRPSTETYDVYCFVDRLEGEVFFATRLEQFTFQEALEFCESHNATATTGQLYAAWSRGLDKCYAGWLADGSLRYPIVTPRPACGGDKPGVRTVYLYPNQTGLPDPLSRHHAFCFRGISAVPSPGEEEGGTPTSPSGVEEWIVTQVVPGVAAVPVEEETTAVPSGETTAILEFTTEPENQTEWEPAYTPVGTSPLPGILPTWPPTGAETEESTEGPSATEVPSASEEPSPSEVPFPSEEPSPSEEPFPSVRPFPSVELFPSEEPFPSKEPSPSEEPSASEEPYTPSPPEPSWTELPSSGEESGAPDVSGDFTGSGDVSGHLDFSGQLSGDRASGLPSGDLDSSGLTSTVGSGLTVESGLPSGDEERIEWPSTPTVGELPSGAEILEGSASGVGDLSGLPSGEVLETSASGVGDLSGLPSGEVLETTAPGVEDISGLPSGEVLETTAPGVEDISGLPSGEVLETTAPGVEDISGLPSGEVLETTAPGVEDISGLPSGEVLETTAPGVEDISGLPSGEVLETAAPGVEDISGLPSGEVLETAAPGVEDISGLPSGEVLETAAPGVEDISGLPSGEVLETAAPGVEDISGLPSGEVLETAAPGVEDISGLPSGEVLETAAPGVEDISGLPSGEVLETAAPGVEDISGLPSGEVLETAAPGVEDISGLPSGEVLETAAPGVEDISGLPSGEVLETAAPGVEDISGLPSGEVLETAAPGVEDISGLPSGEVLETTAPGVEEISGLPSGEVLETTAPGVDEISGLPSGEVLETTAPGVEEISGLPSGEVLETSTSAVGDLSGLPSGGEVLEISVSGVEDISGLPSGEVVETSASGIEDVSELPSGEGLETSASGVEDLSRLPSGEEVLEISASGFGDLSGVPSGGEGLETSASEVGTDLSGLPSGREGLETSASGAEDLSGLPSGKEDLVGSASGDLDLGKLPSGTLGSGQAPETSGLPSGFSGEYSGVDLGSGPPSGLPDFSGLPSGFPTVSLVDSTLVEVVTASTASELEGRGTIGISGAGEISGLPSSELDISGRASGLPSGTELSGQASGSPDVSGEIPGLFGVSGQPSGFPDTSGETSGVTELSGLSSGQPGVSGEASGVLYGTSQPFGITDLSGETSGVPDLSGQPSGLPGFSGATSGVPDLVSGTTSGSGESSGITFVDTSLVEVAPTTFKEEEGLGSVELSGLPSGEADLSGKSGMVDVSGQFSGTVDSSGFTSQTPEFSGLPSGIAEVSGESSRAEIGSSLPSGAYYGSGTPSSFPTVSLVDRTLVESVTQAPTAQEAGEGPSGILELSGAHSGAPDMSGEHSGFLDLSGLQSGLIEPSGEPPGTPYFSGDFASTTNVSGESSVAMGTSGEASGLPEVTLITSEFVEGVTEPTISQELGQRPPVTHTPQLFESSGKVSTAGDISGATPVLPGSGVEVSSVPESSSETSAYPEAGFGASAAPEASREDSGSPDLSETTSAFHEANLERSSGLGVSGSTLTFQEGEASAAPEVSGESTTTSDVGTEAPGLPSATPTASGDRTEISGDLSGHTSQLGVVISTSIPESEWTQQTQRPAETHLEIESSSLLYSGEETHTVETATSPTDASIPASPEWKRESESTAADQEVCEEGWNKYQGHCYRHFPDRETWVDAERRCREQQSHLSSIVTPEEQEFVNNNAQDYQWIGLNDRTIEGDFRWSDGHPMQFENWRPNQPDNFFAAGEDCVVMIWHEKGEWNDVPCNYHLPFTCKKGTATTYKRRLQKRSSRHPRRSRPSTAH

SEQ ID NO: 5950 - protein, 979 aa, Homo sapiens
MALFAVFQTTFFLTLLSLRTYQSEVLAERLPLTPVSLKVSTNSTRQSLHLQWTVHNLPYHQELKMVFQIQISRIETSNVIWVGNYSTTVKWNQVLHWSWESELPLECATHFVRIKSLVDDAKFPEPNFWSNWSSWEEVSVQDSTGQDILFVFPKDKLVEEGTNVTICYVSRNIQNNVSCYLEGKQIHGEQLDPHVTAFNLNSVPFIRNKGTNIYCEASQGNVSEGMKGIVLFVSKVLEEPKDFSCETEDFKTLHCTWDPGTDTALGWSKQPSQSYTLFESFSGEKKLCTHKNWCNWQITQDSQETYNFTLIAENYLRKRSVNILFNLTHRVYLMNPFSVNFENVNATNAIMTWKVHSIRNNFTYLCQIELHGEGKMMQYNVSIKVNGEYFLSELEPATEYMARVRCADASHFWKWSEWSGQNFTTLEAAPSEAPDVWRIVSLEPGNHTVTLFWKPLSKLHANGKILFYNVVVENLDKPSSSELHSIPAPANSTKLILDRCSYQICVIANNSVGASPASVIVISADPENKEVEEERIAGTEGGFSLSWKPQPGDVIGYVVDWCDHTQDVLGDFQWKNVGPNTTSTVISTDAFRPGVRYDFRIYGLSTKRIACLLEKKTGYSQELAPSDNPHVLVDTLTSHSFTLSWKDYSTESQPGFIQGYHVYLKSKARQCHPRFEKAVLSDGSECCKYKIDNPEEKALIVDNLKPESFYEFFITPFTSAGEGPSATFTKVTTPDEHSSMLIHILLPMVFCVLLIMVMCYLKSQWIKETCYPDIPDPYKSSILSLIKFKENPHLIIMNVSDCIPDAIEVVSKPEGTKIQFLGTRKSLTETELTKPNYLYLLPTEKNHSGPGPCICFENLTYNQAASDSGSCGHVPVSPKAPSMLGLMTSPENVLKALEKNYMNSLGEIPAGETSLNYVSQLASPMFGDKDSLPTNPVEAPHCSEYKMQMAVSLRLALPPPTENSSLSSITLLDPGEHYC

SEQ ID NO: 5951 - protein, 352 aa, Homo sapiens
MARMGLAGAAGRWWGLALGLTAFFLPGVHSQVVQVNDSMYGFIGTDVVLHCSFANPLPSVKITQVTWQKSTNGSKQNVAIYNPSMGVSVLAPYRERVEFLRPSFTDGTIRLSRLELEDEGVYICEFATFPTGNRESQLNLTVMAKPTNWIEGTQAVLRAKKGQDDKVLVATCTSANGKPPSVVSWETRLKGEAEYQEIRNPNGTVTVISRYRLVPSREAHQQSLACIVNYHMDRFKESLTLNVQYEPEVTIEGFDGNWYLQRMDVKLTCKADANPPATEYHWTTLNGSLPKGVEAQNRTLFFKGPINYSLAGTYICEATNPIGTRSGQVEVNITAFCQLIYPGKGRTRARMF

SEQ ID NO: 5952 - protein, 308 aa, Homo sapiens
MNSKRMLLLVLFAFSLMLVERYFRNHQVEELRLSDWFHPRKRPDVITKTDWLAPVLWEGTFDRRVLEKHYRRRNITVGLAVFATGRFAEEYLRPFLHSANKHFMTGYRVIFYIMVDAFFKLPDIEPSPLRTFKAFKVGTERWWLDGPLVHVKSLGEHIASHIQDEVDFLFSMAANQVFQNEFGVETLGPLVAQLHAWWYFRNTKNFPYERRPTSAACIPFGQGDFYYGNLMVGGTPHNILDFIKEYLNGVIHDIKNGLNSTYEKHLNKYFYLNKPTKLLSPAYSWDLAFSPPPQIQYVKVAHDSQRKL

SEQ ID NO: 5953 - protein, 1404 aa, Homo sapiens
MAWKTLPIYLLLLLSVFVIQQVSSQDLSSCAGRCGEGYSRDATCNCDYNCQHYMECCPDFKRVCTAELSCKGRCFESFERGRECDCDAQCKKYDKCCPDYESFCAEVHNPTSPPSSKKAPPPSGASQTIKSTTKRSPKPPNKKKTKKVIESEEITEEHSVSENQESSSSSSSSSSSSTIWKIKSSKNSAANRELQKKLKVKDNKKNRTKKKPTPKPPVVDEAGSGLDNGDFKVTTPDTSTTQHNKVSTSPKITTAKPINPRPSLPPNSDTSKETSLTVNKETTVETKETTTTNKQTSTDGKEKTTSAKETQSIEKTSAKDLAPTSKVLAKPTPKAETTTKGPALTTPKEPTPTTPKEPASTTPKEPTPTTIKSAPTTPKEPAPTTTKSAPTTPKEPAPTTTKEPAPTTPKEPAPTTTKEPAPTTTKSAPTTPKEPAPTTPKKPAPTTPKEPAPTTPKEPTPTTPKEPAPTTKEPAPTTPKEPAPTAPKKPAPTTPKEPAPTTPKEPAPTTTKEPSPTTPKEPAPTTTKSAPTTTKEPAPTTTKSAPTTPKEPSPTTTKEPAPTTPKEPAPTTPKKPAPTTPKEPAPTTPKEPAPTTTKKPAPTAPKEPAPTTPKETAPTTPKKLTPTTPEKLAPTTPEKPAPTTPEELAPTTPEEPTPTTPEEPAPTTPKAAAPNTPKEPAPTTPKEPAPTTPKEPAPTTPKETAPTTPKGTAPTTLKEPAPTTPKKPAPKELAPTTTKEPTSTTSDKPAPTTPKGTAPTTPKEPAPTTPKEPAPTTPKGTAPTTLKEPAPTTPKKPAPKELAPTTTKGPTSTTSDKPAPTTPKETAPTTPKEPAPTTPKKPAPTTPETPPPTTSEVSTPTTTKEPTTIHKSPDESTPELSAEPTPKALENSPKEPGVPTTKTPAATKPEMTTTAKDKTTERDLRTTPETTTAAPKMTKETATTTEKTTESKITATTTQVTSTTTQDTTPFKITTLKTTTLAPKVTTTKKTITTTEIMNKPEETAKPKDRATNSKATTPKPQKPTKAPKKPTSTKKPKTMPRVRKPKTTPTPRKMTSTMPELNPTSRIAEAMLQTTTRPNQTPNSKLVEVNPKSEDAGGAEGETPHMLLRPHVFMPEVTPDMDYLPRVPNQGIIINPMLSDETNICNGKPVDGLTTLRNGTLVAFRGHYFWMLSPFSPPSPARRITEVWGIPSPIDTVFTRCNCEGKTFFFKDSQYWRFTNDIKDAGYPKPIFKGFGGLTGQIVAALSTAKYKNWPESVYFFKRGGSIQQYIYKQEPVQKCPGRRPALNYPVYGEMTQVRRRRFERAIGPSQTHTIRIQYSPARLAYQDKGVLHNEVKVSILWRGLPNVVTSAISLPNIRKPDGYDYYAFSKDQYYNIDVPSRTARAITTRSGQTLSKVWYNCP

SEQ ID NO: 5954 - protein, 708 aa, Homo sapiens
MRERIWAPPLLLLLPLLLPPPLWGGPPDSPRRELELEPGPLQPFDLLYASGAAAYYSGDYERAVRDLEAALRSHRRLREIRTRCARHCAARHPLPPPPPGEGPGAELPLFRSLLGRARCYRSCETQRLGGPASRHRVSEDVRSDFQRRVPYNYLQRAYIKLNQLEKAVEAAHTFFVANPEHMEMQQNIENYRATAGVEALQLVDREAKPHMESYNAGVKHYEADDFEMAIRHFEQALREYFVEDTECRTLCEGPQRFEEYEYLGYKAGLYEAIADHYMQVLVCQHECVRELATRPGRLSPIENFLPLHYDYLQFAYYRVGEYVKALECAKAYLLCHPDDEDVLDNVDYYESLLDDSIDPASIEAREDLTMFVKRHKLESELIKSAAEGLGFSYTEPNYWIRYGGRQDENRVPSGVNVEGAEVHGFSMGKKLSPKIDRDLREGGPLLYENITFVYNSEQLNGTQRVLLDNVLSEEQCRELHSVASGIMLVGDGYRGKTSPHTPNEKFEGATVLKALKSGYEGRVPLKSARLFYDISEKARRIVESYFMLNSTLYFSYTHMVCRTALSGQQDRRNDLSHPIHADNCLLDPEANECWKEPPAYTFRDYSALLYMNDDFEGGEFIFTEMDAKTVTASIKPKCGRMISFSSGGENPHGVKAVTKGKRCAVALWFTLDPLYRELERIQADEVIAILDQEQQGKHELNINPKDEL

SEQ ID NO: 5955 - protein, 4289 aa, Homo sapiens
MMPAQYALTSSLVLLVLLSTARAGPFSSRSNVTLPAPRPPPQPGGHTVGAGVGSPSSQLYEHTVEGGEKQVVFTHRINLPPSTGCGCPPGTEPPVLASEVQALRVRLEILEELVKGLKEQCTGGCCPASAQAGTGQTDVRTLCSLHGVFDLSRCTCSCEPGWGGPTCSDPTDAEIPPSSPPSASGSCPDDCNDQGRCVRGRCVCFPGYTGPSCGWPSCPGDCQGRGRCVQGVCVCRAGFSGPDCSQRSCPRGCSQRGRCEGGRCVCDPGYTGDDCGMRSCPRGCSQRGRCENGRCVCNPGYTGEDCGVRSCPRGCSQRGRCKDGRCVCDPGYTGEDCGTRSCPWDCGEGGRCVDGRCVCWPGYTGEDCSTRTCPRDCRGRGRCEDGECICDTGYSGDDCGVRSCPGDCNQRGRCEDGRCVCWPGYTGTDCGSRACPRDCRGRGRCENGVCVCNAGYSGEDCGVRSCPGDCRGRGRCESGRCMCWPGYTGRDCGTRACPGDCRGRGRCVDGRCVCNPGFTGEDCGSRRCPGDCRGHGLCEDGVCVCDAGYSGEDCSTRSCPGGCRGRGQCLDGRCVCEDGYSGEDCGVRQCPNDCSQHGVCQDGVCICWEGYVSEDCSIRTCPSNCHGRGRCEEGRCLCDPGYTGPTCATRMCPADCRGRGRCVQGVCLCHVGYGGEDCGQEEPPASACPGGCGPRELCRAGQCVCVEGFRGPDCAIQTCPGDCRGRGECHDGSCVCKDGYAGEDCGEARVPSSASAYDQRGLAPGQEYQVTVRALRGTSWGLPASKTITTMIDGPQDLRVVAVTPTTLELGWLRPQAEVDRFVVSYVSAGNQRVRLEVPPEADGTLLTDLMPGVEYVVTVTAERGRAVSYPASVRANTEEREEESPPRPSLSQPPRRPWGNLTAELSRFRGTVQDLERHLRAHGYPLRANQTYTSVARHIHEYLQRQVLGSSADGALLVSLDGLRGQFERVVLRWRPQPPAEGPGGELTVPGTTRTVSLPDLRPGTTYHVEVHGVRAGQTSKSYAFITTTGPSTTQGAQAPLLQQRPQELGELRVLGRDETGRLRVVWTAQPDTFAYFQLRMRVPEGPGAHEEVLPGDVRQALVPPPPPGTPYELSLHGVPPGGKPSDPIIYQGIMDKDEEKPGKSSGPPRLGELTVTDRTSDSLLLRWTVPEGEFDSFVIQYKDRDGQPQVVPVEGPQRSAVITSLDPGRKYKFVLYGFVGKKRHGPLVAEAKILPQSDPSPGTPPHLGNLWVTDPTPDSLHLSWTVPEGQFDTFMVQYRDRDGRPQVVPVEGPERSFVVSSLDPDHKYRFTLFGIANKKRYGPLTADGTTAPERKEEPPRPEFLEQPLLGELTVTGVTPDSLRLSWTVAQGPFDSFMVQYKDAQGQPQAVPVAGDENEVTVPGLDPDRKYKMNLYGLRGRQRVGPESVVAKTAPQEDVDETPSPTELGTEAPESPEEPLLGELTVTGSSPDSLSLFWTVPQGSFDSFTVQYKDRDGRPRAVRVGGKESEVTVGGLEPGHKYKMHLYGLHEGQRVGPVSAVGVTAPQQEETPPATESPLEPRLGELTVTDVTPNSVGLSWTVPEGQFDSFIVQYKDKDGQPQVVPVAADQREVTVYNLEPERKYKMNMYGLHDGQRMGPLSVVIVTAPATEASKPPLEPRLGELTVTDITPDSVGLSWTVPEGEFDSFVVQYKDRDGQPQVVPVAADQREVTIPDLEPSRKYKFLLFGIQDGKRRSPVSVEAKTVARGDASPGAPPRLGELWVTDPTPDSLRLSWTVPEGQFDSFVVQFKDKDGPQVVPVEGHERSVTVTPLDAGRKYRFLLYGLLGKKRHGPLTADGTTEARSAMDDTGTKRPPKPRLGEELQVTTVTQNSVGLSWTVPEGQFDSFVVQYKDRDGQPQVVPVEGSLREVSVPGLDPAHRYKLLLYGLHHGKRVGPISAVAITAGREETETETTAPTPPAPEPHLGELTVEEATSHTLHLSWMVTEGEFDSFEIQYTDRDGQLQMVRIGGDRNDITLSGLESDHRYLVTLYGFSDGKHVGPVHVEALTVPEEEKPSEPPTATPEPPIKPRLGELTVTDATPDSLSLSWTVPEGQFDHFLVQYRNGDGQPKAVRVPGHEEGVTISGLEPDHKYKMNLYGFHGGQRMGPVSVVGVTEPSMEAPEPAEEPLLGELTVTGSSPDSLSLSWTVPQGRFDSFTVQYKDRDGRPQVVRVGGEESEVTVGGLEPGRKYKMHLYGLHEGRRVGPVSAVGVTAPEEESPDAPLAKLRLGQMTVRDITSDSLSLSWTVPEGQFDHFLVQFKNGDGQPKAVRVPGHEDGVTISGLEPDHKYKMNLYGFHGGQRVGPVSAVGLTASTEPPTPEPPIKPRLEELTVTDATPDSLSLSWTVPEGQFDHFLVQYKNGDGQPKATRVPGHEDRVTISGLEPDNKYKMNLYGFHGGQRVGPVSAIGVTEEETPSPTEPSMEAPEPPEEPLLGELTVTGSSPDSLSLSWTVPQGRFDSFTVQYKDRDGRPQVVRVGGEESEVTVGGLEPGRKYKMHLYGLHEGRRVGPVSTVGVTAPQEDVDETPSPTEPGTEAPEPPEEPLLGELTVTGSSPDSLSLSWTVPQGRFDSFTVQYKDRDGRPQAVRVGGQESKVTVRGLEPGRKYKMHLYGLHEGRRLGPVSAVGVTEDEAETTQAVPTMTPEPPIKPRLGELTMTDATPDSLSLSWTVPEGQFDHFLVQYRNGDGQPKAVRVPGHEDGVTISGLEPDHKYKMNLYGFHGGQRVGPISVIGVTEEETPSPTELSTEAREPPEEPLLGELTVTGSSPDSLSLSWTIPQGHFDSFTVQYKDRDGRPQVMRVRGEESEVTVGGLEPGRKYKMHLYGLHEGRRVGPVSTVGVTVPTTTPEPPNKPRLGELTVTDATPDSLSLSWMVPEGQFDHFLVQYRNGDGQPKVVRVPGHEDGVTISGLEPDHKYKMNLYGFHGGQRVGPISVIGVTEEETPAPTEPSTEAPEPPEEPLLGELTVTGSSPDSLSLSWTIPQGRFDSFTVQYKDRDGRPQVVRVRGEESEVTVGGLEPGCKYKMHLYGLHEGQRVGPVSAVGVTAPKDEAETTQAVPTMTPEPPIKPRLGELTVTDATPDSLSLSWMVPEGQFDHFLVQYRNGDGQPKAVRVPGHEDGVTISGLEPDHKYKMNLYGFHGGQRVGPVSAIGVTEEETPSPTEPSTEAPEAPEEPLLGELTVTGSSPDSLSLSWTVPQGRFDSFTVQYKDRDGQPQVVRVRGEESEVTVGGLEPGRKYKMHLYGLHEGQRVGPVSTVGITAPLPTPLPVEPRLGELAVAAVTSDSVGLSWTVAQGPFDSFLVQYRDAQGQPQAVPVSGDLRAVAVSGLDPARKYKFLLFGLQNGKRHGPVPVEARTAPDTKPSPRLGELTVTDATPDSVGLSWTVPEGEFDSFVVQYKDKDGRLQVVPVAANQREVTVQGLEPSRKYRFLLYGLSGRKRLGPISADSTTAPLEKELPPHLGELTVAEETSSSLRLSWTVAQGPFDSFVVQYRDTDGQPRAVPVAADQRTVTVEDLEPGKKYKFLLYGLLGGKRLGPVSALGMTAPEEDTPAPELAPEAPEPPEEPRLGVLTVTDTTPDSMRLSWSVAQGPFDSFVVQYEDTNGQPQALLVDGDQSKILISGLEPSTPYRFLLYGLHEGKRLGPLSAEGTTGLAPAGQTSEESRPRLSQLSVTDVTTSSLRLNWEAPPGAFDSFLLRFGVPSPSTLEPHPRPLLQRELMVPGTRHSAVLRDLRSGTLYSLTLYGLRGPHKADSIQGTARTLSPVLESPRDLQFSEIRETSAKVNWMPPPSRADSFKVSYQLADGGEPQSVQVDGQARTQKLQGLIPGARYEVTVVSVRGFEESEPLTGFLTTVPDGPTQLRALNLTEGFAVLHWKPPQNPVDTYDVQVTAPGAPPLQAETPGSAVDYPLHDLVLHTNYTATVRGLRGPNLTSPASITFTTGLEAPRDLEAKEVTPRTALLTWTEPPVRPAGYLLSFHTPGGQNQEILLPGGITSHQLLGLFPSTSYNARLQAMWGQSLLPPVSTSFTTGGLRIPFPRDCGEEMQNGAGASRTSTIFLNGNRERPLNVFCDMETDGGGWLVFQRRMDGQTDFWRDWEDYAHGFGNISGEFWLGNEALHSLTQAGDYSMRVDLRAGDEAVFAQYDSFHVDSAAEYYRLHLEGYHGTAGDSMSYHSGSVFSARDRDPNSLLISCAVSYRGAWWYRNCHYANLNGLYGSTVDHQGVSWYHWKGFEFSVPFTEMKLRPRNFRSPAGGG

SEQ ID NO: 5956 - protein, 673 aa, Homo sapiens
MRLSWSVAQGPFDSFVVQYEDTNGQPQALLVDGDQSKILISGLEPSTPYRFLLYGLHEGKRLGPLSAEGTTGLAPAGQTSEESRPRLSQLSVTDVTTSSLRLNWEAPPGAFDSFLLRFGVPSPSTLEPHPRPLLQRELMVPGTRHSAVLRDLRSGTLYSLTLYGLRGPHKADSIQGTARTLSPVLESPRDLQFSEIRETSAKVNWMPPPSRADSFKVSYQLADGGEPQSVQVDGQARTQKLQGLIPGARYEVTVVSVRGFEESEPLTGFLTTVPDGPTQLRALNLTEGFAVLHWKPPQNPVDTYDVQVTAPGAPPLQAETPGSAVDYPLHDLVLHTNYTATVRGLRGPNLTSPASITFTTGLEAPRDLEAKEVTPRTALLTWTEPPVRPAGYLLSFHTPGGQNQEILLPGGITSHQLLGLFPSTSYNARLQAMWGQSLLPPVSTSFTTGGLRIPFPRDCGEEMQNGAGASRTSTIFLNGNRERPLNVFCDMETDGGGWLVFQRRMDGQTDFWRDWEDYAHGFGNISGEFWLGNEALHSLTQAGDYSMRVDLRAGDEAVFAQYDSFHVDSAAEYYRLHLEGYHGTAGDSMSYHSGSVFSARDRDPNSLLISCAVSYRGAWWYRNCHYANLNGLYGSTVDHQGVSWYHWKGFEFSVPFTEMKLRPRNFRSPAGGG

SEQ ID NO: 5957 - protein, 328 aa, Homo sapiens
MWLGRRALCALVLLLACASLGLLYASTRDAPGLRLPLAPWAPPQSPRRPELPDLAPEPRYAHIPVRIKEQVVGLLAWNNCSCESSGGGLPLPFQKQVRAIDLTKAFDPAELRAASATREQEFQAFLSRSQSPADQLLIAPANSPLQYPLQGVEVQPLRSILVPGLSLQAASGQEVYQVNLTASLGTWDVAGEVTGVTLTGEGQADLTLVSPGLDQLNRQLQLVTYSSRSYQTNTADTGARPGWRDGQAGQTEKNQKGWSGQMAEGMGGIWAMARAVQPHNGCFNWTSRARGRKGAFVHLGLEQARGKPEPWVCLPFRPTVGGPRKRLV

SEQ ID NO: 5958 - protein, 267 aa, Homo sapiens
MARFLTLCTWLLLLGPGLLATVRAECSQDCATCSYRLVRPADINFLACVMECEGKLPSLKIWETCKELLQLSKPELPQDGTSTLRENSKPEESHLLAKRYGGFMKRYGGFMKKMDELYPMEPEEEANGSEILAKRYGGFMKKDAEEDDSLANSSDLLKELLETGDNRERSHHQDGSDNEEEVSKRYGGFMRGLKRSPQLEDEAKELQKRYGGFMRRVGRPEWWMDYQKRYGGFLKRFAEALPSDEEGESYSKEVPEMEKRYGGFMRF

SEQ ID NO: 5959 - protein, 337 aa, Homo sapiens
GNSPICLVLILQAVVVVECKRQHIMETGPEDPSSMPEESSPRRTPQSIPYQDLPHLVNADGQYLFCRYWKPTGTPKALIFVSHGAGEHSGRYEELARMLMGLDLLVFAHDHVGHGQSEGERMVVSDFHVFVRDVLQHVDSMQKDYPGLPVFLLGHSMGGAIAILTAAERPGHFAGMVLISPLVLANPESATTFKVLAAKVLNLVLPNLSLGPIDSSVLSRNKTEVDIYNSDPLICRAGLKVCFGIQLLNAVSRVERALPKLTVPFLLLQGSADRLCDSKGAYLLMELAKSQDKTLKIYEGAYHVLHKELPEVTNSVFHEINMWVSQRTATAGTASPP

SEQ ID NO: 5960 - protein, 486 aa, Homo sapiens
MQPSGLEGPGTFGRWPLLSLLLLLLLLQPVTCAYTTPGPPRALTTLGAPRAHTMPGTYAPSTTLSSPSTQGLQEQARALMRDFPLVDGHNDLPLVLRQVYQKGLQDVNLRNFSYGQTSLDRLRDGLVGAQFWSAYVPCQTQDRDALRLTLEQIDLIRRMCASYSELELVTSAKALNDTQKLACLIGVEGGHSLDNSLSILRTFYMLGVRYLTLTHTCNTPWAESSAKGVHSFYNNISGLTDFGEKVVAEMNRLGMMVDLSHVSDAVARRALEVSQAPVIFSHSAARGVCNSARNVPDDILQLLKKNGGVVMVSLSMGVIQCNPSANVSTVADHFDHIKAVIGSKFIGIGGDYDGAGKFPQGLEDVSTYPVLIEELLSRGWSEEELQGVLRGNLLRVFRQVEKVQEENKWQSPLEDKFPDEQLSSSCHSDLSRLRQRQSLTSGQELTEIPIHWTAKLPAKWSVSESSPHMAPVLAVVATFPVLILWL

SEQ ID NO: 5961 - protein, 399 aa, Homo sapiens
MQPSGLEGPGTFGRWPLLSLLLLLLLLQPVTCAYTTPGPPRAQFWSAYVPCQTQDRDALRLTLEQIDLIRRMCASYSELELVTSAKALNDTQKLACLIGVEGGHSLDNSLSILRTFYMLGVRYLTLTHTCNTPWAESSAKGVHSFYNNISGLTDFGEKVVAEMNRLGMMVDLSHVSDAVARRALEVSQAPVIFSHSAARGVCNSARNVPDDILQLLKKNGGVVMVSLSMGVIQCNPSANVSTVADHFDHIKAVIGSKFIGIGGDYDGAGKFPQGLEDVSTYPVLIEELLSRGWSEEELQGVLRGNLLRVFRQVEKVQEENKWQSPLEDKFPDEQLSSSCHSDLSRLRQRQSLTSGQELTEIPIHWTAKLPAKWSVSESSPHMAPVLAVVATFPVLILWL

SEQ ID NO: 5962 - protein, 179 aa, Homo sapiens
MAALQKSVSSFLMGTLATSCLLLLALLVQGGAAAPISSHCRLDKSNFQQPYITNRTFMLAKEASLADNNTDVRLIGEKLFHGVSMSERCYLMKQVLNFTLEEVLFPQSDRFQPYMQEVVPFLARLSNRLSTCHIEGDDLHIQRNVQKLKDTVKKLGESGEIKAIGELDLLFMSLRNACI

SEQ ID NO: 5963 - protein, 520 aa, Homo sapiens
MRNKKILKEDELLSETQQAAFHQIAMEPFEINVPKPKRRNGVNFSLAVVVIYLILLTAGAGLLVVQVLNLQARLRVLEMYFLNDTLAAEDSPSFSLLQSAHPGEHLAQGASRLQVLQAQLTWVRVSHEHLLQRVDNFTQNPGMFRIKGEQGAPGLQGHKGAMGMPGAPGPPGPPAEKGAKGAMGRDGATGPSGPQGPPGVKGEAGLQGPQGAPGKQGATGTPGPQGEKGSKGDGGLIGPKGETGTKGEKGDLGLPGSKGDRGMKGDAGVMGPPGAQGSKGDFGRPGPPGLAGFPGAKGDQGQPGLQGVPGPPGAVGHPGAKGEPGSAGSPGRAGLPGSPGSPGATGLKGSKGDTGLQGQQGRKGESGVPGPAGVKGEQGSPGLAGPKGAPGQAGQKGDQGVKGSSGEQGVKGEKGERGENSVSVRIVGSSNRGRAEVYYSGTWGTICDDEWQNSDAIVFCRMLGYSKGRALYKVGAGTGQIWLDNVQCRGTESTLWSCTKNSWGHHDCSHEEDAGVECSV

SEQ ID NO: 5964 - protein, 976 aa, Homo sapiens [sequence omitted]

SEQ ID NO: 5965 - protein, 539 aa, Homo sapiens
MGSPVSHLLAGFCVWVVLGWVGGSVPNLGPAEQEQNHYLAQLFGLYGENGTLTAGGLARLLHSLGLGRVQGLRLGQHGPLTGRAASPAADNSTHRPQNPELSVDVWAGMPLGPSGWGDLEESKAPHLPRGPAPSGLDLLHRLLLLDHSLADHLNEDCLNGSQLLVNFGLSPAAPLTPRQFALLCPALLYQIDSRVCIGAPAPAPPGDLLSALLQSALAVLLLSLPSPLSLLLLRLLGPRLLRPLLGFLGALAVGTLCGDALLHLLPHAQEGRHAGPGGLPEKDLGPGLSVLGGLFLLFVLENMLGLLRHRGLRPRCCRRKRRNLETRNLDPENGSGMALQPLQAAPEPGAQGQREKNSQHPPALAPPGHQGHSHGHQGGTDITWMVLLGDGLHNLTDGLAIGAAFSDGFSSGLSTTLAVFCHELPHELGDFAMLLQSGLSFRRLLLLSLVSGALGLGGAVLGVGLSLGPVPLTPWVFGVTAGVFLYVALVDMLPALLRPPEPLPTPHVLLQGLGLLLGGGLMLAITLLEERLLPVTTEG

SEQ ID NO: 5966 - protein, 831 aa, Homo sapiens
MGELFRSEEMTLAQLFLQSEAAYCCVSELGELGKVQFRDLNPDVNVFQRKFVNEVRRCEEMDRKLRFVEKEIRKANIPIMDTGENPEVPFPRDMIDLEANFEKIENELKEINTNQEALKRNFLELTELKFILRKTQQFFDEMADPDLLEESSSLLEPSEMGRGTPLRLGFVAGVINRERIPTFERMLWRVCRGNVFLRQAEIENPLEDPVTGDYVHKSVFIIFFQGDQLKNRVKKICEGFRASLYPCPETPQERKEMASGVNTRIDDLQMVLNQTEDHRQRVLQAAAKNIRVWFIKVRKMKAIYHTLNLCNIDVTQKCLIAEVWCPVTDLDSIQFALRRGTEHSGSTVPSILNRMQTNQTPPTYNKTNKFTYGFQNIVDAYGIGTYREINPAPYTIITFPFLFAVMFGDFGHGILMTLFAVWMVLRESRILSQKNENEMFSTVFSGRYIILLMGVFSMYTGLIYNDCFSKSLNIFGSSWSVRPMFTYNWTEETLRGNPVLQLNPALPGVFGGPYPFGIDPIWNIATNKLTFLNSFKMKMSVILGIIHMLFGVSLSLFNHIYFKKPLNIYFGFIPEIIFMTSLFGYLVILIFYKWTAYDAHTSENAPSLLIHFINMFLFSYPESGYSMLYSGQKGIQCFLVVVALLCVPWMLLFKPLVLRRQYLRRKHLGTLNFGGIRVGNGPTEEDAEIIQHDQLSTHSEDADEFDFGDTMVHQAIHTIEYCLGCISNTASYLRLWALSLAHAQLSEVLWTMVIHIGLSVKSLAGGLVLFFFFTAFATLTVAILLIMEGLSAFLHALRLHWVEFQNKFYSGTGFKFLPFSFEHIREGKFEE

SEQ ID NO: 5967 - protein, 408 aa, Homo sapiens
MAGRGFSWGPGHLNEDNARFLLLAALIVLYLLGGAAVFSALELAHERQAKQRWEERLANFSRGHNLSRDELRGFLRHYEEATRAGIRVDNVRPRWDFTGAFYFVGTVVSTIGFGMTTPATVGGKIFLIFYGLVGCSSTILFFNLFLERLITIIAYIMKSCHQRQLRRRGALPQESLKDAGQCEVDSLAGWKPSVYYVMLILCTASILISCCASAMYTPIEGWSYFDSLYFCFVAFSTIGFGDLVSSQNAHYESQGLYRFANFVFILMGVCCIYSLFNVISILIKQSLNWILRKMDSGCCPQCQRGLLRSRRNVVMPGSVRNRCNISIETDGVAESDTDGRRLSGEMISMKDLLAANKASLAILQKQLSEMANGCPHQTSTLARDNEFSGGVGAFAIMNNRLAETSGDR

SEQ ID NO: 5968 - protein, 1200 aa, Homo sapiens
MGEKLSGKLSPCLRRGVAQQPRCAGEENWVDSRTIYVGHREPPPGAEAYIPQRYPDNRIVSSKYTFWNFIPKNLFEQFRRVANFYFLIIFLVQLIIDTPTSPVTSGLPLFFVITVTAIKQGYEDWLRHKADNAMNQCPVHFIQHGKLVRKQSRKLRVGDIVMVKEDETFPCDLIFLSSNRGDGTCHVTTASLDGESSHKTHYAVQDTKGFHTEEDIGGLHATIECEQPQPDLYKFVGRINVYSDLNDPVVRPLGSENLLLRGATLKNTEKIFGVAIYTGMETKMALNYQSKSQKRSAVEKSMNAFLIVYLCILISKALINTVLKYMWQSEPFRDEPWYNQKTESERQRNLFLKAFTDFLAFMVLFNYIIPVSMYVTVEMQKFLGSYFITWDEDMFDEETGEGPLVNTSDLNEELGQVEYIFTDKTGTLTENNMEFKECCIEGHVYVPHVICNGQVLPESSGIDMIDSSPSVNGREREELFFRALCLCHTVQVKDDDSVDGPRKSPDGGKSCVYISSSPDEVALVEGVQRLGFTYLRLKDNYMEILNRENHIERFELLEILSFDSVRRRMSVIVKSATGEIYLFCKGADSSIFPRVIEGKVDQIRARVERNAVEGLRTLCVAYKRLIQEEYEGICKLLQAAKVALQDREKKLAEAYEQIEKDLTLLGATAVEDRLQEKAADTIEALQKAGIKVWVLTGDKMETAAATCYACKLFRRNTQLLELTTKRIEEQSLHDVLFELSKTVLRHSGSLTRDNLSGLSADMQDYGLIIDGAALSLIMKPREDGSSGNYRELFLEICRSCSAVLCCRMAPLQKAQIVKLIKFSKEHPITLAIGDGANDVSMILEAHVGIGVIGKEGRQAARNSDYAIPKFKHLKKMLLVHGHFYYIRISELVQYFFYKNVCFIFPQFLYQFFCGFSQQTLYDTAYLTLYNISFTSLPILLYSLMEQHVGIDVLKRDPTLYRDVAKNALLRWRVFIYWTLLGLFDALVFFFGAYFVFENTTVTSNGQIFGNWTFGTLVFTVMVFTVTLKLALDTHYWTWINHFVIWGSLLFYVVFSLLWGGVIWPFLNYQRMYYVFIQMLSSGPAWLAIVLLVTISLLPDVLKKVLCRQLWPTATERVQNGCAQPRDRDSEFTPLASLQSPGYQSTCPSAAWYSSHSQQVTLAAWKEKVSTEPPPILGGSHHHCSSIPSHSCPRSRVGMLV

SEQ ID NO: 5969 - protein, 718 aa, Homo sapiens
MLVHLFRVGIRGGPFPGRLLPPLRFQTFSAVRYSDGYRSSSLLRAVAHLRSQLWAHLPRAPLAPRWSPSAWCWVGGALLGPMVLSKHPHLCLVALCEAEEAPPASSTPHVVGSRFNWKLFWQFLHPHLLVLGVAVVLALGAALVNVQIPLLLGQLVKVVAKYTRDHVGSFMTESQNLSTHLLILYGVQGLLTFGYLVLLSHVGERMAVDMRRALFSSLLRQNITFFDANKTGQLVSRLTTDVQEFKSSFKLVISQGLRSCSQVAGCLVSLSMLSTRLTLLLMVATPALMGVGTLMGSGLRKLSRQCQEHIARAMGVADEALGNVRTVRALAMEQREEERYGAELEACRCRAEELGRGIALFQGLSNIAFNCMVLGTLFIGGSLVAGQQLTGGDLMSFLVASQTVQRSMANLSVLFGQVVRGLSAGARVFEYMALNPCIPLSGGCCVPKEQLRGSVTFQNVCFSYPCRPGFEVLKDFTLTLPPGKIVALVGQSGGGKTTVASLLERFYDPTAGVVMLDGRDLRTLDPSWLRGQVVGFISQEPVLFGTTIMENIRFGKLEASDEEVYTAAREANAHEFITSFPEGYNTVVGERGTTLSGGQKQRLAIARALIKQPTVLILDEATSALDAESERVVQEALDRASAGRTVLVIAHRLSTVRGAHCIVVMADGRVWEAGTHEELLKKGGLYAELIRRQALDAPRTAAPPPKKPEGPRSHQHKS

SEQ ID NO: 5970 - protein, 735 aa, Homo sapiens
MLVHLFRVGIRGGPFPGRLLPPLRFQTFSAVRNTWRNGKTGQLHKAEGEYSDGYRSSSLLRAVAHLRSQLWAHLPRAPLAPRWSPSAWCWVGGALLGPMVLSKHPHLCLVALCEAEEAPPASSTPHVVGSRFNWKLFWQFLHPHLLVLGVAVVLALGAALVNVQIPLLLGQLVKVVAKYTRDHVGSFMTESQNLSTHLLILYGVQGLLTFGYLVLLSHVGERMAVDMRRALFSSLLRQNITFFDANKTGQLVSRLTTDVQEFKSSFKLVISQGLRSCSQVAGCLVSLSMLSTRLTLLLMVATPALMGVGTLMGSGLRKLSRQCQEHIARAMGVADEALGNVRTVRALAMEQREEERYGAELEACRCRAEELGRGIALFQGLSNIAFNCMVLGTLFIGGSLVAGQQLTGGDLMSFLVASQTVQRSMANLSVLFGQVVRGLSAGARVFEYMALNPCIPLSGGCCVPKEQLRGSVTFQNVCFSYPCRPGFEVLKDFTLTLPPGKIVALVGQSGGGKTTVASLLERFYDPTAGVVMLDGRDLRTLDPSWLRGQVVGFISQEPVLFGTTIMENIRFGKLEASDEEVYTAAREANAHEFITSFPEGYNTVVGERGTTLSGGQKQRLAIARALIKQPTVLILDEATSALDAESERVVQEALDRASAGRTVLVIAHRLSTVRGAHCIVVMADGRVWEAGTHEELLKKGGLYAELIRRQALDAPRTAAPPPKKPEGPRSHQHKS

SEQ ID NO: 5971 - protein, 701 aa, Homo sapiens [sequence omitted]

SEQ ID NO: 5972 - protein, 265 aa, Homo sapiens
MSEEVTYADLQFQNSSEMEKIPEIGKFGEKAPPAPSHVWRPAALFLTLLCLLLLIGLGVLASMFHVTLKIEMKKMNKLQNISEELQRNISLQLMSNMNISNKIRNLSTTLQTIATKLCRELYSKEQEHKCKPCPRRWIWHKDSCYFLSDDVQTWQESKMACAAQNASLLKINNKNALEFIKSQSRSYDYWLGLSPEEDSTRGMRVDNIINSSAWVIRNAPDLNNMYCGYINRLYVQYYHCTYKQRMICEKMANPVQLGSTYFREA

SEQ ID NO: 5973 - protein, 1133 aa, Homo sapiens [sequence omitted]

SEQ ID NO: 5974 - protein, 2022 aa, Homo sapiens
MKEQPVLERLQSQKSWIKGVFDKRECSTIIPSSKNPHRCTPVCQVCQNLIRCYCGRLIGDHAGIDYSWTISAAKGKESEQWSVEKHTTKSPTDTFGTINFQDGEHTHHAKYIRTSYDTKLDHLLHLMLKEWKMELPKLVISVHGGIQNFTMPSKFKEIFSQGLVKAAETTGAWIITEGINTGVSKHVGDALKSHSSHSLRKIWTVGIPPWGVIENQRDLIGKDVVCLYQTLDNPLSKLTTLNSMHSHFILSDDGTVGKYGNEMKLRRNLEKYLSLQKIHCRSRQGVPVVGLVVEGGPNVILSVWETVKDKDPVVVCEGTGRAADLLAFTHKHLADEGMLRPQVKEEIICMIQNTFNFSLKQSKHLFQILMECMVHRDCITIFDADSEEQQDLDLAILTALLKGTNLSASEQLNLAMAWDRVDIAKKHILIYEQHWKPDALEQAMSDALVMDRVDFVKLLIEYGVNLHRFLTIPRLEELYNTKQGPTNTLLHHLVQDVKQHTLLSGYRITLIDIGLVVEYLIGRAYRSNYTRKHFRALYNNLYRKYKHQRHSSGNRNESAESTLHSQFIRTAQPYKFKEKSIVLHKSRKKSKEQNVSDDPESTGFLYPYNDLLVWAVLMKRQKMAMFFWQHGEEATVKAVIACILYRAMAHEAKESHMVDDASEELKNYSKQFGQLALDLLEKAFKQNERMAMTLLTYELRNWSNSTCLKLAVSGGLRPFVSHTCTQMLLTDMWMGRLKMRKNSWLKIIISIILPPTILTLEFKSKAEMSHVPQSQDFQFMWYYSDQNASSSKESASVKEYDLERGHDEKLDENQHFGLESGHQHLPWTRKVYEFYSAPIVKFWFYTMAYLAFLMLFTYTVLVEMQPQPSVQEWLVSIYIFTNAIEVVREICISEPGKFTQKVKVWISEYWNLTETVAIGLFSAGFVLRWGDPPFHTAGRLIYCIDIIFWFSRLLDFFAVNQHAGPYVTMIAKMTANMFYIVIIMAIVLLSFGVARKAILSPKEPPSWSLARDIVFEPYWMIYGEVYAGEIDVCSSQPSCPPGSFLTPFLQAVYLFVQYIIMVNLLIAFFNNVYLDMESISNNLWKYNRYRYIMTYHEKPWLPPPLILLSHVGLLLRRLCCHRAPHDQEEGDVGLKLYLSKEDLKKLHDFEEQCVEKYFHEKMEDVNCSCEERIRVTSERVTEMYFQLKEMNEKVSFIKDSLLSLDSQVGHLQDLSALTVDTLKVLSAVDTLQEDEALLAKRKHSTCKKLPHSWSNVICAEVLGSMEIAGEKKYQYYSMPSSLLRSLAGGRHPPRVQRGALLEITNSKREATNVRNDQERQETQSSIVVSGVSPNRQAHSKYGQFLLVPSNLKRVPFSAETVLPLSRPSVPDVLATEQDIQTEVLVHLTGQTPVVSDWASVDEPKEKHEPIAHLLDGQDKAEQVLPTLSCTPEPMTMSSPLSQAKIMQTGGGYVNWAFSEGDETGVFSIKKKWQTCLPSTCDSDSSRSEQHQKQAQDSSLSDNSTRSAQSSECSEVGPWLQPNTSFWINPLRRYRPFARSHSFRFHKEEKLMKICKIKNLSGSSEIGQGAWVKAKMLTKDRRLSKKKKNTQGLQVPIITVNACSQSDQLNPEPGENSISEEEYSKNWFTVSKFSHTGVEPYIHQKMKTKEIGQCAIQISDYLKQSQEDLSKNSLWNSRSTNLNRNSLLKSSIGVDKISASLKSPQEPHHHYSAIERNNLMRLSQTIPFTPVQLFAGEEITVYRLEESSPLNLDKSMSSWSQRGRAAMIQVLSREEMDGGLRKAMRVVSTWSEDDILKPGQVFIVKSFLPEVVRTWHKIFQESTVLHLCLREIQQQRAAQKLIYTFNQVKPQTIPYTPRFLEVFLIYCHSANQWLTIEKYMTGEFRKYNNNNGDEITPTNTLEELMLAFSHWTYEYTRGELLVLDLQGVGENLTDPSVIKPEVKQSRGMVFGPANLGEDAIRNFIAKHHCNSCCRKLKLPDLKRNDYSPERINSTFGLEIKIESAEEPPARETGRNSPEDDMQL

SEQ ID NO: 5975 - protein, 479 aa, Homo sapiens
MANFTPVNGSSGNQSVRLVTSSSHNRYETVEMVFIATVTGSLSLVTVVGNILVMLSIKVNRQLQTVNNYFLFSLACADLIIGAFSMNLYTVYIIKGYWPLGAVVCDLWLALDYVVSNASVMNLLIISFDRYFCVTKPLTYPARRTTKMAGLMIAAAWVLSFVLWAPAILFWQFVVGKRTVPDNQCFIQFLSNPAVTFGTAIAAFYLPVVIMTVLYIHISLASRSRVHKHRPEGPKEKKAKTLAFLKSPLMKQSVKKPPPGEAAREELRNGKLEEAPPPALPPPPRPVADKDTSNESSSGSATQNTKERPATELSTTEATTPAMPAPPLQPRALNPASRWSKIQIVTKQTGNECVTAIEIVPATPAGMRPAANVARKFASIARNQVRKKRQMAARERKVTRTIFAILLAFILTWTPYNVMVLVNTFCQSCIPDTVWSIGYWLCYVNSTINPACYALCNATFKKTFRHLLLCQYRNIGTAR

SEQ ID NO: 5976 - protein, 211 aa, Homo sapiens
MANAGLQLLGFILAFLGWIGAIVSTALPQWRIYSYAGDNIVTAQAMYEGLWMSCVSQSTGQIQCKVFDSLLNLSSTLQATRALMVVGILLGVIAIFVATVGMKCMKCLEDDEVQKMRMAVIGGAIFLLAGLAILVATAWYGNRIVQEFYDPMTPVNARYEFGQALFTGWAAASLCLLGGALLCCSCPRKTTSYPTPRPYPKPAPSSGKDYV

SEQ ID NO: 5977 - protein, 385 aa, Homo sapiens
MAEQTYSWAYSLVDSSQVSTFLISILLIVYGSFRSLNMDFENQDKEKDSNSSSGSFNGEQEPIIGFQPMDSTRARFLPMGACVSLLVMFFFFDSVQVVFTICTAVLATIAFAFLLLPMCQYLTRPCSPQNKISFGCCGRFTAAELLSFSLSVMLVLIWVLTGHWLLMDALAMGLCVAMIAFVRLPSLKVSCLLLSGLLIYDVFWVFFSAYIFNSNVMVKVATQPADNPLDVLSRKLHLGPNVGRDVPRLSLPGKLVFPSSTGSHFSMLGIGDIVMPGLLLCFVLRYDNYKKQASGDSCGAPGPANISGRMQKVSYFHCTLIGYFVGLLTATVASRIHRAAQPALLYLVPFTLLPLLTMAYLKGDLRRMWSEPFHSKSSSSRFLEV

SEQ ID NO: 5978 - protein, 1732 aa, Homo sapiens
MFFKGGSWLWLYIRTSIILGSELNSPAPHGQNNCYQLNRFQCSFEEAQHYCHVQRGFLAHIWNKEVQDLIRDYLEEGKKWWIGQNVMPLKKHQDNKYPADVAANGPPKPLSCTYLSRNFIRISSKGDKCLLKYYFICQTGDFLDGDAHYERNGNNSHLYQRHKKTKRGVAIARDKMPPGPGHLPTTCHYPLPAHLSKTLCHPISQFPSVLSSITSQVTSAASEPSSQPLPVITQLTMPVSVTHAGQSLAETTSSPKEEGHPNTFTSYLQVSLQKASGQVIDEIAGNFSRAVHGLQALNKLQEACEFLQKLTALTPRFSKPAQVNLINSLIYLSEELLRIPFQNNNSLGFKVPPTVCPFHSLNNVTKAGEGSWLESKRHTEPVEDILEMSLVEFGNIGEAFLEQNQSPESSVTLTSANATLLLSRQNISTLPLSSYTLGHPAPVRLGFPSALALKELLNKHPGVNVQITGLAFNPFKDLDNRNIVGSIGSVLLSANRKLLQVHDLMEDIEIMLWRNVSLETHPTSLNMSTHQLTITVNVTSLEKSLIVSIDPDSPLLMTLYLGFQYQPNCTHFHLNITLPKDKVWQKDEEYTWVLNPEHLQHGIGTYYITAVLSERQEGAQQTPSLVSVITAVTQCYYWEIHNQTWSSAGCQVGPQSTILRTQCLCNHLTFFASDFFVVPRTVNVEDTIKLFLRVTNNPVGVSLLASLLGFYVITVVWARKKDQADMQKVKVTVLADNDPSAQFHYLIQVYTGYRRSAATTAKVVITLYGSEGRSEPHHLCDPQKTVFERGGLDVFLLTTWTSLGNLHSLRLWHDNSGVSPSWYVSQVIVCDMAVKRKWHFLCNCWLAVDLGDCELDRVFIPVSKRELFSFRHLFSSMIVEKFTQDYLWLSIATRHPWNQFTRVQRLSCCMTLLLCNMVINVMFWKINSTTAKRDEQMRPFAVAWSELLVSIHTAVILFPINLVIGRLFPLIEPQETLPLFPPIQASCLSDASVEPLSATMVVEELKETVRFLLRRNTYLLSKCEQPPWSSWDITKLVKLLSSLVSSHLEGQGCHQQGERHWARVVPENHHHFCCYLHRVLQRLKSHLGTLGLTQGHQSCDFLDAASQLQKLQELLETHILPTEQEPSREVTSFAILSSEEGKKPISNGLSKWLTSVCWLLLGFTSLASAFFTALYSLELSKDQATSWMISIILSVLQNIFISQPVKVVFFTFLYSLMMSRMPRLNKENEQQTKRILALLAKCSSSVPGSRDKNNPVYVAPAINSPTKHPERTLKKKKLFKLTGDILVQILFLTLLMTAIYSAKNSNRFYLHQAIWKTFSHQFSEIKLLQDFYPWANHILLPSLYGDYRGKNAVLEPSHCKCGVQLIFQIPRTKTYEKVDEGQLAFCDNGHTCGRPKSLFPGLHLRRFSYICSPRPMVLIPTDELHERLTSKNENGFSYIMRGAFFTSLRLESFTSLQMSKKGCVWSIISQVIYYLLVCYYAFIQGCQLKQQKWRFFTGKRNILDTSIILISFILLGLDMKSISLHKKNMARYRDDQDRFISFYEAVKVNSAATHLVGFPVLLATVQLWNLLRHSPRLRVISRTLSRAWDEVVGFLLIILILLTGYAIAFNLLFGCSISDYRTFFSSAVTVVGLLMGISHQEEVFALDPVLGTFLILTSVILMVLVVINLFVSAILMAFGKERKSLKKEAALIDTLLQKLSNLLGISWPQKTSSEQAATTAVGSDTEVLDELP

SEQ ID NO: 5979 - protein, 475 aa, Homo sapiens
MAVVSEDDFQHSSNSTYRTTSSSLRADQEALLEKLLDRPPPGLQRPEDRFCGTYIIFFSLGIGSLLPWNFFITAKEYWMFKLRNSSSPATGEDPEGSDILNYFESYLAVASTVPSMLCLVANFLLVNRVAVHIRVLASLTVILAIFMVITALVKVDTFSWTRGFFAVTIVCMVILSGASTVFSSSIYGMTGSFPMRNSQALISGGAMGGTVSAVASLVDLAASSDVRNSALAFFLTATIFLVLCMGLYLLLSRLEYARYYMRPVLAAHVFSGEEELPQDSLSAPSVASRFIDSHTPPLRPILKKTASLGFCVTYVFFITSLIYPAVCTNIESLNKGSGSLWTTKFFIPLTTFLLYNFADLCGRQLTAWIQVPGPNSKALPGFVLLRTCLIPLFVLCNYQPRVHLKTVVFQSDVYPALLSSLLGLSNGYLSTLALLYGPKIVPRELAEATGVVMSFYVCLGLTLGSACSTLLVHLI

SEQ ID NO: 5980 - protein, 125 aa, Homo sapiens
MPACRLGPLAAALLLSLLLFGFTLVSGTGAEKTGVCPELQADQNCTQECVSDSECADNLKCCSAGCATFCLLCPNDKEGSCPQVNINFPQLGLCRDQCQVDSQCPGQMKCCRNGCGKVSCVTPNF

SEQ ID NO: 5981 - protein, 102 aa, Homo sapiens
MPACRLGPLAAALLLSLLLFGFTLVSGTGAEKTGVCPELQADQNCTQECVSDSECADNLKCCSAGCATFCSLPNALFHWHLKTRRLWEISGPRPRRPTWDSS

SEQ ID NO: 5982 - protein, 80 aa, Homo sapiens
MPACRLGPLAAALLLSLLLFGFTLVSGTGAEKTGVCPELQADQNCTQECVSDSECADNLKCCSAGCATFCLLCPNGQLAE

SEQ ID NO: 5983 - protein, 79 aa, Homo sapiens
MPACRLGPLAAALLLSLLLFGFTLVSGTGAEKTGVCPELQADQNCTQECVSDSECADNLKCCSAGCATFCSLPNGQLAE

SEQ ID NO: 5984 - protein, 510 aa, Homo sapiens
MRPGLSFLLALLFFLGQAAGDLGDVGPPIPSPGFSSFPGVDSSSSFSSSSRSGSSSSRSLGSGGSVSQLFSNFTGSVDDRGTCQCSVSLPDTTFPVDRVERLEFTAHVLSQKFEKELSKVREYVQLISVYEKKLLNLTVRIDIMEKDTISYTELDFELIKVEVKEMEKLVIQLKESFGGSSEIVDQLEVEIRNMTLLVEKLETLDKNNVLAIRREIVALKTKLKECEASKDQNTPVVHPPPTPGSCGHGGVVNISKPSVVQLNWRGFSYLYGAWGRDYSPQHPNKGLYWVAPLNTDGRLLEYYRLYNTLDDLLLYINARELRITYGQGSGTAVYNNNMYVNMYNTGNIARVNLTTNTIAVTQTLPNAAYNNRFSYANVAWQDIDFAVDENGLWVIYSTEASTGNMVISKLNDTTLQVLNTWYTKQYKPSASNAFMVCGVLYATRTMNTRTEEIFYYYDTNTGKEGKLDIVMHKMQEKVQSINYNPFDQKLYVYNDGYLLNYDLSVLQKPQ

SEQ ID NO: 5985 - protein, 161 aa, Homo sapiens
MNLAISIALLLTVLQVSRGQKVTSLTACLVDQSLRLDCRHENTSSSPIQYEFSLTRETKKHVLFGTVGVPEHTYRSRTNFTSKYNMKVLYLSAFTSKDEGTYTCALHHSGHSPPISSQNVTVLRDKLVKCEGISLLAQNTSWLLLLLLSLSLLQATDFMSL

SEQ ID NO: 5986 - protein, 478 aa, Homo sapiens
MGRCCFYTAGTLSLLLLVTSVTLLVARVFQKAVDQSIEKKIVLRNGTEAFDSWEKPPLPVYTQFYFFNVTNPEEILRGETPRVEEVGPYTYRELRNKANIQFGDNGTTISAVSNKAYVFERDQSVGDPKIDLIRTLNIPVLTVIEWSQVHFLREIIEAMLKAYQQKLFVTHTVDELLWGYKDEILSLIHVFRPDISPYFGLFYEKNGTNDGDYVFLTGEDSYLNFTKIVEWNGKTSLDWWITDKCNMINGTDGDSFHPLITKDEVLYVFPSDFCRSVYITFSDYESVQGLPAFRYKVPAEILANTSDNAGFCIPEGNCLGSGVLNVSICKNGAPIIMSFPHFYQADERFVSAIEGMHPNQEDHETFVDINPLTGIILKAAKRFQINIYVKKLDDFVETGDIRTMVFPVMYLNESVHIDKETASRLKSMINTTLIITNIPYIIMALGVFFGLVFTWLACKGQGSMDEGTADERAPLIRT

SEQ ID NO: 5987 - protein, 784 aa, Homo sapiens [sequence omitted]

SEQ ID NO: 5988 - protein, 1125 aa, Homo sapiens
MGENEDEKQAQAGQVFENFVQASTCKGTLQAFNILTRHLDLDPLDHRNFYSKLKSKVTTWKAKALWYKLDKRGSHKEYKRGKSCTNTKCLIVGGGPCGLRTAIELAYLGAKVVVVEKRDSFSRNNVLHLWPFTIHDLRGLGAKKFYGKFCAGSIDHISIRQLQLILFKVALMLGVEIHVNVEFVKVLEPPEDQENQKIGWRAEFLPTDHSLSEFEFDVIIGADGRRNTLEGFRRKEFRGKLAIAITANFINRNSTAEAKVEEISGVAFIFNQKFFQDLKEETGIDLENIVYYKDCTHYFVMTAKKQSLLDKGVIINDYIDTEMLLCAENVNQDNLLSYAREAADFATNYQLPSLDFAMNHYGQPDVAMFDFTCMYASENAALVRERQAHQLLVALVGDSLLEPFWPMGTGCARGFLAAFDTAWMVKSWNQGTPPLELLAERESLYRLLPQTTPENINKNFEQYTLDPGTRYPNLNSHCVRPHQASKHLYITKELEHYPLERLGSVRRSVNLSRKESDIRPSKLLTWCQQQTEGYQHVNVTDLTTSWRSGLALCAIIHRFRPELINFDSLNEDDAVENNQLAFDVAEREFGIPPVTTGKEMASAQEPDKLSMVMYLSKFYELFRGTPLRPVDSWRKNYGENADLSLAKSSISNNYLNLTFPRKRTPRVDGQTGENDMNKRRRKGFTNLDEPSNFSSRSLGSNQECGSSKEGGNQNKVKSMANQLLAKFEESTRNPSLMKQERRVSGIGKPVLCSSSGPPVHSCCPKPEEATPSPSPPLKRQFPSVVVTGHVLRELKQVSAGSECLSRPWRARAKSDLQLGGTENFATLPSTRPRAQALSGVLWRLQQVEEKILQKRAQNLANREFHTKNIKEKAAHLASMFGHGDFPQNKLLSKGLSHTHPPSPPSRLPSPDPAASSSPSTVDSASPARKEKKSPSGFHFHPSHLRTVHPQLTVGKVSSGIGAAAEVLVNLYMNDHRPKAQATSPDLESMRKSFPLNLGGSDTCYFCKKRVYVMERLSAEGHFFHRECFRCSICATTLRLAAYTFDCDEGKFYCKPHFIHCKTNSKQRKRRAELKQQREEEATWQEQEAPRRDTPTESSCAVAAIGTLEGSPPVHFSLPVLHPLLG

SEQ ID NO: 5989 - protein, 453 aa, Homo sapiens
MALVRALVCCLLTAWHCRSGLGLPVAPAGGRNPPPAIGQFWHVTDLHLDPTYHITDDHTKVCASSKGANASNPGPFGDVLCDSPYQLILSAFDFIKNSGQEASFMIWTGDSPPHVPVPELSTDTVINVITNMTTTIQSLFPNLQVFPALGNHDYWPQDQLPVVTSKVYNAVANLWKPWLDEEAISTLRKGGFYSQKVTTNPNLRIISLNTNLYYGPNIMTLNKTDPANQFEWLESTLNNSQQNKEKVYIIAHVPVGYLPSSQNITAMREYYNEKLIDIFQKYSDVIAGQFYGHTHRDSIMVLSDKKGSPVNSLFVAPAVTPVKSVLEKQTNNPGIRLFQYDPRDYKLLDMLQYYLNLTEANLKGESIWKLEYILTQTYDIEDLQPESLYGLAKQFTILDSKQFIKYYNYFFVSYDSSVTCDKTCKAFQICAIMNLDNISYADCLKQLYIKHNY

SEQ ID NO: 5990 - protein, 323 aa, Homo sapiens [sequence omitted]

SEQ ID NO: 5991 - protein, 628 aa, Homo sapiens
MALQRLDPCWSCGDRPGSLLFLLFSLGWVHPARTLAGETGTESAPLGGVLTTPHNISSLSPRQLLGFPCAEVSGLSTERVRELAVALAQKNVKLSTEQLRCLAHRLSEPPEDLDALPLDLLLFLNPDAFSGPQACTRFFSRITKANVDLLPRGAPERQRLLPAALACWGVRGSLLSEADVRALGGLACDLPGRFVAESAEVLLPRLVSCPGPLDQDQQEAARAALQGGGPPYGPPSTWSVSTMDALRGLLPVLGQPIIRSIPQGIVAAWRQRSSRDPSWRQPERTILRPRFRREVEKTACPSGKKAREIDESLIFYKKWELEACVDAALLATQMDRVNAIPFTYEQLDVLKHKLDELYPQGYPESVIQHLGYLFLKMSPEDIRKWNVTSLETLKALLEVDKGHEMSPQAPRRPLPQVATLIDRFVKGRGQLDKDTLDTLTAFYPGYLCSLSPEELSSVPPSSIWAVRPQDLDTCDPRQLDVLYPKARLAFQNMNGSEYFVKIQSFLGGAPTEDLKALSQQNVSMDLATFMKLRTDAVLPLTVAEVQKLLGPHVEGLKAEERHRPVRDWILRQRQDDLDTLGLGLQGGIPNGYLVLDLSVQETLSGTPCLLGPGPVLTVLALLLASTLA

SEQ ID NO: 5992 - protein, 398 aa, Homo sapiens
VEKTACPSGKKAREIDESLIFYKKWELEACVDAALLATQMDRVNAIPFTYEQLDVLKHKLDELYPQGYPESVIQHLGYLFLKMSPEDIRKWNVTSLETLKALLEVNKGHEMSPQVATLIDRFVKGRGQLDKDTLDTLTAFYPGYLCSLSPEELSSVPPSSIWAVRPQDLDTCDPRQLDVLYPKARLAFQNMNGSEYFVKIQSFLGGAPTEDLKALSQQNVSMDLATFMKLRTDAVLPLTVAEVQKLLGPHVEGLKAEERHRPVRDWILRQRQDDLDTLGLGLQGGIPNGYLVLDLSVQGGRGGQARAGGRAGGVEVGALSHPSLCRGPLGDALPPRTWTCSHRPGTAPSLHPGLRAPLPCWPQPCWGSPPGQEQARVIPVPPQENSRSVNGNMPPADT

SEQ ID NO: 5993 - protein, 622 aa, Homo sapiens
MALPTARPLLGSCGTPALGSLLFLLFSLGWVQPSRTLAGETGQEAAPLDGVLANPPNISSLSPRQLLGFPCAEVSGLSTERVRELAVALAQKNVKLSTEQLRCLAHRLSEPPEDLDALPLDLLLFLNPDAFSGPQACTRFFSRITKANVDLLPRGAPERQRLLPAALACWGVRGSLLSEADVRALGGLACDLPGRFVAESAEVLLPRLVSCPGPLDQDQQEAARAALQGGGPPYGPPSTWSVSTMDALRGLLPVLGQPIIRSIPQGIVAAWRQRSSRDPSWRQPERTILRPRFRREVEKTACPSGKKAREIDESLIFYKKWELEACVDAALLATQMDRVNAIPFTYEQLDVLKHKLDELYPQGYPESVIQHLGYLFLKMSPEDIRKWNVTSLETLKALLEVNKGHEMSPQVATLIDRFVKGRGQLDKDTLDTLTAFYPGYLCSLSPEELSSVPPSSIWAVRPQDLDTCDPRQLDVLYPKARLAFQNMNGSEYFVKIQSFLGGAPTEDLKALSQQNVSMDLATFMKLRTDAVLPLTVAEVQKLLGPHVEGLKAEERHRPVRDWILRQRQDDLDTLGLGLQGGIPNGYLVLDLSVQEALSGTPCLLGPGPVLTVLALLLASTLA

SEQ ID NO: 5994 - protein, 232 aa, Homo sapiens
MHRRRSRSCREDQKPVMDDQRDLISNNEQLPMLGRRPGAPESKCSRGALYTGFSILVTLLLAGQATTAYFLYQQQGRLDKLTVTSQNLQLENLRMKLPKPPKPVSKMRMATPLLMQALPMGALPQGPMQNATKYGNMTEDHVMHLLQNADPLKVYPPLKGSFPENLRHLKNTMETIDWKVFESWMHHWLLFEMSRHSLEQKPTDAPPKESLELEDPSSGLGVTKQDLGPVPM

SEQ ID NO: 5995 - protein, 296 aa, Homo sapiens
MHRRRSRSCREDQKPVMDDQRDLISNNEQLPMLGRRPGAPESKCSRGALYTGFSILVTLLLAGQATTAYFLYQQQGRLDKLTVTSQNLQLENLRMKLPKPPKPVSKMRMATPLLMQALPMGALPQGPMQNATKYGNMTEDHVMHLLQNADPLKVYPPLKGSFPENLRHLKNTMETIDWKVFESWMHHWLLFEMSRHSLEQKPTDAPPKVLTKCQEEVSHIPAVHPGSFRPKCDENGNYLPLQCYGSIGYCWCVFPNGTEVPNTRSRGHHNCSESLELEDPSSGLGVTKQDLGPVPM

SEQ ID NO: 5996 - protein, 524 aa, Homo sapiens [sequence omitted]

SEQ ID NO: 5997 - protein, 645 aa, Homo sapiens
MSCQISCKSRGRGGGGGGFRGFSSGSAVVSGGSRRSTSSFSCLSRHGGGGGGFGGGGFGSRSLVGLGGTKSISISVAGGGGGFGAAGGFGGRGGGFGGGSGFGGGSGFGGGSGFSGGGFGGGGFGGGRFGGFGGPGGVGGLGGPGGFGPGGYPGGIHEVSVNQSLLQPLNVKVDPEIQNVKAQEREQIKTLNNKFASFIDKVRFLEQQNQVLQTKWELLQQMNVGTRPINLEPIFQGYIDSLKRYLDGLTAERTSQNSELNNMQDLVEDYKKKYEDEINKRTAAENDFVTLKKDVDNAYMIKVELQSKVDLLNQEIEFLKVLYDAEISQIHQSVTDTNVILSMDNSRNLDLDSIIAEVKAQYEEIAQRSKEEAEALYHSKYEELQVTVGRHGDSLKEIKIEISELNRVIQRLQGEIAHVKKQCKNVQDAIADAEQRGEHALKDARNKLNDLEEALQQAKEDLARLLRDYQELMNVKLALDVEIATYRKLLEGEECRMSGDLSSNVTVSVTSSTISSNVASKAAFGGSGGRGSSSGGGYSSGSSSYGSGGRQSGSRGGSGGGGSISGGGYGSGGGSGGRYGSGGGSKGGSISGGGYGSGGGKHSSGGGSRGGSSSGGGYGSGGGGSSSVKGSSGEAFGSSVTFSFR

SEQ ID NO: 5998 - protein, 644 aa, Homo sapiens
MSRQFSSRSGYRSGGGFSSGSAGIINYQRRTTSSSTRRSGGGGGRFSSCGGGGGSFGAGGGFGSRSLVNLGGSKSISISVARGGGRGSGFGGGYGGGGFGGGGFGGGGFGGGGIGGGGFGGFGSGGGGFGGGGFGGGGYGGGYGPVCPPGGIQEVTINQSLLQPLNVEIDPEIQKVKSREREQIKSLNNQFASFIDKVRFLEQQNQVLQTKWELLQQVDTSTRTHNLEPYFESFINNLRRRVDQLKSDQSRLDSELKNMQDMVEDYRNKYEDEINKRTNAENEFVTIKKDVDGAYMTKVDLQAKLDNLQQEIDFLTALYQAELSQMQTQISETNVILSMDNNRSLDLDSIIAEVKAQYEDIAQKSKAEAESLYQSKYEELQITAGRHGDSVRNSKIEISELNRVIQRLRSEIDNVKKQISNLQQSISDAEQRGENALKDAKNKLNDLEDALQQAKEDLARLLRDYQELMNTKLALDLEIATYRTLLEGEESRMSGECAPNVSVSVSTSHTTISGGGSRGGGGGGYGSGGSSYGSGGGSYGSGGGGGGGRGSYGSGGSSYGSGGGSYGSGGGGGGHGSYGSGSSSGGYRGGSGGGGGGSSGGRGSGGGSSGGSIGGRGSSSGGVKSSGGSSSVRFVSTTYSGVTR

SEQ ID NO: 5999 - protein, 1031 aa, Homo sapiens
MPPGRWHAAYPAQAQSSRERGRLQTVKKEEEDESYTPVQAARPQTLNRPGQELFRQLFRQLRYHESSGPLETLSRLRELCRWWLRPDVLSKAQILELLVLEQFLSILPGELRVWVQLHNPESGEEAVALLEELQRDLDGTSWRDPGPAQSPDVHWMGTGALRSAQIWSLASPLRSSSALGDHLEPPYEIEARDFLAGQSDTPAAQMPALFPREGCPGDQVTPTRSLTAQLQETMTFKDVEVTFSQDEWGWLDSAQRNLYRDVMLENYRNMASLVGPFTKPALISWLEAREPWGLNMQAAQPKGNPVAAPTGDDLQSKTNKFILNQEPLEEAETLAVSSGCPATSVSEGIGLRESFQQKSRQKDQCENPIQVRVKKEETNFSHRTGKDSEVSGSNSLDLKHVTYLRVSGRKESLKHGCGKHFRMSSHHYDYKKYGKGLRHMIGGFSLHQRIHSGLKGNKKDVCGKDFSLSSHHQRGQSLHTVGVSFKCSDCGRTFSHSSHLAYHQRLHTQEKAFKCRVCGKAFRWSSNCARHEKIHTGVKPYKCDLCEKAFRRLSAYRLHRETHAKKKFLELNQYRAALTYSSGFDHHLGDQSGEKLFDCSQCRKSFHCKSYVLEHQRIHTQEKPYKCTKCRKTFRWRSNFTRHMRLHEEEKFYKQDECREGFRQSPDCSQPQGAPAVEKTFLCQQCGKTFTRKKTLVDHQRIHTGEKPYQCSDCGKDFAYRSAFIVHKKKHAMKRKPEGGPSFSQDTVFQVPQSSHSKEEPYKCSQCGKAFRNHSFLLIHQRVHTGEKPYKCRECGKAFRWSSNLYRHQRIHSLQKQYDCHESEKTPNVEPKILTGEKRFWCQECGKTFTRKRTLLDHKGIHSGEKRYKCNLCGKSYDRNYRLVNHQRIHSTERPFKCQWCGKEFIGRHTLSSHQRKHTRAAQAERSPPARSSSQDTKLRLQKLKPSEEMPLEDCKEACSQSSRLTGLQDISIGKKCHKCSICGKTFNKSSQLISHKRFHTRERPFKCSKCGKTFRWSSNLARHMKNHIRD

SEQ ID NO: 6000 - protein, 1116 aa, Homo sapiens [sequence omitted]

SEQ ID NO: 6001 - protein, 894 aa, Homo sapiens
MAWRCPRMGRVPLAWCLALCGWACMAPRGTQAEESPFVGNPGNITGARGLTGTLRCQLQVQGEPPEVHWLRDGQILELADSTQTQVPLGEDEQDDWIVVSQLRITSLQLSDTGQYQCLVFLGHQTFVSQPGYVGLEGLPYFLEEPEDRTVAANTPFNLSCQAQGPPEPVDLLWLQDAVPLATAPGHGPQRSLHVPGLNKTSSFSCEAHNAKGVTTSRTATITVLPQQPRNLHLVSRQPTELEVAWTPGLSGIYPLTHCTLQAVLSDDGMGIQAGEPDPPEEPLTSQASVPPHQLRLGSLHPHTPYHIRVACTSSQGPSSWTHWLPVETPEGVPLGPPENISATRNGSQAFVHWQEPRAPLQGTLLGYRLAYQGQDTPEVLMDIGLRQEVTLELQGDGSVSNLTVCVAAYTAAGDGPWSLPVPLEAWRPGQAQPVHQLVKEPSTPAFSWPWWYVLLGAVVAAACVLILALFLVHRRKKETRYGEVFEPTVERGELVVRYRVRKSYSRRTTEATLNSLGISEELKEKLRDVMVDRHKVALGKTLGEGEFGAVMEGQLNQDDSILKVAVKTMKIAICTRSELEDFLSEAVCMKEFDHPNVMRLIGVCFQGSERESFPAPVVILPFMKHGDLHSFLLYSRLGDQPVYLPTQMLVKFMADIASGMEYLSTKRFIHRDLAARNCMLNENMSVCVADFGLSKKIYNGDYYRQGRIAKMPVKWIAIESLADRVYTSKSDVWSFGVTMWEIATRGQTPYPGVENSEIYDYLRRGNRLKQPADCLDGLYALMSRCWELNPQDRPSFTELREDLENTLKALPPAQEPDEILYVNMDEGGGYPEPPGAAGGADPPTQPDPKDSCSCLTAAEVHPAGRYVLCPSTTPSPAQPADRGSPAAPGQEDGA

SEQ ID NO: 6002 - protein, 885 aa, Homo sapiens
MAWRCPRMGRVPLAWCLALCGWACMAPRGTQAEESPFVGNPGNITGARGLTGTLRCQLQVQGEPPEVHWLRDGQILELADSTQTQVPLGEDEQDDWIVVSQLRITSLQLSDTGQYQCLVFLGHQTFVSQPGYVGLEGLPYFLEEPEDRTVAANTPFNLSCQAQGPPEPVDLLWLQDAVPLATAPGHGPQRSLHVPGLNKTSSFSCEAHNAKGVTTSRTATITVLPQQPRNLHLVSRQPTELEVAWTPGLSGIYPLTHCTLQAVLSDDGMGIQAGEPDPPEEPLTSQASVPPHQLRLGSLHPHTPYHIRVACTSSQGPSSWTHWLPVETPEGVPLGPPENISATRNGSQAFVHWQEPRAPLQGTLLGYRLAYQGQDTPEVLMDIGLRQEVTLELQGDGSVSNLTVCVAAYTAAGDGPWSLPVPLEAWRPVKEPSTPAFSWPWWYVLLGAVVAAACVLILALFLVHRRKKETRYGEVFEPTVERGELVVRYRVRKSYSRRTTEATLNSLGISEELKEKLRDVMVDRHKVALGKTLGEGEFGAVMEGQLNQDDSILKVAVKTMKIAICTRSELEDFLSEAVCMKEFDHPNVMRLIGVCFQGSERESFPAPVVILPFMKHGDLHSFLLYSRLGDQPVYLPTQMLVKFMADIASGMEYLSTKRFIHRDLAARNCMLNENMSVCVADFGLSKKIYNGDYYRQGRIAKMPVKWIAIESLADRVYTSKSDVWSFGVTMWEIATRGQTPYPGVENSEIYDYLRQGNRLKQPADCLDGLYALMSRCWELNPQDRPSFTELREDLENTLKALPPAQEPDEILYVNMDEGGGYPEPPGAAGGADPPTQPDPKDSCSCLTAAEVHPAGRYVLCPSTTPSPAQPADRGSPAAPGQEDGA

SEQ ID NO: 6003 - protein, 415 aa, Homo sapiens
MQMSYAIRCAFYQLLLAALMLVAMLQLLYLSLLSGLHGQEEQDQYFEFFPPSPRSVDQVKAQLRTALASGGVLDASGDYRVYRGLLKTTMDPNDVILATHASVDNLLHLSGLLERWEGPLSVSVFAATKEEAQLATVLAYALSSHCPDMRARVAMHLVCPSRYEAAVPDPREPGEFALLRSCQEVFDKLARVAQPGINYALGTNVSYPNNLLRNLAREGANYALVIDVDMVPSEGLWRGLREMLDQSNQWGGTALVVPAFEIRRARRMPMNKNELVQLYQVGEVRPFYYGLCTPCQAPTNYSRWVNLPEESLLRPAYVVPWQDPWEPFYVAGGKVPTFDERFRQYGFNRISQACELHVAGFDFEVLNEGFLVHKGFKEALKFHPQKEAENQHNKILYRQFKQELKAKYPNSPRRC

SEQ ID NO: 6004 - protein, 312 aa, Homo sapiens
MLRAPGCLLRTSVAPAAALAAALLSSLARCSLLEPRDPVASSLSPYFGTKTRYEDVNPVLLSGPEAPWRDPELLEGTCTPVQLVALIRHGTRYPTVKQIRKLRQLHGLLQARGSRDGGASSTGSRDLGAALADWPLWYADWMDGQLVEKGRQDMRQLALRLASLFPALFSRENYGRLRLITSSKHRCMDSSAAFLQGLWQHYHPGLPPPDVADMEFGPPTVNDKLMRFFDHCEKFLTEVEKNATALYHVEAFKTGPEMQNILKKVAATLQVPVNDLNAGLSQFLLQSSSSLVMQRLFFHCFLSWATSKTRNP

SEQ ID NO: 6005 - protein, 487 aa, Homo sapiens
MLRAPGCLLRTSVAPAAALAAALLSSLARCSLLEPRDPVASSLSPYFGTKTRYEDVNPVLLSGPEAPWRDPELLEGTCTPVQLVALIRHGTRYPTVKQIRKLRQLHGLLQARGSRDGGASSTGSRDLGAALADWPLWYADWMDGQLVEKGRQDMRQLALRLASLFPALFSRENYGRLRLITSSKHRCMDSSAAFLQGLWQHYHPGLPPPDVADMEFGPPTVNDKLMRFFDHCEKFLTEVEKNATALYHVEAFKTGPEMQNILKKVAATLQVPVNDLNADLIQVAFFTCSFDLAIKGVKSPWCDVFDIDDAKVLEYLNDLKQYWKRGYGYTINSRSSCTLFQDIFQHLDKAVEQKQRSQPISSPVILQFGHAETLLPLLSLMGYFKDKEPLTAYNYKKQMHRKFRSGLIVPYASNLIFVLYHCENAKTPKEQFRVQMLLNEKVLPLAYSQETVSFYEDLKNHYKDILQSCQTSEECELARANSTSDEL

SEQ ID NO: 6006 - protein, 487 aa, Homo sapiens
MLRAPGCLLRTSVAPAAALAAALLSSLARCSLLEPRDPVASSLSPYFGTKTRYEDVNPVLLSGPEAPWRDPELLEGTCTPVQLVALIRHGTRYPTVKQIRKLRQLHGLLQPRGSRDGGASSTGSRDLGAALRDWPLWYADWMDGQLVEKGRQDMRHVALRLASLFPALFSRENYGRLRLITSSKHRCMDSSAAFLQGLWQHYHPGLPPPDVADMEFGPPTVNDKLMRFFDHCEKFLTEVEKNATALYHVEAFKTGPEMQNILKKVAATLQVPVNDLNADLIQVAFFTCSFDLAIKGVKSPWCDVFDIDDAKVLEYLNDLKQYWKRGYGYTINSRSSCTLFQDIFQHLDKAVEQKQRSQPISSPVILQFGHAETLLPLLSLMGYFKDKEPLTAYNYKKQMHRKFRSGLIVPYASNLIFVLYHCENAKTPKEQFRVQMLLNEKVLPLAYSQETVSFYEDLKNHYKDILQSCQTSEECELARANSTSDEL

SEQ ID NO: 6007 - protein, 1807 aa, Homo sapiens
MSDTKVKVAVRVRPMNRRELELNTKCVVEMEGNQTVLHPPPSNTKQGESLIFCSFIQVFAFDYCFWSMDESNTTKYAGQEVVFKCLGEGILEKAFQGYNACIFAYGQTGSGKSFSMMGHAEQLGLIPRLCCALFKRISLEQNESQTFKVEVSYMEIYNEKVRDLLDPKGSRQSLKVREHKVLGPYVDGLSQLAVTSFEDIESLMSEGNKSRTVAATNMNEESSRSHAVFNIIITQTLYDLQSGNSGEKVSKVSLVDLAGSERVSKTGAAGERLKEGSNINKSLTTLGLVISSLADQAAGKGKSKFVPYRDSVLTWLLKDNLGGNSQTSMIATISPAADNYEETLSTLRYADRAKRIVNHAVVNEDPNAKVIRELREEVEKLREQLSQAEAMKAPELKEKLEESEKLIKELTVTWEEKLRKTEEIAQERQRQLESMGISLEMSGIKVGDDKCYLVNLNADPALNELLVYYLKDHTRVGADTSQDIQLFGIGIQPQHCEIDIASDGDVTLTPKENARSCVNGTLVCSTTQLWHGDRILWGNNHFFRINLPKRKRRDWLKDFEKETGPPEHDLDAASEASSEPDYNYEFAQMEVIMKTLNSNDPVQNVVQVLEKQYLEEKRSALEEQRLMYERELEQLRQQLSPDRQPQSSGPDRLAYSSQTAQQKVTQWAEERDELFRQSLAKLREQLVKANTLVREANFLAEEMSKLTDYQVTLQIPAANLSANRKRGAIVSEPAIQVRRKGKSTQVWTIEKLENKLIDMRDLYQEWKEKVPEAKRLYGKRGDPFYEAQENHNLIGVANVFLECLFCDVKLQYAVPIISQQGEVAGRLHVEVMRVTGAVPERVVEDDSSENSSESGSLEVVDSSGEIIHRVKKLTCRVKIKEATGLPLNLSNFVFCQYTFWDQCESTVAAPVVDPEVPSPQSKDAQYTVTFSHCKDYVVNVTEEFLEFISDGALAIEVWGHRCAGNGSSIWEVDSLHAKTRTLHDRWNEVTRRIEMWISILELNELGEYAAVELHQAKDVNTGGIFQLRQGHSRRVQVTVKPVQHSGTLPLMVEAILSVSIGCVTARSTKLQRGLDSYQRDDEDGDDMDSYQEEDLNCVRERWSDALIKRREYLDEQIKKVSNKTEKTEDDVEREAQLVEQWVGLTEERNAVLVPAPGSGIPGAPADWIPPPGMETHIPVLFLDLNADDLSANEQLVGPHASGVNSILPKEHGSQFFYLPIIKHSDDEVSATASWDSSVHDSVHLNRVTPQNERIYLIVKTTVQLSHPAAMELVLRKRIAANIYNKQSFTQSLKRRISLKNIFYSCGVTYEIVSNIPKATEEIEDRETLALLAARSENEGTSDGETYIEKYTRGVLQVENILSLERLRQAIKEALSTKARHIRRSLSTPNVHNVSSSRPDLSGFDEDDKGWPENQLDMSDYSSSYQDVACYGTLPRDSPRRNKEGCTSETPHALTVSPFKAFSPQPPKFFKPLMPVKEEHKKRIALEARPLLSQESMPPPQAHNPGCIVPSGSNGSSMPVEHNSKREKKIDSEEEENELEAINRKLISSQPYVPVEFADFSVYNASLENREWFSSKVDLSNSRVLEKEVSRSPTTSSITSGYFSHSASNATLSDMVVPSSDSSDQLAIQTKDADSTEHSTPSLVHDFRPSSNKELTEVEKGLVKDKIIVVPLKENSALAKGSPSSQSIPEKNSKSLCRTGSCSELDACPSKISQPARGFCPREVTVEHTTNILEDHSFTEFMGVSEGKDFDGLTDSSAGELSSRRSLPNKTGGKTVSDGLHHPSQLHSKLENDQVIIPEAAFWVLCCQ

SEQ ID NO: 6008 - protein, 1749 aa, Homo sapiens
MSDTKVKVAVRVRPMNRRELELNTKCVVEMEGNQTVLHPPPSNTKQGERKPPKVFAFDYCFWSMDESNTTKYAGQEVVFKCLGEGILEKAFQGYNACIFAYGQTGSGKSFSMMGHAEQLGLIPRLCCALFKRISLEQNESQTFKVEVSYMEIYNEKVRDLLDPKGSRQSLKVREHKVLGPYVDGLSQLAVTSFEDIESLMSEGNKSRTVAATNMNEESSRSHAVFNIIITQTLYDLQSGNSGEKVSKVSLVDLAGSERVSKTGAAGERLKEGSNINKSLTTLGLVISSLADQAAGKGKSKFVPYRDSVLTWLLKDNLGGNSQTSMIATISPAADNYEETLSTLRYADRAKRIVNHAVVNEDPNAKVIRELREEVEKLREQLSQAEAMKAPELKEKLEESEKLIKELTVTWEEKLRKTEEIAQERQRQLESMGISLEMSGIKVGDDKCYLVNLNADPALNELLVYYLKDHTRVGADTSQDIQLFGIGIQPQHCEIDIASDGDVTLTPKENARSCVNGTLVCSTTQLWHGDRILWGNNHFFRINLPKRKRRDWLKDFEKETGPPEHDLDAASEASSEPDYNYEFAQMEVIMKTLNSNDPVQNVVQVLEKQYLEEKRSALEEQRLMYERELEQLRQQLSPDRQPQSSGPDRLAYSSQTAQQKVTQWAEERDELFRQSLAKLREQLVKANTLVREANFLAEEMSKLTDYQVTLQIPAANLSANRKRGAIVSEPAIQVRRKGKSTQVWTIEKLENKLIDMRDLYQEWKEKVPEAKRLYGKRGDPFYEAQENHNLIGVANVFLECLFCDVKLQYAVPIISQQGEVAGRLHVEVMRVTGAVPERVVEDDSSENSSESGSLEVVDSSGEIIHRVKKLTCRVKIKEATGLPLNLSNFVFCQYTFWDQCESTVAAPVVDPEVPSPQSKDAQYTVTFSHCKDYVVNVTEEFLEFISDGALAIEVWGHRCAGNGSSIWEVDSLHAKTRTLHDRWNEVTRRIEMWISILELNELGEYAAVELHQAKDVNTGGIFQLRQGHSRRVQVTVKPVQHSGTLPLMVEAILSVSIGCVTARSTKLQRGLDSYQEEDLNCVRERWSDALIKRREYLDEQIKKVSNKTEKTEDDVEREAQLVEQWVGLTEERNAVLVPAPGSGIPGAPADWIPPPGMETHIPVLFLDLNADDLSANEQLVGPHASGVNSILPKEHGSQFFYLPIIKHSDDEVSATASWDSSVHDSVHLNRVTPQNERIYLIVKTTVQLSHPAAMELVLRKRIAANIYNKQSFTQSLKRRISLKNIFYSCGVTYEIVSNIPKATEEIEDRETLALLAARSENEGTSDGETYIEKYTRGVLQVENILSLERLRQAVTVKEALSTKARHIRRSLSTPNVHNVSSSRPDLSGFDEDDKGWPENQLDMSDYSSSYQDVACYGTLPRDSPRRNKEGCTSETPHALTVSPFKAFSPQPPKFFKPLMPVKEEHKKRIALEARPLLSQEDSEEEENELEAINRKLISSQPYVPVEFADFSVYNASLENREWFSSKVDLSNSRVLEKEVSRSPTTSSITSGYFSHSASNATLSDMVVPSSDSSDQLAIQTKDADSTEHSTPSLVHDFRPSSNKELTEVEKGLVKDKIIVVPLKENSALAKGSPSSQSIPEKNSKSLCRTGSCSELDACPSKISQPARGFCPREVTVEHTTNILEDHSFTEFMGVSEGKDFDGLTDSSAGELSSRRSLPNKTGGKTVSDGLHHPSQLHSKLENDQGGTTSR

SEQ ID NO: 6009 - protein, 1770 aa, Homo sapiens
MSDTKVKVAVRVRPMNRRELELNTKCVVEMEGNQTVLHPPPSNTKQGERKPPKVFAFDYCFWSMDESNTTKYAGQEVVFKCLGEGILEKAFQGYNACIFAYGQTGSGKSFSMMGHAEQLGLIPRLCCALFKRISLEQNESQTFKVEVSYMEIYNEKVRDLLDPKGSRQSLKVREHKVLGPYVDGLSQLAVTSFEDIESLMSEGNKSRTVAATNMNEESSRSHAVFNIIITQTLYDLQSGNSGEKVSKVSLVDLAGSERVSKTGAAGERLKEGSNINKSLTTLGLVISSLADQAAGKGKSKFVPYRDSVLTWLLKDNLGGNSQTSMIATISPAADNYEETLSTLRYADRAKRIVNHAVVNEDPNAKVIRELREEVEKLREQLSQAEAMKAPELKEKLEESEKLIKELTVTWEEKLRKTEEIAQERQRQLESMGISLEMSGIKVGDDKCYLVNLNADPALNELLVYYLKDHTRVGADTSQDIQLFGIGIQPQHCEIDIASDGDVTLTPKENARSCVNGTLVCSTTQLWHGDRILWGNNHFFRINLPKRKRRDWLKDFEKETGPPEHDLDAASEASSEPDYNYEFAQMEVIMKTLNSNDPVQNVVQVLEKQYLEEKRSALEEQRLMYERELEQLRQQLSPDRQPQSSGPDRLAYSSQTAQQKVTQWAEERDELFRQGLAKLREQLVKANTLVREANFLAEEMSKLTDYQVTLQIPAANLSANRKRGAIVSEPAIQVRRKGKSTQVWTIEKLENKLIDMRDLYQEWKEKVPEAKRLYGKRGDPFYEAQENHNLIGVANVFLECLFCDVKLQYAVPIISQQGEVAGRLHVEVMRVTGAVPERVVEDDSSENSSESGSLEVVDSSGEIIHRVKKLTCRVKIKEATGLPLNLSNFVFCQYTFWDQCESTVAAPVVDPEVPSPQSKDAQYTVAFSHCKDYVVNVTEEFLEFISDGALAIEVWGHRCAGNGSSIWEVDSLHAKTRTLHDRWNEVTRRIEMWISILELNELGEYAAVELHQAKDVNTGGIFQLRQGHSRRVQVTVKPVQHSGTLPLMVEAILSVSIGCVTARSTKLQRGLDSYQRDDEDGDDMDSYQEEDLNCVRERWSDALIKRREYLDEQIKKVSNKTEKTEDDVEREAQLVEQWVGLTEERNAVLVPAPGSGIPGAPADWIPPPGMETHIPVLFLDLNADDPSANEQLVGPHASGVNSILPKEHGSQFFYLPIIKHSDDEVSATASWDSSVHDSVHLNRVTPQNERIYLIVKTTVQLSHPAAMELVLRKRIAANIYNKQSFTQSLKRRISLKNIFYSCGVTYEIVSNIPKATEEIEDRETLALLAARSENEGTSDGETYIEKYTRGVLQVENILSLERLRQAVTVKEALSTKARHIRRSLSTPNVHNVSSSRPDLSGFDEDDKGWPENQLDMSDYSSSYQDVACYGTLPRDSPRRNKEGCTSETPHALTVSPFKAFSPQPPKFFKPLMPVKEEHKKRIALEARPLLSQEDSEEEENELEAINRKLISSQPYVPVEFADFSVYNASLENREWFSSKVDLSNSRVLEKEVSRSPTTSSITSGYFSHSASNATLSDMVVPSSDSSDQLAIQTKDADSTEHSTPSLVHDFRPSSNKELTEVEKGLVKDKIIVVPLKENSALAKGSPSSQSIPEKNSKSLCRTGSCSELDACPSKISQPARGFCPREVTVEHTTNILEDHSFTEFMGVSEGKDFDGLTDSSAGELSSRRSLPNKTGGKTVSDGLHHPSQLHSKLENDQVIIPEAAFWVLCCQ

SEQ ID NO: 6010 - protein, 1051 aa, Homo sapiens
MGPGPSRAPRAPRLMLCALALMVAAGGCVVSAFNLDTRFLVVKEAGNPGSLFGYSVALHRQTERQQRYLLLAGAPRELAVPDGYTNRTGAVYLCPLTAHKDDCERMNITVKNDPGHHIIEDMWLGVTVASQGPAGRVLVCAHRYTQVLWSGSEDQRRMVGKCYVRGNDLELDSSDDWQTYHNEMCNSNTDYLETGMCQLGTSGGFTQNTVYFGAPGAYNWKGNSYMIQRKEWDLSEYSYKDPEDQGNLYIGYTMQVGSFILHPKNITIVTGAPRHRHMGAVFLLSQEAGGDLRRRQVLEGSQVGAYFGSAIALADLNNDGWQDLLVGAPYYFERKEEVGGAIYVFMNQAGTSFPAHPSLLLHGPSGSAFGLSVASIGDINQDGFQDIAVGAPFEGLGKVYIYHSSSKGLLRQPQQVIHGEKLGLPGLATFGYSLSGQMDVDENFYPDLLVGSLSDHIVLLRARPVINIVHKTLVPRPAVLDPALCTATSCVQVELCFAYNQSAGNPNYRRNITLAYTLEADRDRRPPRLRFAGSESAVFHGFFSMPEMRCQKLELLLMDNLRDKLRPIIISMNYSLPLRMPDRPRLGLRSLDAYPILNQAQALENHTEVQFQKECGPDNKCESNLQMRAAFVSEQQQKLSRLQYSRDVRKLLLSINVTNTRTSERSGEDAHEALLTLVVPPALLLSSVRPPGACQANETIFCELGNPFKRNQRMELLIAFEVIGVTLHTRDLQVQLQLSTSSHQDNLWPMILTLLVDYTLQTSLSMVNHRLQSFFGGTVMGESGMKTVEDVGSPLKYEFQVGPMGEGLVGLGTLVLGLEWPYEVSNGKWLLYPTEITVHGNGSWPCRPPGDLINPLNLTLSDPGDRPSSPQRRRRQLDPGGGQGPPPVTLAAAKKAKSETVLTCATGRAHCVWLECPIPDAPVVTNVTVKARVWNSTFIEDYRDFDRVRVNGWATLFLRTSIPTINMENKTTWFSVDIDSELVEELPAEIELWLVLVAVGAGLLLLGLIILLLWKCGFFKRARTRALYEAKRQKAEMKSQPSETERLTDDY

SEQ ID NO: 6011 - protein, 1066 aa, Homo sapiens
MGPGPSRAPRAPRLMLCALALMVAAGGCVVSAFNLDTRFLVVKEAGNPGSLFGYSVALHRQTERQQRYLLLAGAPRELAVPDGYTNRTGAVYLCPLTAHKDDCERMNITVKNDPGHHIIEDMWLGVTVASQGPAGRVLVCAHRYTQVLWSGSEDQRRMVGKCYVRGNDLELDSSDDWQTYHNEMCNSNTDYLETGMCQLGTSGGFTQNTVYFGAPGAYNWKGNSYMIQRKEWDLSEYSYKDPEDQGNLYIGYTMQVGSFILHPKNITIVTGAPRHRHMGAVFLLSQEAGGDLRRRQVLEGSQVGAYFGSAIALADLNNDGWQDLLVGAPYYFERKEEVGGAIYVFMNQAGTSFPAHPSLLLHGPSGSAFGLSVASIGDINQDGFQDIAVGAPFEGLGKVYIYHSSSKGLLRQPQQVIHGEKLGLPGLATFGYSLSGQMDVDENFYPDLLVGSLSDHIVLLRARPVINIVHKTLVPRPAVLDPALCTATSCVQVELCFAYNQSAGNPNYRRNITLAYTLEADRDRRPPRLRFAGSESAVFHGFFSMPEMRCQKLELLLMDNLRDKLRPIIISMNYSLPLRMPDRPRLGLRSLDAYPILNQAQALENHTEVQFQKECGPDNKCESNLQMRAAFVSEQQQKLSRLQYSRDVRKLLLSINVTNTRTSERSGEDAHEALLTLVVPPALLLSSVRPPGACQANETIFCELGNPFKRNQRMELLIAFEVIGVTLHTRDLQVQLQLSTSSHQDNLWPMILTLLVDYTLQTSLSMVNHRLQSFFGGTVMGESGMKTVEDVGSPLKYEFQVGPMGEGLVGLGTLVLGLEWPYEVSNGKWLLYPTEITVHGNGSWPCRPPGDLINPLNLTLSDPGDRPSSPQRRRRQLDPGGGQGPPPVTLAAAKKAKSETVLTCATGRAHCVWLECPIPDAPVVTNVTVKARVWNSTFIEDYRDFDRVRVNGWATLFLRTSIPTINMENKTTWFSVDIDSELVEELPAEIELWLVLVAVGAGLLLLGLIILLLWKCGFFKRTRYYQIMPKYHAVRIREEERYPPPGSTLPTKKHWVTSWQTRDQYY

SEQ ID NO: 6012 - protein, 384 aa, Homo sapiens
MEGLGRSCLWLRRELSPPRPRLLLLDCRSRELYESARIGGALSVALPALLLRRLRRGSLSVRALLPGPPLQPPPPAPVLLYDQGGGRRRRGEAEAEAEEWEAESVLGTLLQKLREEGYLAYYLQGGFSRFQAECPHLCETSLAGRAGSSMAPVPGPVPVVGLGSLCLGSDCSDAESEADRDSMSCGLDSEGATPPPVGLRASFPVQILPNLYLGSARDSANLESLAKLGIRYILNVTPNLPNFFEKNGDFHYKQIPISDHWSQNLSRFFPEAIEFIDEALSQNCGVLVHCLAGVSRSVTVTVAYLMQKLHLSLNDAYDLVKRKKSNISPNFNFMGQLLDFERSLRLEERHSQEQGSGGQASAASNPPSFFTTPTSDGAFELAPT

SEQ ID NO: 6013 - protein, 354 aa, Homo sapiens
SLASSLRNKEGTLGSKVGYLDVEARGPGEGRGGGGESPPLQPPPPAPVLLYDQGGGRRRRGEAEAEAEEWEAESVLGTLLQKLREEGYLAYYLQGGFSRFQAECPHLCETSLAGRAGSSMAPVPGPVPVVGLGSLCLGSDCSDAESEADRDSMSCGLDSEGATPPPVGLRASFPVQILPNLYLGSARDSANLESLAKLGIRYILNVTPNLPNFFEKNGDFHYKQIPISDHWSQNLSRFFPEAIEFIDEALSQNCGVLVHCLAGVSRSVTVTVAYLMQKLHLSLNDAYDLVKRKKSNISPNFNFMGQLLDFERSLRLEERHSQEQGSGGQASAASNPPSFFTTPTSDGAFELAPT

SEQ ID NO: 6014 - protein, 570 aa, Homo sapiens [sequence omitted]

SEQ ID NO: 6015 - protein, 460 aa, Homo sapiens
MGGLLGRQRLLLRMGGGRLGAPMERHGRASATSVSSAGEQAAGDPEGRRQEPLRRRASSASVPAVGASAEGTRRDRLGSYSGPTSVSRQRVESLRKKRPLFPWFGLDIGGTLVKLVYFEPKDITAEEEEEEVESLKSIRKYLTSNVAYGSTGIRDVHLELKDLTLCGRKGNLHFIRFPTHDMPAFIQMGRDKNFSSLHTVFCATGGGAYKFEQDFLTIGDLQLCKLDELDCLIKGILYIDSVGFNGRSQCYYFENPADSEKCQKLPFDLKNPYPLLLVNIGSGVSILAVYSKDNYKRVTGTSLGGGTFFGLCCLLTGCTTFEEALEMASRGDSTKVDKLVRDIYGGDYERFGLPGWAVASSFGNMMSKEKREAVSKEDLARATLITITNNIGSIARMCALNENINQVVFVGNFLRINTIAMRLLAYALDYWSKGQLKALFSEHEGYFGAVGALLELLKIP

SEQ ID NO: 6016 - protein, 279 aa, Homo sapiens
MPAFIQMGRDKNFSSLHTVFCATGGGAYKFEQDFLTIGDLQLCKLDELDCLIKGILYIDSVGFNGRSQCYYFENPADSEKCQKLPFDLKNPYPLLLVNIGSGVSILAVYSKDNYKRVTGTSLGGGTFFGLCCLLTGCTTFEEALEMASRGDSTKVDKLVRDIYGGDYERFGLPGWAVASSFGNMMSKEKREAVSKEDLARATLITITNNIGSIARMCALNENINQVVFVGNFLRINTIAMRLLAYALDYWSKGQLKALFSEHEGYFGAVGALLELLKIP

SEQ ID NO: 6017 - protein, 1960 aa, Homo sapiens
MQSFREQSSYHGNQQSYPQEVHGSSRLEEFSPRQAQMFQNFGGTGGSSGSSGSGSGGGRRGAAAAAAAMASETSGHQGYQGFRKEAGDFYYMAGNKDPVTTGTPQPPQRRPSGPVQSYGPPRGSSFGNQYGSEGHVGQFQAQHSGLGGVSHYQQDYTGPFSPGSAQYQQQASSQQQQQQVQQLRQQLYQSHQPLPQATGKPASSSSHLQPMQRPSTLPSSAAGYQLRVGQFGQHYQSSASSSSSSSFPSPQRFSQSGQSYDGSYNVNAGSQYEGHNVGSNAQAYGTQSNYSYQPQSMKNFEQAKIPQGTQQGQQQQQPQQQQHPSQHVMQYTNAATKLPLQSQVGQYNQPEVPVRSPMQFHQNFSPISNPSPAASVVQSPSCSSTPSPLMQTGENLQCGQGSVPMGSRNRILQLMPQLSPTPSMMPSPNSHAAGFKGFGLEGVPEKRLTDPGLSSLSALSTQVANLPNTVQHMLLSDALTPQKKTSKRPSSSKKADSCTNSEGSSQPEEQLKSPMAESLDGGCSSSSEDQGERVRQLSGQSTSSDTTYKGGASEKAGSSPAQGAQNEPPRLNASPAAREEATSPGAKDMPLSSDGNPKVNEKTVGVIVSREAMTGRVEKPGGQDKGSQEDDPAATQRPPSNGGAKETSHASLPQPEPPGGGGSKGNKNGDNNSNHNGEGNGQSGHSAAGPGFTSRTEPSKSPGSLRYSYKDSFGSAVPRNVSGFPQYPTGQEKGDFTGHGERKGRNEKFPSLLQEVLQGYHHHPDRRYSRSTQEHQGMAGSLEGTTRPNVLVSQTNELASRGLLNKSIGSLLENPHWGPWERKSSSTAPEMKQINLTDYPIPRKFEIEPQSSAHEPGGSLSERRSVICDISPLRQIVRDPGAHSLGHMSADTRIGRNDRLNPTLSQSVILPGGLVSMETKLKSQSGQIKEEDFEQSKSQASFNNKKSGDHCHPPSIKHESYRGNASPGAATHDSLSDYGPQDSRPTPMRRVPGRVGGREGMRGRSPSQYHDFAEKLKMSPGRSRGPGGDPHHMNPHMTFSERANRSSLHTPFSPNSETLASAYHANTRAHAYGDPNAGLNSQLHYKRQMYQQQPEEYKDWSSGSAQGVIAAAQHRQEGPRKSPRQQQFLDRVRSPLKNDKDGMMYGPPVGTYHDPSAQEAGRCLMSSDGLPNKGMELKHGSQKLQESCWDLSRQTSPAKSSGPPGMSSQKRYGPPHETDGHGLAEATQSSKPGSVMLRLPGQEDHSSQNPLIMRRRVRSFISPIPSKRQSQDVKNSSTEDKGRLLHSSKEGADKAFNSYAHLSHSQDIKSIPKRDSSKDLPSPDSRNCPAVTLTSPAKTKILPPRKGRGLKLEAIVQKITSPNIRRSASSNSAEAGGDTVTLDDILSLKSGPPEGGSVAVQDADIEKRKGEVASDLVSPANQELHVEKPLPRSSEEWRGSVDDKVKTETHAETVTAGKEPPGAMTSTTSQKPGSNQGRPDGSLGGTAPLIFPDSKNVPPVGILAPEANPKAEEKENDTVTISPKQEGFPPKGYFPSGKKKGRPIGSVNKQKKQQQPPPPPPQPPQIPEGSADGEPKPKKQRQRRERRKPGAQPRKRKTKQAVPIVEPQEPEIKLKYATQPLDKTDAKNKSFYPYIHVVNKCELGAVCTIINAEEEEQTKLVRGRKGQRSLTPPPSSTESKALPASSFMLQGPVVTESSVMGHLVCCLCGKWASYRNMGDLFGPFYPQDYAATLPKNPPPKRATEMQSKVKVRHKSASNGSKTDTEEEEEQQQQQKEQRSLAAHPRFKRRHRSEDCGGGPRSLSRGLPCKKAATEGSSEKTVLDSKPSVPTTSEGGPELELQIPELPLDSNEFWVHEGCILWANGIYLVCGRLYGLQEALEIAREMKCSHCQEAGATLGCYNKGCSFRYHYPCAIDADCLLHEENFSVRCPKHKPPLPCPLPPLQNKTAKGSLSTEQSERG

SEQ ID NO: 6018 - protein, 1938 aa, Homo sapiens
MQSFREQSSYHGNQQSYPQEVHGSSRLEEFSPRQAQMFQNFGGTGGSSGSSGSGSGGGRRGAAAAAAAMASETSGHQGYQGFRKEAGDFYYMAGNKDPVTTGTPQPPQRRPSGPVQSYGPPRGSSFGNQYGSEGHVGQFQAQHSGLGGVSHYQQDYTGPFSPGSAQYQQQASSQQQQQQVQQLRQQLYQSHQPLPQATGKPASSSSHLQPMQRPSTLPSSAAGYQLRVGQFGQHYQSSASSSSSSSFPSPQRFSQSGQSYDGSYNVNAGSQYEGHNVGSNAQAYGTQSNYSYQPQSMKNFEQAKIPQGTQQGQQQQQPQQQQHPSQHVMQYTNAATKLPLQSQVGQYNQPEVPVRSPMQFHQNFSPISNPSPAASVVQSPSCSSTPSPLMQTGENLQCGQGSVPMGSRNRILQLMPQLSPTPSMMPSPNSHAAGFKGFGLEGVPEKRLTDPGLSSLSALSTQVANLPNTVQHMLLSDALTPQKKTSKRPSSSKKADSCTNSEGSSQPEEQLKSPMAESLDGGCSSSSEDQGERVRQLSGQSTSSDTTYKGGASEKAGSSPAQGAQNEPPRLNASPAAREEATSPGAKDMPLSSDGNPKVNEKTVGVIVSREAMTGRVEKPGGQDKGSQEDDPAATQRPPSNGGAKETSHASLPQPEPPGGGGSKGNKNGDNNSNHNGEGNGQSGHSAAGPGFTSRTEPSKSPGSLRYSYKDSFGSAVPRNVSGFPQYPTGQEKGDFTGHGERKGRNEKFPSLLQEVLQGYHHHPDRRYSRSTQEHQGMAGSLEGTTRPNVLVSQTNELASRGLLNKSIGSLLENPHWGPWERKSSSTAPEMKQINLTDYPIPRKFEIEPQSSAHEPGGSLSERRSVICDISPLRQIVRDPGAHSLGHMSADTRIGRNDRLNPTLSQSVILPGGLVSMETKLKSQSGQIKEEDFEQSKSQASFNNKKSGDHCHPPSIKHESYRGNASPGAATHDSLSDYGPQDSRPTPMRRVPGRVGGREGMRGRSPSQYHDFAEKLKMSPGRSRGPGGDPHHMNPHMTFSERANRSSLHTPFSPNSETLASAYHANTRAHAYGDPNAGLNSQLHYKRQMYQQQPEEYKDWSSGSAQGVIAAAQHRQEGPRKSPRQQQFLDRVRSPLKNDKDGMMYGPPVGTYHDPSAQEAGRCLMSSDGLPNKGMELKHGSQKLQESCWDLSRQTSPAKSSGPPGMSSQKRYGPPHETDGHGLAEATQSSKPGSVMLRLPGQEDHSSQNPLIMRRRVRSFISPIPSKRQSQDVKNSSTEDKGRLLHSSKEGADKAFNSYAHLSHSQDIKSIPKRDSSKDLPSPDSRNCPAVTLTSPAKTKILPPRKGRGLKLEAIVQKITSPNIRRSASSNSAEAGGDTVTLDDILSLKSGPPEGGSVAVQDADIEKRKGEVASDLVSPANQELHVEKPLPRSSEEWRGSVDDKVKTETHAETVTAGKEPPGAMTSTTSQKPGSNQGRPDGSLGGTAPLIFPDSKNVPPVGILAPEANPKAEEKENDTVTISPKQEGFPPKGYFPSGKKKGRPIGSVNKQKKQQQPPPPPPQPPQIPEGSADGEPKPKKQRQRRERRKPGAQPRKRKTKQAVPIVEPQEPEIKLKYATQPLDKTDAKNKSFYPYIHVVNKCELGAVCTIINAEEEEQTKLVRGRKGQRSLTPPPSSTESKALPASSFMLQGPVVTESSVMGHLVCCLCGKWASYRNMGDLFGPFYPQDYAATLPKNPPPKRATEMQSKVKVRHKSASNGSKTDTEEEEEQQQQQKEQRSLAAHPRFKRRHRSEDCGGGPRSLSRGLPCKKAATEGSSEKTVLDSKPSVPTTSEGGPELELQIPELPLDSNEFWVHEGCILWANGIYLVCGRLYGLQEALEIAREMKCSHCQEAGATLGCYNKGCSFRYHYPCAIDADCLLHEENFSVRCPKHKVRLWR

SEQ ID NO: 6019 - protein, 320 aa, Homo sapiens
MLRRLRKGNLPIRSIIPNHADKERFATRCKAATVLLYDEATAEWQPEPGAPASVLGLLLQKLRDDGCQAYYLQGGFNKFQTEYSEHCETNVDSSSSPSSSPPTSVLGLGGLRISSDCSDGESDRELPSSATESDGSPVPSSQPAFPVQILPYLYLGCAKDSTNLDVLGKYGIKYILNVTPNLPNAFEHGGEFTYKQIPISDHWSQNLSQFFPEAISFIDEARSKKCGVLVHCLAGISRSVTVTVAYLMQKMNLSLNDAYDFVKRKKSNISPNFNFMGQLLDFERTLGLSSPCDNHASSEQLYFSTPTNHNLFPLNTLEST

SEQ ID NO: 6020 - protein, 419 aa, Homo sapiens
MKNQLRGPPARAHMSTSGAAAAGGTRAGSEPGAGSGSGAGTGAGAATGAGAMPCKSAEWLQEELEARGGASLLLLDCRPHELFESSHIETAINLAIPGLMLRRLRKGNLPIRSIIPNHADKERFATRCKAATVLLYDEATAEWQPEPGAPASVLGLLLQKLRDDGCQAYYLQGGFNKFQTEYSEHCETNVDSSSSPSSSPPTSVLGLGGLRISSDCSDGESDRELPSSATESDGSPVPSSQPAFPVQILPYLYLGCAKDSTNLDVLGKYGIKYILNVTPNLPNAFEHGGEFTYKQIPISDHWSQNLSQFFPEAISFIDEARSKKCGVLVHCLAGISRSVTVTVAYLMQKMNLSLNDAYDFVKRKKSNISPNFNFMGQLLDFERTLGLSSPCDNHASSEQLYFSTPTNHNLFPLNTLEST

SEQ ID NO: 6021 - protein, 235 aa, Homo sapiens
MIDTLRPVPFASEMAISKTVAWLNEQLELGNERLLLMDCRPQELYESSHIESAINVAIPGIMLRRLQKGNLPVRALFTRGEDRDRFTRRCGTDTVVLYDESSSDWNENTGGESLLGLLLKKLKDEGCRAFYLEDEARGKNCGVLVHCLAGISRSVTVTVAYLMQKLNLSMNDAYDIVKMKKSNISPNFNFMGQLLDFERTLGLSSPCDNRVPAQQLYFTTPSNQNVYQVDSLQST

SEQ ID NO: 6022 - protein, 381 aa, Homo sapiens
MIDTLRPVPFASEMAISKTVAWLNEQLELGNERLLLMDCRPQELYESSHIESAINVAIPGIMLRRLQKGNLPVRALFTRGEDRDRFTRRCGTDTVVLYDESSSDWNENTGGESLLGLLLKKLKDEGCRAFYLEGGFSKFQAEFSLHCETNLDGSCSSSSPPLPVLGLGGLRISSDSSSDIESDLDRDPNSATDSDGSPLSNSQPSFPVEILPFLYLGCAKDSTNLDVLEEFGIKYILNVTPNLPNLFENAGEFKYKQIPISDHWSQNLSQFFPEAISFIDEARGKNCGVLVHCLAGISRSVTVTVAYLMQKLNLSMNDAYDIVKMKKSNISPNFNFMGQLLDFERTLGLSSPCDNRVPAQQLYFTTPSNQNVYQVDSLQST

SEQ ID NO: 6023 - protein, 1061 aa, Homo sapiens
MTTVVVHVDSKAELTTLLEQWEKEHGSGQDMVPILTRMSQLIEKETEEYRKGDPDPFDDRHPGRADPECMLGHLLRILFKNDDFMNALVNAYVMTSREPPLNTAACRLLLDIMPGLETAVVFQEKEGIVENLFKWAREADQPLRTYSTGLLGGAMENQDIAANYRDENSQLVAIVLRRLRELQLQEVALRQENKRPSPRKLSSEPLLPLDEEAVDMDYVAEGEFFIHDAEIQKSALQIIINCVCGPDNRISSIGKFISGTPRRKLPQNPKSSEHTLAKMWNVVQSNNGIKVLLSLLSIKMPITDADQIRALACKALVGLSRSSTVRQIISKLPLFSSCQIQQLMKEPVLQDKRSDHVKFCKYAAELIERVSGKPLLIGTDVSLARLQKADVVAQSRISFPEKELLLLIRNHLISKGLGETATVLTKEADLPMTAASHSSAFTPVTAAASPVSLPRTPRIANGIATRLGSHAAVGASAPSAPTAHPQPRPPQGPLALPGPSYAGNSPLIGRISFIRERPSPCNGRKIRVLRQKSDHGAYSQSPAIKKQLDRHLPSPPTLDSIITEYLREQHARCKNPVATCPPFSLFTPHQCPEPKQRRQAPINFTSRLNRRASFPKYGGVDGGCFDRHLIFSRFRPISVFREANEDESGFTCCAFSARERFLMLGTCTGQLKLYNVFSGQEEASYNCHNSAITHLEPSRDGSLLLTSATWSQPLSALWGMKSVFDMKHSFTEDHYVEFSKHSQDRVIGTKGDIAHIYDIQTGNKLLTLFNPDLANNYKRNCATFNPTDDLVLNDGVLWDVRSAQAIHKFDKFNMNISGVFHPNGLEVIINTEIWDLRTFHLLHTVPALDQCRVVFNHTGTVMYGAMLQADDEDDLMEERMKSPFGSSFRTFNATDYKPIATIDVKRNIFDLCTDTKDCYLAVIENQGSMDALNMDTVCRLYEVGRQRLAEDEDEEEDQEEEEQEEEDDDEDDDDTDDLDELDTDQLLEAELEEDDNNENAGEDGDNDFSPSDEELANLLEEGEDGEDEDSDADEEVELILGDTDSSDNSDLEDDIILSLNE

SEQ ID NO: 6024 - protein, 1511 aa, Homo sapiens
MTTVVVHVDSKAELTTLLEQWEKEHGSGQDMVPILTRMSQLIEKETEEYRKGDPDPFDDRHPGRADPECMLGHLLRILFKNDDFMNALVNAYVMTSREPPLNTAACRLLLDIMPGLETAVVFQEKEGIVENLFKWAREADQPLRTYSTGLLGGAMENQDIAANYRDENSQLVAIVLRRLRELQLQEVALRQENKRPSPRKLSSEPLLPLDEEAVDMDYGDMAVDVVDGDQEEASGDMEISFHLDSGHKTSSRVNSTTKPEDGGLKKNKSAKQGDRENFRKAKQKLGFSSSDPDRMFVELSNSSWSEMSPWVIGTNYTLYPMTPAIEQRLILQYLTPLGEYQELLPIFMQLGSRELMMFYIDLKQTNDVLLTFEALKVKFLKILGHRGFFKNFVFFNLRWSLTLSPRLECSGAILAHCNLRLLGSSDSPASASRVCMHPHNVLSDVVNYTLWLMECSHASGCCHATMFFSICFSFRAVLELFDRYDGLRRLVNLVSTLEILNLEDQGALLSDDEIFASRQTGKHTCMALRKYFEAHLAIKLEQVKQSLQRTEGGILVHPQPPYKACSYTHEQIVEMMEFLIEYGPAQLYWEPAEVFLKLSCVQLLLQLISIACNWKTYYARNDTVRFALDVLAILTVVPKIQLQLAESVDVLDEAGSTVSTVGISIILGVAEGEFFIHDAEIQKSALQIIINCVCGPDNRISSIGKFISGTPRRKLPQNPKSSEHTLAKMWNVVQSNNGIKVLLSLLSIKMPITDADQIRALACKALVGLSRSSTVRQIISKLPLFSSCQIQQLMKEPVLQDKRSDHVKFCKYAAELIERVSGKPLLIGTDVSLARLQKADVVAQSRISFPEKELLLLIRNHLISKGLGETATVLTKEADLPMTAASHSSAFTPVTAAASPVSLPRTPRIANGIATRLGSHAAVGASAPSAPTAHPQPRPPQGPLALPGPSYAGNSPLIGRISFIRERPSPCNGRKIRVLRQKSDHGAYSQSPAIKKQLDRHLPSPPTLDSIITEYLREQHARCKNPVATCPPFSLFTPHQCPEPKQRRQAPINFTSRLNRRASFPKYGGVDGGCFDRHLIFSRFRPISVFREANEDESGFTCCAFSARERFLMLGTCTGQLKLYNVFSGQEEASYNCHNSAITHLEPSRDGSLLLTSATWSQPLSALWGMKSVFDMKHSFTEDHYVEFSKHSQDRVIGTKGDIAHIYDIQTGNKLLTLFNPDLANNYKRNCATFNPTDDLVLNDGVLWDVRSAQAIHKFDKFNMNISGVFHPNGLEVIINTEIWDLRTFHLLHTVPALDQCRVVFNHTGTVMYGAMLQADDEDDLMEERMKSPFGSSFRTFNATDYKPIATIDVKRNIFDLCTDTKDCYLAVIENQGSMDALNMDTVCRLYEVGRQRLAEDEDEEEDQEEEEQEEEDDDEDDDDTDDLDELDTDQLLEAELEEDDNNENAGEDGDNDFSPSDEELANLLEEGEDGEDEDSDADEEVELILGDTDSSDNSDLEDDIILSLNE

SEQ ID NO: 6025 - protein, 1387 aa, Homo sapiens [sequence omitted]

SEQ ID NO: 6026 - protein, 1462 aa, Homo sapiens
MGKTSFRIIFLPTEEGSIESSLFINTSSYGVLSYHVSGIGTRRISTEGSAKQLPNAYFLLPKVQSIQLSQMQAETTNTSLLQVQLECSLHNKVCQQLKGCYLESDDVLRLQMSIMVTMENFSKEFEENTQHLLDHLSIVYVATDESETSDDSAVNMYILHSGNSLIWIQDIRHFSQRDALSLQFEPVLLPTSTTNFTKIASFTCKAATSCDSGIIEDVKKTTHTPTLKACLFSSVAQGYFRMDSSATQFHIETHENTSGLWSIWYRNHFDRSVVLNDVFLSKETKHMLKILNFTGPLFLPPGCWNIFSLKLAVKDIAINLFTNVFLTTNIGAIFAIPLQIYSAPTKEGSLGFEVIAHCGMHYFMGKSKAGNPNWNGSLSLDQSTWNVDSELANKLYERWKKYKNGDVCKRNVLGTTRFAHLKKSKESESFVFFLPRLIAEPGLMLNFSATALRSRMIKYFVVQNPSSWPVSLQLLPLSLYPKPEALVHLLHRWFGTDMQMINFTTGEFQLTEACPYLGTHSEESRFGILHLHLQPLEMKRVGVVFTPADYGKVTSLILIRNNLTVIDMIGVEGFGARELLKVGGRLPGAGGSLRFKVPESTLMDCRRQLKDSKQILSITKNFKVENIGPLPITVSSLKINGYNCQGYGFEVLDCHQFSLDPNTSRDISIVFTPDFTSSWVIRDLSLVTAADLEFRFTLNVTLPHHLLPLCADVVPGPSWEESFWRLTVFFVSLSLLGVILIAFQQAQYILMEFMKTRQRQNASSSSQQNNGPMDVISPHSYKSNCKNFLDTYGPSDKGRGKNCLPVNTPQSRIQNAAKRSPATYGHSQKKHKCSVYYSKHKTSTAAASSTSTTTEEKQTSPLGSSLPAAKEDICTDAMRENWISLRYASGINVNLQKNLTLPKNLLNKEENTLKNTIVFSNPSSECSMKEGIQTCMFPKETDIKTSENTAEFKERELCPLKTSKKLPENHLPRNSPQYHQPDLPEISRKNNGNNQQVPVKNEVDHCENLKKVDTKPSSEKKIHKTSREDMFSEKQDIPFVEQEDPYRKKKLQEKREGNLQNLNWSKSRTCRKNKKRGVAPVSRPPEQSDLKLVCSDFERSELSSDINVRSWCIQESTREVCKADAEIASSLPAAQREAEGYYQKPEKKCVDKFCSDSSSDCGSSSGSVRASRGSWGSWSSTSSSDGDKKPMVDAQHFLPAGDSVSQNDFPSEAPISLNLSHNICNPMTVNSLPQYAEPSCPSLPAGPTGVEEDKGLYSPGDLWPTPPVCVTSSLNCTLENGVPCVIQESAPVHNSFIDWSATCEGQFSSAYCPLELNDYNAFPEENMNYANGFPCPADVQTDFIDHNSQSTWNTPPNMPAAWGHASFISSPPYLTSTRSLSPMSGLFGSIWAPQSDVYENCCPINPTTEHSTHMENQAVVCKEYYPGFNPFRAYMNLDIWTTTANRNANFPLSRDSSYCGNV

SEQ ID NO: 6027 - protein, 427 aa, Homo sapiens
MQFFGRLVNTFSGVTNLFSNPFRVKEVAVADYTSSDRVREEGQLILFQNTPNRTWDCVLVNPRNSQSGFRCANCAENEEGCTPLHLACRKGDGEILVELVQYCHTQMDVTDYKGETVFHYAVQGDNSQVLQLLGRNAVAGLNQVNNQGLTPLHLACQLGKQEMVRVLLLCNARCNIMGPNGYPIHSAMKFSQKGCAEMIISMDSSQIHSKDPRYGASPLHWAKNAEMARMLLKRGCNVNSTSSAGNTALHVAVMRNRFDCAIVLLTHGANADARGEHGNTPLHLAMSKDNVEMIKALIVFGAEVDTPNDFGETPTFLASKIGRLVTRKAILTLLRTVGAEYCFPPIHGVPAEQGSAAPHHPFSLERAQPPPISLNNLGSHPSQAGWWAWGAVSDGTTGSHAHLTGPEASVHPGLHEGREADMQNLSP

SEQ ID NO: 6028 - protein, 752 aa, Homo sapiens
MQFFGRLVNTFSGVTNLFSNPFRVKEVAVADYTSSDRVREEGQLILFQNTPNRTWDCVLVNPRNSQSGFRLFQLELEADALVNFHQYSSQLLPFYESSPQVLHTEVLQHLTDLIRNHPSWSVAHLAVELGIRECFHHSRIISCANCAENEEGCTPLHLACRKGDGEILVELVQYCHTQMDVTDYKGETVFHYAVQGDNSQVLQLLGRNAVAGLNQVNNQGLTPLHLACQLGKQEMVRVLLLCNARCNIMGPNGYPIHSAMKFSQKGCAEMIISMDSSQIHSKDPRYGASPLHWAKNAEMARMLLKRGCNVNSTSSAGNTALHVAVMRNRFDCAIVLLTHGANADARGEHGNTPLHLAMSKDNVEMIKALIVFGAEVDTPNDFGETPTFLASKIGRQLQDLMHISRARKPAFILGSMRDEKRTHDHLLCLDGGGVKGLIIIQLLIAIEKASGVATKDLFDWVAGTSTGGILALAILHSKSMAYMRGMYFRMKDEVFRGSRPYESGPLEEFLKREFGEHTKMTDVRKPKVMLTGTLSDRQPAELHLFRNYDAPETVREPRFNQNVNLRPPAQPSDQLVWRAARSSGAAPTYFRPNGRFLDGGLLANNPTLDAMTEIHEYNQDLIRKGQANKVKKLSIVVSLGTGRSPQVPVTCVDVFRPSNPWELAKTVFGAKELGKMVVDCCTDPDGRAVDRARAWCEMVGIQYFRLNPQLGTDIMLDEVSDTVLVNALWETEVYIYEHREEFQKLIQLLLSP

SEQ ID NO: 6029 - protein, 806 aa, Homo sapiens
MQFFGRLVNTFSGVTNLFSNPFRVKEVAVADYTSSDRVREEGQLILFQNTPNRTWDCVLVNPRNSQSGFRLFQLELEADALVNFHQYSSQLLPFYESSPQVLHTEVLQHLTDLIRNHPSWSVAHLAVELGIRECFHHSRIISCANCAENEEGCTPLHLACRKGDGEILVELVQYCHTQMDVTDYKGETVFHYAVQGDNSQVLQLLGRNAVAGLNQVNNQGLTPLHLACQLGKQEMVRVLLLCNARCNIMGPNGYPIHSAMKFSQKGCAEMIISMDSSQIHSKDPRYGASPLHWAKNAEMARMLLKRGCNVNSTSSAGNTALHVAVMRNRFDCAIVLLTHGANADARGEHGNTPLHLAMSKDNVEMIKALIVFGAEVDTPNDFGETPTFLASKIGRLVTRKAILTLLRTVGAEYCFPPIHGVPAEQGSAAPHHPFSLERAQPPPISLNNLELQDLMHISRARKPAFILGSMRDEKRTHDHLLCLDGGGVKGLIIIQLLIAIEKASGVATKDLFDWVAGTSTGGILALAILHSKSMAYMRGMYFRMKDEVFRGSRPYESGPLEEFLKREFGEHTKMTDVRKPKVMLTGTLSDRQPAELHLFRNYDAPETVREPRFNQNVNLRPPAQPSDQLVWRAARSSGAAPTYFRPNGRFLDGGLLANNPTLDAMTEIHEYNQDLIRKGQANKVKKLSIVVSLGTGRSPQVPVTCVDVFRPSNPWELAKTVFGAKELGKMVVDCCTDPDGRAVDRARAWCEMVGIQYFRLNPQLGTDIMLDEVSDTVLVNALWETEVYIYEHREEFQKLIQLLLSP

SEQ ID NO: 6030 - protein, 616 aa, Homo sapiens
YRLFQLELEADALVNFHQYSSQLLPFYESSPQVLHTEVLQHLTDLIRNHPSWSVAHLAVELGIRECFHHSRIISCANCAENEEGCTPLHLACRKGDGEILVELVQYCHTQMDVTDYKGETVFHYAVQGDNSQVLQLLGRNAVAGLNQVNNQGLTPLHLACQLGKQEMVRVLLLCNARCNIMGPNGYPIHSAMKFSQKGCAEMIISMDSSQIHSKDPRYGASPLHWAKNAEMARMLLKRGCNVNSTSSAGNTALHVAVMRNRFDCAIVLLTHGANADARGEHGNTPLHLAMSHLLCLDGGGVKGLIIIQLLIAIEKASGVATKDLFDWVAGTSTGGILALAILHSKSMAYMRGMYFRMKDEVFRGSRPYESGPLEEFLKREFGEHTKMTDVRKPKVMLTGTLSDRQPAELHLFRNYDAPETVREPRFNQNVNLRPPAQPSDQLVWRAARSSGAAPTYFRPNGRFLDGGLLANNPTLDAMTEIHEYNQDLIRKGQANKVKKLSIVVSLGTGRSPQVPVTCVDVFRPSNPWELAKTVFGAKELGKMVVDCCTDPDGRAVDRARAWCEMVGIQYFRLNPQLGTDIMLDEVSDTVLVNALWETEVYIYEHREEFQKLIQLL

SEQ ID NO: 6031 - protein, 849 aa, Homo sapiens
RSPTSSALRTPKSPPDPPLDIPRVSDSETEGEDGGASPPAPQKMQFFGRLVNTFSGVTNLFSNPFRVKEVAVADYTSSDRVREEGQLILFQNTPNRTWDCVLVNPRNSQSGFRLFQLELEADALVNFHQYSSQLLPFYESSPQVLHTEVLQHLTDLIRNHPSWSVAHLAVELGIRECFHHSRIISCANCAENEEGCTPLHLACRKGDGEILVELVQYCHTQMDVTDYKGETVFHYAVQGDNSQVLQLLGRNAVAGLNQVNNQGLTPLHLACQLGKQEMVRVLLLCNARCNIMGPNGYPIHSAMKFSQKGCAEMIISMDSSQIHSKDPRYGASPLHWAKNAEMARMLLKRGCNVNSTSSAGNTALHVAVMRNRFDCAIVLLTHGANADARGEHGNTPLHLAMSKDNVEMIKALIVFGAEVDTPNDFGETPTFLASKIGRLVTRKAILTLLRTVGAEYCFPPIHGVPAEQGSAAPHHPFSLERAQPPPISLNNLELQDLMHISRARKPAFILGSMRDEKRTHDHLLCLDGGGVKGLIIIQLLIAIEKASGVATKDLFDWVAGTSTGGILALAILHSKSMAYMRGMYFRMKDEVFRGSRPYESGPLEEFLKREFGEHTKMTDVRKPKVMLTGTLSDRQPAELHLFRNYDAPETVREPRFNQNVNLRPPAQPSDQLVWRAARSSGAAPTYFRPNGRFLDGGLLANNPTLDAMTEIHEYNQDLIRKGQANKVKKLSIVVSLGTGRSPQVPVTCVDVFRPSNPWELAKTVFGAKELGKMVVDCCTDPDGRAVDRARAWCEMVGIQYFRLNPQLGTDIMLDEVSDTVLVNALWETEVYIYEHREEFQKLIQLLLSP

SEQ ID NO: 6032 - protein, 453 aa, Homo sapiens
MKLLTRAGSFSRFYSLKVAPKVKATAAPAGAPPQPQDLEFTKLPNGLVIASLENYSPVSRIGLFIKAGSRYEDFSNLGTTHLLRLTSSLTTKGASSFKITRGIEAVGGKLSVTATRENMAYTVECLRGDVDILMEFLLNVTTAPEFRRWEVADLQPQLKIDKAVAFQNPQTHVIENLHAAAYRNALANPLYCPDYRIGKVTSEELHYFVQNHFTSARMALIGLGVSHPVLKQVAEQFLNMRGGLGLSGAKANYRGGEIREQNGDSLVHAAFVAESAVAGSAEANAFSVLQHVLGAGPHVKRGSNTTSHLHQAVAKATQQPFDVSAFNASYSDSGLFGIYTISQATAAGDVIKAAYNQVKTIAQGNLSNTDVQAAKNKLKAGYLMSVESSECFLEEVGSQALVAGSYMPPSTVLQQIDSVANADIINAAKKFVSGQKSMAASGNLGHTPFVDEL

SEQ ID NO: 6033 - protein, 3361 aa, Homo sapiens
MVTHWLPWRQMNLLLQTLRANLKSHQQWLPELSKSSLCYQVTSSRLGRALAELFGLLVKLCVGSPVRQRRSHHAASTTTAPTPAARSTASALTKLLTKGLSWQPPPYTPTPRFRLTFFICSVGFTSPMLFDERKYPYHLMLQKFLCSGGHNALFETFNWALSMGGKVPVSEGLEHSDLPDGTGEFLDAWLMLVEKMVNPTTVLESPHSLPAKLPGGVQNFPQFSALRFLVVTQKAAFTCIKNLWNRKPLKVYGGRMAESMLAILCHILRGEPVIRERLSKEKEGSRGEEDTGQEEGGSRREPQVNQQQLQQLMDMGFTREHAMEALLNTSTMEQATEYLLTHPPPIMGGVVRDLSMSEEDQMMRAIAMSLGQDIPMDQRAESPEEVACRKEEEERKAREKQEEEEAKCLEKFQDADPLEQDELHTFTDTMLPGCFHLLDELPDTVYRVCDLIMTAIKRNGADYRDMILKQVVNQVWEAADVLIKAALPLTTSDTKTVSEWISQMATLPQASNLATRILLLTLLFEELKLPCAWVVESSGILNVLIKLLEVVQPCLQAAKEQKEVQTPKWITPVLLLIDFYEKTAISSKRRAQMTKYLQSNSNNWRWFDDRSGRWCSYSASNNSTIDSAWKSGETSVRFTAGRRRYTVQFTTMVQVNEETGNRRPVMLTLLRVPRLNKNSKNSNGQELEKTLEESKEMDIKRKENKGNDTPLALESTNTEKETSLEETKIGEILIQGLTEDMVTVLIRACVSMLGVPVDPDTLHATLRLCLRLTRDHKYAMMFAELKSTRMILNLTQSSGFNGFTPLVTLLLRHIIEDPCTLRHTMEKVVRSAATSGAGSTTSGVVSGSLGSREINYILRVLGPAACRNPDIFTEVANCCIRIALPAPRGSGTASDDEFENLRIKGPNAVQLVKTTPLKPSPLPVIPDTIKEVIYDMLNALAAYHAPEEADKSDPKPGVMTQEVGQLLQDMGDDVYQQYRSLTRQSSDFDTQSGFSINSQVFAADGASTETSASGTSQGEASTPEESRDGKKDKEGDRASEEGKQKGKGSKPLMPTSTILRLLAELVRSYVGIATLIANYSYTVGQSELIKEDCSVLAFVLDHLLPHTQNAEDKDTPALARLFLASLAAAGSGTDAQVALVNEVKAALGRALAMAESTEKHARLQAVMCIISTIMESCPSTSSFYSSATAKTQHNGMNNIIRLFLKKGLVNDLARVPHSLDLSSPNMANTVNAALKPLETLSRIVNQPSSLFGSKSASSKNKSEQDAQGASQDSSSNQQDPGEPGEAEVQEEDHDVTQTEVADGDIMDGEAETDSVVIAGQPEVLSSQEMQVENELEDLIDELLERDGGSGNSTIIVSRSGEDESQEDVLMDEAPSNLSQASTLQANREDSMNILDPEDEEEHTQEEDSSGSNEDEDDSQDEEEEEEEDEEDDQEDDEGEEGDEDDDDDGSEMELDEDYPDMNASPLVRFERFDREDDLIIEFDNMFSSATDIPPSPGNIPTTHPLMVRHADHSSLTLGSGSSTTRLTQGIGRSQRTLRQLTANTGHTIHVHYPGNRQPNPPLILQRLLGPSAAADILQLSSSLPLQSRGRARLLVGNDDVHIIARSDDELLDDFFHDQSTATSQAGKFVCIPTALTRWTEECKVLDAESMHDCVSVVKVSIVNHLEFLRDEELEERREKRRKQLAEEETKITDKGKEDKENRDQSAQCTASKSNDSTEQNLSDGTPMPDSYPTTPSSTDAATSESKETLGTLQSSQQQPTLPTPPALGEVPQELQSPAGEGGSSTQLLMPVEPEELGPTRPSGEAETTQMELSPAPTITSLSPERAEDSDALTAVSSQLEGSPMDTSSLASCTLEEAVGDTSAAGSSEQPRAGSSTPGDAPPAVAEVQGRSDGSGESAQPPEDSSPPASSESSSTRDSAVAISGADSRGILEEPLPSTSSEEEDPLAGISLPEGVDPSFLAALPDDIRREVLQNQLGIRPPTRTAPSTNSSAPAVVGNPGVTEVSPEFLAALPPAIQEEVLAQQRAEQQRRELAQNASSDTPMDPVTFIQTLPSDLRRSVLEDMEDSVLAVMPPDIAAEAQALRREQEARQRQLMHERLFGHSSTSALSAILRSPAFTSRLSGNRGVQYTRLAVQRGGTFQMGGSSSHNRPSGSNVDTLLRLRGRLLLDHEALSCLLVLLFVDEPKLNTSRLHRVLRNLCYHAQTRHWVIRSLLSILQRSSESELCIETPKLTTSEEKGKKSSKSCGSSSHENRPLDLLHKMESKSSNQLSWLSVSMDAALGCRTNIFQIQRSGGRKHTEKHASGGSTVHIHPQAAPVVCRHVLDTLIQLAKVFPSHFTQQRTKETNCESDRERGNKACSPCSSQSSSSGICTDFWDLLVKLDNMNVSRKGKNSVKSVPVSAGGEGETSPYSLEASPLGQLMNMLSHPVIRRSSLLTEKLLRLLSLISIALPENKVSEAQANSGSGASSTTTATSTTSTTTTTAASTTPTPPTAPTPVTSAPALVAATAISTIVVAASTTVTTPTTATTTVSISPTTKGSKSPAKVSDGGSSSTDFKMVSSGLTENQLQLSVEVLTSHSCSEEGLEDAANVLLQLSRGDSGTRDTVLKLLLNGARHLGYTLCKQIGTLLAELREYNLEQQRRAQCETLSPDGLPEEQPQTTKLKGKMQSRFDMAENVVIVASQKRPLGGRELQLPSMSMLTSKTSTQKFFLRVLQVIIQLRDDTRRANKKAKQTGRLGSSGLGSASSIQAAVRQLEAEADAIIQMVREGQRARRQQQAATSESSQSEASVRREESPMDVDQPSPSAQDTQSIASDGTPQGEKEKEERPPELPLLSEQLSLDELWDMLGECLKELEESHDQHAVLVLQPAVEAFFLVHATERESKPPVRDTRESQLAHIKDEPPPLSPAPLTPATPSSLDPFFSREPSSMHISSSLPPDTQKFLRFAETHRTVLNQILRQSTTHLADGPFAVLVDYIRVLDFDVKRKYFRQELERLDEGLRKEDMAVHVRRDHVFEDSYRELHRKSPEEMKNRLYIVFEGEEGQDAGGLLREWYMIISREMFNPMYALFRTSPGDRVTYTINPSSHCNPNHLSYFKFVGRIVAKAVYDNRLLECYFTRSFYKHILGKSVRYTDMESEDYHFYQGLVYLLENDVSTLGYDLTFSTEVQEFGVCEVRDLKPNGANILVTEENKKEYVHLVCQMRMTGAIRKQLAAFLEGFYEIIPKRLISIFTEQELELLISGLPTIDIDDLKSNTEYHKYQSNSIQIQWFWRALRSFDQADRAKFLQFVTGTSKVPLQGFAALEGMNGIQKFQIHRDDRSTDRLPSAHTCFNQLDLPAYESFEKLRHMLLLAIQECSEGFGLA

SEQ ID NO: 6034 - protein, 739 aa, Homo sapiens
MEGGGGRDEPSACRAGDVNMDDPKKEDILLLADEKFDFDLSLSSSSANEDDEVFFGPFGHKERCIAASLELNNPVPEQPPLPTSESPFAWSPLAGEKFVEVYKEAHLLALHIESSSRNQAAQAAKPEDPRSQGVERFIQESKLKINLFEKEKEMKKSPTSLKRETYYLSDSPLLGPPVGEPRLLASSPALPSSGAQARLTRAPGPPHSAHALPRESCTAHAASQAATQRKPGTKLLLPRAASVRGRSIPGAAEKPKKEIPASPSRTKIPAEKESHRDVLPDKPAPGAVNVPAAGSHLGQGKRAIPVPNKLGLKKTLLKAPGSTSNLARKSSSGPVWSGASSACTSPAVGKAKSSEFASIPANSSRPLSNISKSGRMGPAMLRPALPAGPVGASSWQAKRVDVSELAAEQLTAPPSASPTQPQTPEGGGQWLNSSCAWSESSQLNKTRSIRRRDSCLNSKTKVMPTPTNQFKIPKFSIGDSPDSSTPKLSRAQRPQSCTSVGRVTVHSTPVRRSSGPAPQSLLSAWRVSALPTPASRRCSGLPPMTPKTMPRAVGSPLCVPARRRSSEPRKNSAMRTEPTRESNRKTDSRLVDVSPDRGSPPSRVPQALNFSPEESDSTFSKSTATEVAREEAKPGGDAAPSEALLVDIKLEPLAVTPDAASQPLIDLPLIDFCDTPEAHVAVGSESRPLIDLMTNTPDMNKNVAKPSPVVGQLIDLSSPLIQLSPEADKENVDSPLLKF

SEQ ID NO: 6035 - protein, 333 aa, Homo sapiens
MAAAAAGTATSQRFFQSFSDALIDEDPQAALEELTKALEQKPDDAQYYCQRAYCHILLGNYCVAVADAKKSLELNPNNSTAMLRKGICEYHEKNYAAALETFTEGQKLDSADANFSVWIKRCQEAQNGSESEVWTHQSKIKYDWYQTESQVVITLMIKNVQKNDVNVEFSEKELSALVKLPSGEDYNLKLELLHPIIPEQSTFKVLSTKIEIKLKKPEAVRWEKLEGQGDVPTPKQFVADVKNLYPSSSPYTRNWDKLVGEIKEEEKNEKLEGDAALNRLFQQIYSDGSDEVKRAMNKSFMESGGTVLSTNWSDVGKRKVEINPPDDMEWKKY

SEQ ID NO: 6036 - protein, 1479 aa, Homo sapiens
MAPLLGRKPFPLVKPLPGEEPLFTIPHTQEAFRTREEYEARLERYSERIWTCKSTGSSQLTHKEAWEEEQEVAELLKEEFPAWYEKLVLEMVHHNTASLEKLVDTAWLEIMTKYAVGEECDFEVGKEKMLKVKIVKIHPLEKVDEEATEKKSDGACDSPSSDKENSSQIAQDHQKKETVVKEDEGRRESINDRARRSPRKLPTSLKKGERKWAPPKFLPHKYDVKLQNEDKIISNVPADSLIRTERPPNKEIVRYFIRHNALRAGTGENAPWVVEDELVKKYSLPSKFSDFLLDPYKYMTLNPSTKRKNTGSPDRKPSKKSKTDNSSLSSPLNPKLWCHVHLKKSLSGSPLKVKNSKNSKSPEEHLEEMMKMMSPNKLHTNFHIPKKGPPAKKPGKHSDKPLKAKGRSKGILNGQKSTGNSKSPKKGLKTPKTKMKQMTLLDMAKGTQKMTRAPRNSGGTPRTSSKPHKHLPPAALHLIAYYKENKDREDKRSALSCVISKTARLLSSEDRARLPEELRSLVQKRYELLEHKKRWASMSEEQRKEYLKKKREELKKKLKEKAKERREKEMLERLEKQKRYEDQELTGKNLPAFRLVDTPEGLPNTLFGDVAMVVEFLSCYSGLLLPDAQYPITAVSLMEALSADKGGFLYLNRVLVILLQDEIAEDYGELGMKLSEIPLTLHSVSELVRLCLRRSDVQEESEGSDTDDNKDSAAFEDNEVQDEFLEKLETSEFFELTSEEKLQILTALCHRILMTYSVQDHMETRQQMSAELWKERLAVLKEENDKKRAEKQKRKEMEAKNKENGKVENGLGKTDRKKEIVKFEPQVDTEAEDMISAVKSRRLLAIQAKKEREIQEREMKVKLERQAEEERIRKHKAAAEKAFQEGIAKAKLVMRRTPIGTDRNHNRYWLFSDEVPGLFIEKGWVHDSIDYRFNHHCKDHTVSGDEDYCPRSKKANLGKNASMNTQHGTATEVAVETTTPKQGQNLWFLCDSQKELDELLNCLHPQGIRESQLKERLEKRYQDIIHSIHLARKPNLGLKSCDGNQELLNFLRSDLIEVATRLQKGGLGYVEETSEFEARVISLEKLKDFGECVIALQASVIKKFLQGFMAPKQKRRKLQSEDSAKTEEVDEEKKMVEEAKVASALEKWKTAIREAQTFSRMHVLLGMLDACIKWDMSAENARCKVCRKKGEDDKLILCDECNKAFHLFCLRPALYEVPDGEWQCPACQPATARRNSRGRNYTEESASEDSEDDESDEEEEEEEEEEEEEDYEVAGLRLRPRKTIRGKHSVIPPAARSGRRPGKKPHSTRRSQPKAPPVDDAEVDELVLQTKRSSRRQSLELQKCEEILHKIVKYRFSWPFREPVTRDEAEDYYDVITHPMDFQTVQNKCSCGSYRSVQEFLTDMKQVFTNAEVYNCRGSHVLSCMVKTEQCLVALLHKHLPGHPYVRRKRKKFPDRLAEDEGDSEPEAVGQSRGRRQKK

SEQ ID NO: 6037 - protein, 1483 aa, Homo sapiens
MAPLLGRKPFPLVKPLPGEEPLFTIPHTQEAFRTREEYEARLERYSERIWTCKSTGSSQLTHKEAWEEEQEVAELLKEEFPAWYEKLVLEMVHHNTASLEKLVDTAWLEIMTKYAVGEECDFEVGKEKMLKVKIVKIHPLEKVDEEATEKKSDGACDSPSSDKENSSQIAQDHQKKETVVKEDEGRRESINDRARRSPRKLPTSLKKGERKWAPPKFLPHKYDVKLQNEDKIISNVPADSLIRTERPPNKEIVRYFIRHNALRAGTGENAPWVVEDELVKKYSLPSKFSDFLLDPYKYMTLNPSTKRKNTGSPDRKPSKKSKTDNSSLSSPLNPKLWCHVHLKKSLSGSPLKVKNSKNSKSPEEHLEEMMKMMSPNKLHTNFHIPKKGPPAKKPGKHSDKPLKAKGRSKGILNGQKSTGNSKSPKKGLKTPKTKMKQMTLLDMAKGTQKMTRAPRNSGGTPRTSSKPHKHLPPAALHLIAYYKENKDREDKRSALSCVISKTARLLSSEDRARLPEELRSLVQKRYELLEHKKRWASMSEEQRKEYLKKKREELKKKLKEKAKERREKEMLERLEKQKRYEDQELTGKNLPAFRLVDTPEGLPNTLFGDVAMVVEFLSCYSGLLLPDAQYPITAVSLMEALSADKGGFLYLNRVLVILLQTLLQDEIAEDYGELGMKLSEIPLTLHSVSELVRLCLRRSDVQEESEGSDTDDNKDSAAFEDNEVQDEFLEKLETSEFFELTSEEKLQILTALCHRILMTYSVQDHMETRQQMSAELWKERLAVLKEENDKKRAEKQKRKEMEAKNKENGKVENGLGKTDRKKEIVKFEPQVDTEAEDMISAVKSRRLLAIQAKKEREIQEREMKVKLERQAEEERIRKHKAAAEKAFQEGIAKAKLVMRRTPIGTDRNHNRYWLFSDEVPGLFIEKGWVHDSIDYRFNHHCKDHTVSGDEDYCPRSKKANLGKNASMNTQHGTATEVAVETTTPKQGQNLWFLCDSQKELDELLNCLHPQGIRESQLKERLEKRYQDIIHSIHLARKPNLGLKSCDGNQELLNFLRSDLIEVATRLQKGGLGYVEETSEFEARVISLEKLKDFGECVIALQASVIKKFLQGFMAPKQKRRKLQSEDSAKTEEVDEEKKMVEEAKVASALEKWKTAIREAQTFSRMHVLLGMLDACIKWDMSAENARCKVCRKKGEDDKLILCDECNKAFHLFCLRPALYEVPDGEWQCPACQPATARRNSRGRNYTEESASEDSEDDESDEEEEEEEEEEEEEDYEVAGLRLRPRKTIRGKHSVIPPAARSGRRPGKKPHSTRRSQPKAPPVDDAEVDELVLQTKRSSRRQSLELQKCEEILHMIVKYRFSWPFREPVTRDEAEDYYDVITHPMDFQTVQNKCSCGSYRSVQEFLTDMKQVFTNAEVYNCRGSHVLSCMVKTEQCLVALLHKHLPGHPYVRRKRKKFPDRLAEDEGDSEPEAVGQSRGRRQKK

SEQ ID NO: 6038 - protein, 1483 aa, Homo sapiens
MAPLLGRKPFPLVKPLPGEEPLFTIPHTQEAFRTREEYEARLERYSERIWTCKSTGSSQLTHKEAWEEEQEVAELLKEEFPAWYEKLVLEMVHHNTASLEKLVDTAWLEIMTKYAVGEECDFEVGKEKMLKVKIVKIHPLEKVDEEATEKKSDGACDSPSSDKENSSQIAQDHQKKETVVKEDEGRRESINDRARRSPRKLPTSLKKGERKWAPPKFLPHKYDVKLQNEDKIISNVPADSLIRTERPPNKEIVRYFIRHNALRAGTGENAPWVVEDELVKKYSLPSKFSDFLLDPYKYMTLNPSTKRKNTGSPDRKPSKKSKTDNSSLSSPLNPKLWCHVHLKKSLSGSPLKVKNSKNSKSPEEHLEEMMKMMSPNKLHTNFHIPKKGPPAKKPGKHSDKPLKAKGRSKGILNGQKSTGNSKSPKKGLKTPKTKMKQMTLLDMAKGTQKMTRAPRNSGGTPRTSSKPHKHLPPAALHLIAYYKENKDREDKRSALSCVISKTARLLSSEDRARLPEELRSLVQKRYELLEHKKRWASMSEEQRKEYLKKKREELKKKLKEKAKERREKEMLERLEKQKRYEDQELTGKNLPAFRLVDTPEGLPNTLFGDVAMVVEFLSCYSGLLLPDAQYPITAVSLMEALSADKGGFLYLNRVLVILLQTLLQDEIAEDYGELGMKLSEIPLTLHSVSELVRLCLRRSDVQEESEGSDTDDNKDSAAFEDNEVQDEFLEKLETSEFFELTSEEKLQILTALCHRILMTYSVQDHMETRQQMSAELWKERLAVLKEENDKKRAEKQKRKEMEAKNKENGKVENGLGKTDRKKEIVKFEPQVDTEAEDMISAVKSRRLLAIQAKKEREIQEREMKVKLERQAEEERIRKHKAAAEKAFQEGIAKAKLVMRRTPIGTDRNHNRYWLFSDEVPGLFIEKGWVHDSIDYRFNHHCKDHTVSGDEDYCPRSKKANLGKNASMNTQHGTATEVAVETTTPKQGQNLWFLCDSQKELDELLNCLHPQGIRESQLKERLEKRYQDIIHSIHLARKPNLGLKSCDGNQELLNFLRSDLIEVATRLQKGGLGYVEETSEFEARVISLEKLKDFGECVIALQASVIKKFLQGFMAPKQKRRKLQSEDSAKTEEVDEEKKMVEEAKVASALEKWKTAIREAQTFSRMHVLLGMLDACIKWDMSAENARCKVCRKKGEDDKLILCDECNKAFHLFCLRPALYEVPDGEWQCPACQPATARRNSRGRNYTEESASEDSEDDESDEEEEEEEEEEEEEDYEVAGLRLRPRKTIRGKHSVIPPAARSGRRPGKKPHSTRRSQPKAPPVDDAEVDELVLQTKRSSRRQSLELQKCEEILHKIVKYRFSWPFREPVTRDEAEDYYDVITHPMDFQTVQNKCSCGSYRSVQEFLTDMKQVFTNAEVYNCRGSHVLSCMVKTEQCLVALLHKHLPGHPYVRRKRKKFPDRLAEDEGDSEPEAVGQSRGRRQKK

SEQ ID NO: 6039 - protein, 165 aa, Homo sapiens [sequence omitted]

SEQ ID NO: 6040 - protein, 949 aa, Homo sapiens
MASNHPAFSFHQKQVLRQELTQIQSSLNGGGGHGGKGAPGPGGALPTCPACHKITPRTEAPVSSVSNSLENALHTSAHSTEESLPKRPLGKHSKVSVEKIDLKGLSHTKNDRNVECSFEVLWSDSSITSVTKSSSEVTEFISKLCQLYPEENLEKLIPCLAGPDAFYVERNHVDLDSGLRYLASLPSHVLKNDHVRRFLSTSSPPQQLQSPSPGNPSLSKVGTVMGVSGRPVCGVAGIPSSQSGAQHHGQHPAGSAAPLPHCSHAGSAGSALAYRTQMDTSPAILMPSSLQTPQTQEQNGILDWLRKLRLHKYYPVFKQLSMEKFLSLTEEDLNKFESLTMGAKKKLKTQLELEKEKSERRCLNPSAPPLVTSSGVARVPPTSHVGPVQSGRGSHAAELRVEVEQPHHQLPREGSSSEYSSSSSSPMGVQAREESSDSAEENDRRVEIHLESSDKEKPVMLLNHFTSSSARPTAQVLPVQNEASSNPSGHHPLPPQMLSAASHITPIRMLNSVHKPERGSADMKLLSSSVHSLLSLEERNKGSGPRSSMKVDKSFGSAMMDVLPASAPHQPVQVLSGLSESSSMSPTVSFGPRTKVVHASTLDRVLKTAQQPALVVETSTAATGTPSTVLHAARPPIKLLLSSSVPADSAISGQTSCPNNVQISVPPAIINPRTALYTANTKVAFSAMSSMPVGPLQGGFCANSNTASPSSHPSTSFANMATLPSCPAPSSSPALSSVPESSFYSSSGGGGSTGNIPASNPNHHHHHHHQQPPAPPQPAPPPPGCIVCTSCGCSGSCGSSGLTVSYANYFQHPFSGPSVFTFPFLPFSPMCSSGYVSAQQYGGGSTFPVVHAPYSSSGTPDPVLSGQSTFAVPPMQNFMAGTAGVYQTQGLVGSSNGSSHKKSGNLSCYNCGATGHRAQDCKQPSMDFNRPGTFRLKYAPPAESLDSTD

SEQ ID NO: 6041 - protein, 1638 aa, Homo sapiens
MFNKSFGTPFGGGTGGFGTTSTFGQNTGFGTTSGGAFGTSAFGSSNNTGGLFGNSQTKPGGLFGTSSFSQPATSTSTGFGFGTSTGTANTLFGTASTGTSLFSSQNNAFAQNKPTGFGNFGTSTSSGGLFGTTNTTSNPFGSTSGSLFGPSSFTAAPTGTTIKFNPPTGTDTMVKAGVSTNISTKHQCITAMKEYESKSLEELRLEDYQANRKGPQNQVGAGTTTGLFGSSPATSSATGLFSSSTTNSGFAYGQNKTAFGTSTTGFGTNPGGLFGQQNQQTTSLFSKPFGQATTTQNTGFSFGNTSTIGQPSTNTMGLFGVTQASQPGGLFGTATNTSTGTAFGTGTGLFGQTNTGFGAVGSTLFGNNKLTTFGSSTTSAPSFGTTSGGLFGFGTNTSGNSIFGSKPAPGTLGTGLGAGFGTALGAGQASLFGNNQPKIGGPLGTGAFGAPGFNTTTATLGFGAPQAPVALTDPNASAAQQAVLQQHINSLTYSPFGDSPLFRNPMSDPKKKEERLKPTNPAAQKALTTPTHYKLTPRPATRVRPKALQTTGTAKSHLFDGLDDDEPSLANGAFMPKKSIKKLVLKNLNNSNLFSPVNRDSENLASPSEYPENGERFSFLSKPVDENHQQDGDEDSLVSHFYTNPIAKPIPQTPESAGNKHSNSNSVDDTIVALNMRAALRNGLEGSSEETSFHDESLQDDREEIENNSYHMHPAGIILTKVGYYTIPSMDDLAKITNEKGECIVSDFTIGRKGYGSIYFEGDVNLTNLNLDDIVHIRRKEVVVYLDDNQKPPVGEGLNRKAEVTLDGVWPTDKTSRCLIKSPDRLADINYEGRLEAVSRKQGAQFKEYRPETGSWVFKVSHFSKYGLQDSDEEEEEHPSKTSTKKLKTAPLPPASQTTPLQMALNGKPAPPPQSQSPEVEQLGRVVELDSDMVDITQEPVLDTMLEESMPEDQEPVSASTHIASSLGINPHVLQIMKASLLTDEEDVDMALDQRFSRLPSKADTSQEICSPRLPISASHSSKTRSLVGGLLQSKFTSGAFLSPSVSVQECRTPRAASLMNIPSTSSWSVPPPLTSVFTMPSPAPEVPLKTVGTRRQLGLVPREKSVTYGKGKLLMDMALFMGRSFRVGWGPNWTLANSGEQLNGSHELENHQIADSMEFGFLPNPVAVKPLTESPFKVHLEKLSLRQRKPDEDMKLYQTPLELKLKHSTVHVDELCPLIVPNLGVAVIHDYADWVKEASGDLPEAQIVKHWSLTWTLCEALWGHLKELDSQLNEPREYIQILERRRAFSRWLSCTATPQIEEEVSLTQKNSPVEAVFSYLTGKRISEACSLAQQSGDHRLALLLSQFVGSQSVRELLTMQLVDWHQLQADSFIQDERLRIFALLAGKPVWQLSEKKQINVCSQLDWKRSLAIHLWYLLPPTASISRALSMYEEAFQNTSDSDRYACSPLPSYLEGSGCVIAEEQNSQTPLRDVCFHLLKLYSDSIREKAVRELLTRHCQLLETPESWAKETFLTQKLRVPAKWIHEAKAVRAHMESDKHLEALCLFKAEHWNRCHKLIIRHLASDAIINENYDYLKGFLEDLAPPERSSLIQDWETSGLVYLDYIRVIEMLRHIQQVEHFNDSNIVQVMTWSSYTSK

SEQ ID NO: 6042 - protein, 1712 aa, Homo sapiens
MFNKSFGTPFGGGTGGFGTTSTFGQNTGFGTTSGGAFGTSAFGSSNNTGGLFGNSQTKPGGLFGTSSFSQPATSTSTGFGFGTSTGTANTLFGTASTGTSLFSSQNNAFAQNKPTGFGNFGTSTSSGGLFGTTNTTSNPFGSTSGSLFGPSSFTAAPTGTTIKFNPPTGTDTMVKAGVSTNISTKHQCITAMKEYESKSLEELRLEDYQANRKGPQNQVGAGTTTGLFGSSPATSSATGLFSSSTTNSGFAYGQNKTAFGTSTTGFGTNPGGLFGQQNQQTTSLFSKPFGQATTTQNTGFSFGNTSTIGQPSTNTMGLFGVTQASQPGGLFGTATNTSTGTAFGTGTGLFGQTNTGFGAVGSTLFGNNKLTTFGSSTTSAPSFGTTSGGLFGFGTNTSGNSIFGSKPAPGTLGTGLGAGFGTALGAGQASLFGNNQPKIGGPLGTGAFGAPGFNTTTATLGFGAPQAPVALTDPNASAAQQAVLQQHINSLTYSPFGDSPLFRNPMSDPKKKEERLKPTNPAAQKALTTPTHYKLTPRPATRVRPKALQTTGTAKSHLFDGLDDDEPSLANGAFMPKKSIKKLVLKNLNNSNLFSPVNRDSENLASPSEYPENGERFSFLSKPVDENHQQDGDEDSLVSHFYTNPIAKPIPQTPESAGNKHSNSNSVDDTIVALNMRAALRNGLEGSSEETSFHDESLQDDREEIENNSYHMHPAGIILTKVGYYTIPSMDDLAKITNEKGECIVSDFTIGRKGYGSIYFEGDVNLTNLNLDDIVHIRRKEVVVYLDDNQKPPVGEGLNRKAEVTLDGVWPTDKTSRCLIKSPDRLADINYEGRLEAVSRKQGAQFKEYRPETGSWVFKVSHFSKYGLQDSDEEEEEHPSKTSTKKLKTAPLPPASQTTPLQMALNGKPAPPPQSQSPEVEQLGRVVELDSDMVDITQEPVLDTMLEESMPEDQEPVSASTHIASSLGINPHVLQIMKASLLTDEEDVDMALDQRFSRLPSKADTSQEICSPRLPISASHSSKTRSLVGGLLQSKFTSGAFLSPSVSVQECRTPRAASLMNIPSTSSWSVPPPLTSVFTMPSPAPEVPLKTVGTRRQLGLVPREKSVTYGKGKLLMDMALFMGRSFRVGWGPNWTLANSGEQLNGSHELENHQIADSMEFGFLPNPVAVKPLTESPFKVHLEKLSLRQRKPDEDMKLYQTPLELKLKHSTVHVDELCPLIVPNLGVAVIHDYADWVKEASGDLPEAQIVKHWSLTWTLCEALWGHLKELDSQLNEPREYIQILERRRAFSRWLSCTATPQIEEEVSLTQKNSPVEAVFSYLTGKRISEACSLAQQSGDHRLALLLSQFVGSQSVRELLTMQLVDWHQLQADSFIQDERLRIFALLAGKPVWQLSEKKQINVCSQLDWKRSLAIHLWYLLPPTASISRALSMYEEAFQNTSDSDRYACSPLPSYLEGSGCVIAEEQNSQTPLRDVCFHLLKLYSDRHYDLNQLLEPRSITADPLDYRLSWHLWEVLRALNYTHLSAQCEGVLQASYAGQLESEGLWEWAIFVLLHIDNSGIREKAVRELLTRHCQLLETPESWAKETFLTQKLRVPAKWIHEAKAVRAHMESDKHLEALCLFKAEHWNRCHKLIIRHLASDAIINENYDYLKGFLEDLAPPERSSLIQDWETSGLVYLDYIRVIEMLRHIQQVEHFNDSNIVQVMTWSSYTSK

SEQ ID NO: 6043 - protein, 937 aa, Homo sapiens
MFNKSFGTPFGGGTGGFGTTSTFGQNTGFGTTSGGAFGTSAFGSSNNTGGLFGNSQTKPGGLFGTSSFSQPATSTSTGFGFGTSTGTANTLFGTASTGTSLFSSQNNAFAQNKPTGFGNFGTSTSSGGLFGTTNTTSNPFGSTSGSLFGPSSFTAAPTGTTIKFNPPTGTDTMVKAGVSTNISTKHQCITAMKEYESKSLEELRLEDYQANRKGPQNQVGAGTTTGLFGSSPATSSATGLFSSSTTNSGFAYGQNKTAFGTSTTGFGTNPGGLFGQQNQQTTSLFSKPFGQATTTQNTGFSFGNTSTIGQPSTNTMGLFGVTQASQPGGLFGTATNTSTGTAFGTGTGLFGQTNTGFGAVGSTLFGNNKLTTFGSSTTSAPSFGTTSGGLFGNKPTLTLGTNTNTSNFGFGTNTSGNSIFGSKPAPGTLGTGLGAGFGTALGAGQASLFGNNQPKIGGPLGTGAFGAPGFNTTTATLGFGAPQAPVALTDPNASAAQQAVLQQHINSLTYSPFGDSPLFRNPMSDPKKKEERLKPTNPAAQKALTTPTHYKLTPRPATRVRPKALQTTGTAKSHLFDGLDDDEPSLANGAFMPKKSIKKLVLKNLNNSNLFSPVNRDSENLASPSEYPENGERFSFLSKPVDENHQQDGDEDSLVSHFYTNPIAKPIPQTPESAGNKHSNSNSVDDTIVALNMRAALRNGLEGSSEETSFHDESLQDDREEIENNSYHMHPAGIILTKVGYYTIPSMDDLAKITNEKGECIVSDFTIGRKGYGSIYFEGDVNLTNLNLDDIVHIRRKEVVVYLDDNQKPPVGEGLNRKAEVTLDGVWPTDKTSRCLIKSPDRLADINYEGRLEAVSRKQGAQFKEYRPETGSWVFKVSHFSKYGLQDSDEEEEEHPSKTSTKKLKTAPLPPASQTTPLQMALNGKPAPPPQVEKKGQ

SEQ ID NO: 6044 - protein, 1729 aa, Homo sapiens
MFNKSFGTPFGGGTGGFGTTSTFGQNTGFGTTSGGAFGTSAFGSSNNTGGLFGNSQTKPGGLFGTSSFSQPATSTSTGFGFGTSTGTANTLFGTASTGTSLFSSQNNAFAQNKPTGFGNFGTSTSSGGLFGTTNTTSNPFGSTSGSLFGPSSFTAAPTGTTIKFNPPTGTDTMVKAGVSTNISTKHQCITAMKEYESKSLEELRLEDYQANRKGPQNQVGAGTTTGLFGSSPATSSATGLFSSSTTNSGFAYGQNKTAFGTSTTGFGTNPGGLFGQQNQQTTSLFSKPFGQATTTQNTGFSFGNTSTIGQPSTNTMGLFGVTQASQPGGLFGTATNTSTGTAFGTGTGLFGQTNTGFGAVGSTLFGNNKLTTFGSSTTSAPSFGTTSGGLFGNKPTLTLGTNTNTSNFGFGTNTSGNSIFGSKPAPGTLGTGLGAGFGTALGAGQASLFGNNQPKIGGPLGTGAFGAPGFNTTTATLGFGAPQAPVALTDPNASAAQQAVLQQHINSLTYSPFGDSPLFRNPMSDPKKKEERLKPTNPAAQKALTTPTHYKLTPRPATRVRPKALQTTGTAKSHLFDGLDDDEPSLANGAFMPKKSIKKLVLKNLNNSNLFSPVNRDSENLASPSEYPENGERFSFLSKPVDENHQQDGDEDSLVSHFYTNPIAKPIPQTPESAGNKHSNSNSVDDTIVALNMRAALRNGLEGSSEETSFHDESLQDDREEIENNSYHMHPAGIILTKVGYYTIPSMDDLAKITNEKGECIVSDFTIGRKGYGSIYFEGDVNLTNLNLDDIVHIRRKEVVVYLDDNQKPPVGEGLNRKAEVTLDGVWPTDKTSRCLIKSPDRLADINYEGRLEAVSRKQGAQFKEYRPETGSWVFKVSHFSKYGLQDSDEEEEEHPSKTSTKKLKTAPLPPASQTTPLQMALNGKPAPPPQSQSPEVEQLGRVVELDSDMVDITQEPVLDTMLEESMPEDQEPVSASTHIASSLGINPHVLQIMKASLLTDEEDVDMALDQRFSRLPSKADTSQEICSPRLPISASHSSKTRSLVGGLLQSKFTSGAFLSPSVSVQECRTPRAASLMNIPSTSSWSVPPPLTSVFTMPSPAPEVPLKTVGTRRQLGLVPREKSVTYGKGKLLMDMALFMGRSFRVGWGPNWTLANSGEQLNGSHELENHQIADSMEFGFLPNPVAVKPLTESPFKVHLEKLSLRQRKPDEDMKLYQTPLELKLKHSTVHVDELCPLIVPNLGVAVIHDYADWVKEASGDLPEAQIVKHWSLTWTLCEALWGHLKELDSQLNEPREYIQILERRRAFSRWLSCTATPQIEEEVSLTQKNSPVEAVFSYLTGKRISEACSLAQQSGDHRLALLLSQFVGSQSVRELLTMQLVDWHQLQADSFIQDERLRIFALLAGKPVWQLSEKKQINVCSQLDWKRSLAIHLWYLLPPTASISRALSMYEEAFQNTSDSDRYACSPLPSYLEGSGCVIAEEQNSQTPLRDVCFHLLKLYSDRHYDLNQLLEPRSITADPLDYRLSWHLWEVLRALNYTHLSAQCEGVLQASYAGQLESEGLWEWAIFVLLHIDNSGIREKAVRELLTRHCQLLETPESWAKETFLTQKLRVPAKWIHEAKAVRAHMESDKHLEALCLFKAEHWNRCHKLIIRHLASDAIINENYDYLKGFLEDLAPPERSSLIQDWETSGLVYLDYIRVIEMLRHIQQVEHFNDSNIVQVMTWSSYTSK

SEQ ID NO: 6045 - protein, 920 aa, Homo sapiens
MFNKSFGTPFGGGTGGFGTTSTFGQNTGFGTTSGGAFGTSAFGSSNNTGGLFGNSQTKPGGLFGTSSFSQPATSTSTGFGFGTSTGTANTLFGTASTGTSLFSSQNNAFAQNKPTGFGNFGTSTSSGGLFGTTNTTSNPFGSTSGSLFGPSSFTAAPTGTTIKFNPPTGTDTMVKAGVSTNISTKHQCITAMKEYESKSLEELRLEDYQANRKGPQNQVGAGTTTGLFGSSPATSSATGLFSSSTTNSGFAYGQNKTAFGTSTTGFGTNPGGLFGQQNQQTTSLFSKPFGQATTTQNTGFSFGNTSTIGQPSTNTMGLFGVTQASQPGGLFGTATNTSTGTAFGTGTGLFGQTNTGFGAVGSTLFGNNKLTTFGSSTTSAPSFGTTSGGLFGFGTNTSGNSIFGSKPAPGTLGTGLGAGFGTALGAGQASLFGNNQPKIGGPLGTGAFGAPGFNTTTATLGFGAPQAPVALTDPNASAAQQAVLQQHINSLTYSPFGDSPLFRNPMSDPKKKEERLKPTNPAAQKALTTPTHYKLTPRPATRVRPKALQTTGTAKSHLFDGLDDDEPSLANGAFMPKKSIKKLVLKNLNNSNLFSPVNRDSENLASPSEYPENGERFSFLSKPVDENHQQDGDEDSLVSHFYTNPIAKPIPQTPESAGNKHSNSNSVDDTIVALNMRAALRNGLEGSSEETSFHDESLQDDREEIENNSYHMHPAGIILTKVGYYTIPSMDDLAKITNEKGECIVSDFTIGRKGYGSIYFEGDVNLTNLNLDDIVHIRRKEVVVYLDDNQKPPVGEGLNRKAEVTLDGVWPTDKTSRCLIKSPDRLADINYEGRLEAVSRKQGAQFKEYRPETGSWVFKVSHFSKYGLQDSDEEEEEHPSKTSTKKLKTAPLPPASQTTPLQMALNGKPAPPPQVEKKGQ

SEQ ID NO: 6046 - protein, 1800 aa, Homo sapiens
MFNKSFGTPFGGGTGGFGTTSTFGQNTGFGTTSGGAFGTSAFGSSNNTGGLFGNSQTKPGGLFGTSSFSQPATSTSTGFGFGTSTGTANTLFGTASTGTSLFSSQNNAFAQNKPTGFGNFGTSTSSGGLFGTTNTTSNPFGSTSGSLFGPSSFTAAPTGTTIKFNPPTGTDTMVKAGVSTNISTKHQCITAMKEYESKSLEELRLEDYQANRKGPQNQVGAGTTTGLFGSSPATSSATGLFSSSTTNSGFAYGQNKTAFGTSTTGFGTNPGGLFGQQNQQTTSLFSKPFGQATTTQNTGFSFGNTSTIGQPSTNTMGLFGVTQASQPGGLFGTATNTSTGTAFGTGTGLFGQTNTGFGAVGSTLFGNNKLTTFGSSTTSAPSFGTTSGGLFGFGTNTSGNSIFGSKPAPGTLGTGLGAGFGTALGAGQASLFGNNQPKIGGPLGTGAFGAPGFNTTTATLGFGAPQAPVALTDPNASAAQQAVLQQHINSLTYSPFGDSPLFRNPMSDPKKKEERLKPTNPAAQKALTTPTHYKLTPRPATRVRPKALQTTGTAKSHLFDGLDDDEPSLANGAFMPKKSIKKLVLKNLNNSNLFSPVNRDSENLASPSEYPENGERFSFLSKPVDENHQQDGDEDSLVSHFYTNPIAKPIPQTPESAGNKHSNSNSVDDTIVALNMRAALRNGLEGSSEETSFHDESLQDDREEIENNSYHMHPAGIILTKVGYYTIPSMDDLAKITNEKGECIVSDFTIGRKGYGSIYFEGDVNLTNLNLDDIVHIRRKEVVVYLDDNQKPPVGEGLNRKAEVTLDGVWPTDKTSRCLIKSPDRLADINYEGRLEAVSRKQGAQFKEYRPETGSWVFKVSHFSKYGLQDSDEEEEEHPSKTSTKKLKTAPLPPASQTTPLQMALNGKPAPPPQSQSPEVEQLGRVVELDSDMVDITQEPVLDTMLEESMPEDQEPVSASTHIASSLGINPHVLQIMKASLLTDEEDVDMALDQRFSRLPSKADTSQEICSPRLPISASHSSKTRSLVGGLLQSKFTSGAFLSPSVSVQECRTPRAASLMNIPSTSSWSVPPPLTSVFTMPSPAPEVPLKTVGTRRQLGLVPREKSVTYGKGKLLMDMALFMGRSFRVGWGPNWTLANSGEQLNGSHELENHQIADSMEFGFLPNPVAVKPLTESPFKVHLEKLSLRQRKPDEDMKLYQTPLELKLKHSTVHVDELCPLIVPNLGVAVIHDYADWVKEASGDLPEAQIVKHWSLTWTLCEALWGHLKELDSQLNEPREYIQILERRRAFSRWLSCTATPQIEEEVSLTQKNSPVEAVFSYLTGKRISEACSLAQQSGDHRLALLLSQFVGSQSVRELLTMQLVDWHQLQADSFIQDERLRIFALLAGKPVWQLSEKKQINVCSQLDWKRSLAIHLWYLLPPTASISRALSMYEEAFQNTSDSDRYACSPLPSYLEGSGCVIAEEQNSQTPLRDVCFHLLKLYSDRHYDLNQLLEPRSITADPLDYRLSWHLWEVLRALNYTHLSAQCEGVLQASYAGQLESEGLWEWAIFVLLHIDNSGIREKAVRELLTRHCQLLETPESWAKETFLTQKLRVPAKWIHEAKAVRAHMESDKHLEALCLFKAEHWNRCHKLIIRHLASDAIINENYDYLKGFLEDLAPPERSSLIQDWETSGLVYLDYIRVIEMLRHIQQVDCSGNDLEQLHIKVTSLCSRIEQIQCYSAKDRLAQSDMAKRVANLLRVVLSLHHPPDRTSDSTPDPQRVPLRLLAPHIGRLPMPEDYAMDELRSLTQSYLRELAVGSL

SEQ ID NO: 6047 - protein, 180 aa, Homo sapiens
NNFSTEINTTSILVGPLVSNLEITHTSNLTRVKFSNTIDTTNSQCIRWVTPPTQIVCLPSGIFFVCGTSAYHCLNGFSESMCFLSFLVHPMTIYTEQDLYNYVVPKPRNKRVPILPFVIRAGMLGRLGTGMGSITTSTQFYYKLSQELNGDMERVADSLVTLQDQLNSLAAVVLQNRRAL

SEQ ID NO: 6048 - protein, 1496 aa, Homo sapiens
MSLTSWFLVSSGGTRHRLPREMIFVGRDDCELMLQSRSVDKQHAVINYDASTDEHLVKDLGSLNGTFVNDVRIPEQTYITLKLEDKLRFGYDILKWFYPRLHTNLFTVVQGEMRVPEEALKHEKFTIQLQLSQKSSESELSKSASAKSIDSKVADAATEVQHKTTEALKSEEKAMDISAMPRGTPLYGQPSWWGDDEVDEKRAFKTNGKPEEKNHEAGTSGCGIDAKQVEEQSAAANEEVLFPFCREPSYFEIPTKEFQQPSQITESTIHEIPTKDTPSSHITGAGHASFTIEFDDSTPGKVTIRDHVTKFTSDQRHKSKKSSPGTQDLLGIQTGMMAPENKVADWLAQNNPPQMLWERTEEDSKSIKSDVPVYLKRLKGNKHDDGTQSDSENAGAHRRCSKRATLEEHLRRHHSEHKKLQKVQATEKHQDQAVVFGVDDNQDYNRPVINEKHKDLIKDWALSSAAAVMEERKPLTTSGFHHSEEGTSSSGSKRWVSQWASLAANHTRHDQEERIMEFSAPLPLENETEISESGMTVRSTGSATSLASQGERRRRTLPQLPNEEKSLESHRAKVVTQRSEIGEKQDTELQEKETPTQVYQKDKQDADRPLSKMNRAVNGETLKTGGDNKTLLHLGSSAPGKEKSETDKETSLVKQTLAKLQQQEQREEAQWTPTKLSSKNVSGQTDKCREETFKQESQPPEKNSGHSTSKGDRVAQSESKRRKAEEILKSQTPKGGDKKESSKSLVRQGSFTIEKPSPNIPIELIPHINKQTSSTPSSLALTSASRIRERSESLDPDSSMDTTLILKDTEAVMAFLEAKLREDNKTDEGPDTPSYNRDNSISPESDVDTASTISLVTGETERKSTQKRKSFTSLYKDRCSTGSPSKDVTKSSSSGAREKMEKKTKSRSTDVGSRADGRKFVQSSGRIRQPSVDLTDDDQTSSVPHSAISDIMSSDQETYSCKPHGRTPLTSADEHVHSKLEGSKVTKSKTSPVVSGSSSKSTTLPRPRPTRTSLLRRARLGEASDSELADADKASVASEVSTTSSTSKPPTGRRNISRIDLLAQPRRTRLGSLSARSDSEATISRSSASSRTAEAIIRSGARLVPSDKFSPRIRANSISRLSDSKVKSMTSAHGSASVNSRWRRFPTDYASTSEDEFGSNRNSPKHTRLRTSPALKTTRLQSAGSAMPTSSSFKHRIKEQEDYIRDWTAHREEIARISQDLALIAREINDVAGEIDSVTSSGTAPSTTVSTAATTPGSAIDTREELVDRVFDESLNFRKIPPLVHSKTPEGNNGRSGDPRPQAAEPPDHLTITRRRTWSRDEVMGDNLLLSSVFQFSKKIRQSIDKTAGKIRILFKDKDRNWDDIESKLRAESEVPIVKTSSMEISSILQELKRVEKQLQAINAMIDPDGTLEALNNMGFPSAMLPSPPKQKSSPVNNHHSPGQTPTLGQPEARALHPAAVSAAAEFENAESEADFSIHFNRFNPDGEEEDVTVQE

SEQ ID NO: 6049 - protein, 1594 aa, Homo sapiens
MSLTSWFLVSSGGTRHRLPREMIFVGRDDCELMLQSRSVDKQHAVINYDASTDEHLVKDLGSLNGTFVNDVRIPEQTYITLKLEDKLRFGYDILKWFYPRLHTNLFTVVQGEMRVPEEALKHEKFTIQLQLSQKSSESELSKSASAKSIDSKVADAATEVQHKTTEALKSEEKAMDISAMPRGTPLYGQPSWWGDDEVDEKRAFKTNGKPEEKNHEAGTSGCGIDAKQVEEQSAAANEEVLFPFCREPSYFEIPTKEFQQPSQITESTIHEIPTKDTPSSHITGAGHASFTIEFDDSTPGKVTIRDHVTKFTSDQRHKSKKSSPGTQDLLGIQTGMMAPENKVADWLAQNNPPQMLWERTEEDSKSIKSDVPVYLKRLKGNKHDDGTQSDSENAGAHRRCSKRATLEEHLRRHHSEHKKLQKVQATEKHQDQAVTSSAHHRGGHGVPHGKLLKQKSEEPSVSIPFLQTALLRSSGSLGHRPSQEMDKMLKNQATSATSEKDNDDDQSDKGTYTIELENPNSEEVEARKMIDKVFGVDDNQDYNRPVINEKHKDLIKDWALSSAAAVMEERKPLTTSGFHHSEEGTSSSGSKRWVSQWASLAANHTRHDQEERIMEFSAPLPLENETEISESGMTVRSTGSATSLASQGERRRRTLPQLPNEEKSLESHRAKVVTQRSEIGEKQDTELQEKETPTQVYQKDKQDADRPLSKMNRAVNGETLKTGGDNKTLLHLGSSAPGKEKSETDKETSLVKQTLAKLQQQEQREEAQWTPTKLSSKNVSGQTDKCREETFKQESQPPEKNSGHSTSKGDRVAQSESKRRKAEEILKSQTPKGGDKKESSKSLVRQGSFTIEKPSPNIPIELIPHINKQTSSTPSSLALTSASRIRERSESLDPDSSMDTTLILKDTEAVMAFLEAKLREDNKTDEGPDTPSYNRDNSISPESDVDTASTISLVTGETERKSTQKRKSFTSLYKDRCSTGSPSKDVTKSSSSGAREKMEKKTKSRSTDVGSRADGRKFVQSSGRIRQPSVDLTDDDQTSSVPHSAISDIMSSDQETYSCKPHGRTPLTSADEHVHSKLEGSKVTKSKTSPVVSGSSSKSTTLPRPRPTRTSLLRRARLGEASDSELADADKASVASEVSTTSSTSKPPTGRRNISRIDLLAQPRRTRLGSLSARSDSEATISRSSASSRTAEAIIRSGARLVPSDKFSPRIRANSISRLSDSKVKSMTSAHGSASVNSRWRRFPTDYASTSEDEFGSNRNSPKHTRLRTSPALKTTRLQSAGSAMPTSSSFKHRIKEQEDYIRDWTAHREEIARISQDLALIAREINDVAGEIDSVTSSGTAPSTTVSTAATTPGSAIDTREELVDRVFDESLNFRKIPPLVHSKTPEGNNGRSGDPRPQAAEPPDHLTITRRRTWSRDEVMGDNLLLSSVFQFSKKIRQSIDKTAGKIRILFKDKDRNWDDIESKLRAESEVPIVKTSSMEISSILQELKRVEKQLQAINAMIDPDGTLEALNNMGFPSAMLPSPPKQKSSPVNNHHSPGQTPTLGQPEARALHPAAVSAAAEFENAESEADFSIHFNRFNPDGEEEDVTVQE

SEQ ID NO: 6050 - protein, 694 aa, Homo sapiens
MAKINTQYSHPSRTHLKVKTSDRDLNRAENGLSRAHSSSEETSSVLQPGIAMETRGLADSGQGSFTGQGIARLSRLIFLLRRWAARHVHHQDQGPDSFPDRFRGAELKEVSSQESNAQANVGSQEPADRGRSAWPLAKCNTNTSNNTEEEKKTKKKDAIVVDPSSNLYYRWLTAIALPVFYNWYLLICRACFDELQSEYLMLWLVLDYSADVLYVLDVLVRARTGFLEQGLMVSDTNRLWQHYKTTTQFKLDVLSLVPTDLAYLKVGTNYPEVRFNRLLKFSRLFEFFDRTETRTNYPNMFRIGNLVLYILIIIHWNACIYFAISKFIGFGTDSWVYPNISIPEHGRLSRKYIYSLYWSTLTLTTIGETPPPVKDEEYLFVVVDFLVGVLIFATIVGNVGSMISNMNASRAEFQAKIDSIKQYMQFRKVTKDLETRVIRWFDYLWANKKTVDEKEVLKSLPDKLKAEIAINVHLDTLKKVRIFQDCEAGLLVELVLKLRPTVFSPGDYICKKGDIGKEMYIINEGKLAVVADDGVTQFVVLSDGSYFGEISILNIKGSKSGNRRTANIRSIGYSDLFCLSKDDLMEALTEYPEAKKALEEKGRQILMKDNLIDEELARAGADPKDLEEKVEQLGSSLDTLQTRFARLLAEYNATQMKMKQRLSQLESQVKGGGDKPLADGEVPGDATKTEDKQQ

SEQ ID NO: 6051 - protein, 561 aa, Homo sapiens
MSVRYSSSSKQFSSSRSGGGGGGGSSLRISSSKGSLGGGFSSGGFSGGSFSRGSSGGGCFGGSSGGYGGLGGFGGGSFRGSYGSSSFGGSYGGSFGGGSFGGGSFGGGSFGGGGFGGGGFGGGFGGGFGGDGGLLSGNEKVTMQNLNDRLASYLDKVRALEESNYELEGKIKERYDQHGNSRQGEPRDYSKYYKTIDDLKNQILNLTTDNANILLQIDNARLAADDFRLKYENEVALRQSVEADINGLRRVLDELTLTQADLEMQIESLTEELAYLKKNREEEMKHLRNVSTGDVNVEMNAAPGVDLTQLLNNMRNQYEQLAEQNRKDAEAWFNEKSKELTTEIDNNIEQISSYKSEITELRRNVQALEIELQSQLALKQSLEASLAETEGRYCVQLSQIQAQISALEEQLQEIRAETECQNTEYQQLTDIKIRLENEIQTYRSLLEGEGSSGGGGRGGGSFGGGYGGGSSGGGSSGGGYGGGSSSGGHGGSSSGGYGGGSFGGGGGGYGGGSSGGGSSSGGGYGGGSSSGGGYGGGSSSGGHKSSSSGSVGESSSKGPRY

SEQ ID NO: 6052 - protein, 593 aa, Homo sapiens
MSVRYSSSKHYSSSRSGGGGGGGGCGGGGGVSSLRISSSKGSLGGGFSSGGFSGGSFSRGSSGGGCFGGSSGGYGGLGGFGGGSFHGSYGSSSFGGSYGGSFGGGNFGGGSFGGGSFGGGGFGGGGFGGGFGGGFGGDGGLLSGNEKVTMQNLNDRLASYLDKVRALEESNYELEGKIKEWYEKHGNSHQGEPRDYSKYYKTIDDLKNQILNLTTDNANILLQIDNARLAADDFRLKYENEVALRQSVEADINGLRRVLDELTLTKADLEMQIESLTEELAYLKKNHEEEMKDLRNVSTGDVNVEMNAAPGVDLTQLLNNMRSQYEQLAEQNRKDAEAWFNEKSKELTTEIDNNIEQISSYKSEITELRRNVQALEIELQSQLALKQSLEASLAETEGRYCVQLSQIQAQISALEEQLQQIRAETECQNTEYQQLLDIKIRLENEIQTYRSLLEGEGSSGGGGRGGGSFGGGYGGGSSGGGSSGGGYGGGHGGSSGGGYGGGSSGGGSSGGGYGGGSSSGGHGGGSSSGGHGGSSSGGYGGGSSGGGGGGYGGGSSGGGSSSGGGYGGGSSSGGHKSSSSGSVGESSSKGPRY

SEQ ID NO: 6053 - protein, 584 aa, Homo sapiens
MSVRYSSSKHYSSSRSGGGGGGGGCGGGGGVSSLRISSSKGSLGGGFSSGGFSGGSFSRGSSGGGCFGGSSGGYGGLGGFGGGSFRGSYGSSSFGGSYGGSFGGGSFGGGSFGGGSFGGGGFGGGGFGGGFGGGFGGDGGLLSGNEKVTMQNLNDRLASYLDKVRALEESNYELEGKIKEWYEKHGNSHQGEPRDYSKYYKTIDDLKNQILNLTTDNANILLQIDNARLAADDFRLKYENEVALRQSVEADINGLRRVLDELTLTKADLEMQIESLTEELAYLKKNHEEEMKDLRNVSTGDVNVEMNAAPGVDLTQLLNNMRSQYEQLAEQNRKDAEAWFNEKSKELTTEIDNNIEQISSYKSEITELRRNVQALEIELQSQLALKQSLEASLAETEGRYCVQLSQIQAQISALEEQLQQIRAETECQNTEYQQLLDIKIRLENEIQTYRSLLEGEGSSGGGGRGGGSFGGGYGGGSSGGGSSGGGYGGGHGGSSGGGYGGGSSGGGSSGGGYGGGSSSGGHGGSSSGGYGGGSSGGGGGGYGGGSSGGGSSSGGGYGGGSSSGGHKSSSSGSVGESSSKGPRY

SEQ ID NO: 6054 - protein, 895 aa, Homo sapiens [sequence omitted]

SEQ ID NO: 6055 - protein, 913 aa, Homo sapiens
MMSQSSGSGDGNDDEATTSKDGGFSSPSPSAAAAAQEVRSATDGNTSTTPPTSAKKRKLNSSSSSSSNSSNEREDFDSTSSSSSTPPLQPRDSASPSTSSFCLGVSVAASSHVPIQKKLRFEDTLEFVGFDAKMAEESSSSSSSSSPTAATSQQQQLKNKSILISSVASVHHANGLAKSSTTVSSFANSKPGSAKKLVIKNFKDKPKLPENYTDETWQKLKEAVEAIQNSTSIKYNLEELYQAVENLCSYKISANLYKQLRQICEDHIKAQIHQFREDSLDSVLFLKKIDRCWQNHCRQMIMIRSIFLFLDRTYVLQNSMLPSIWDMGLELFRAHIISDQKVQNKTIDGILLLIERERNGEAIDRSLLRSLLSMLSDLQIYQDSFEQRFLEETNRLYAAEGQKLMQEREVPEYLHHVNKRLEEEADRLITYLDQTTQKSLIATVEKQLLGEHLTAILQKGLNNLLDENRIQDLSLLYQLFSRVRGGVQVLLQQWIEYIKAFGSTIVINPEKDKTMVQELLDFKDKVDHIIDICFLKNEKFINAMKEAFETFINKRPNKPAELIAKYVDSKLRAGNKEATDEELEKMLDKIMIIFRFIYGKDVFEAFYKKDLAKRLLVGKSASVDAEKSMLSKLKHECGAAFTSKLEGMFKDMELSKDIMIQFKQYMQNQNVPGNIELTVNILTMGYWPTYVPMEVHLPPEMVKLQEIFKTFYLGKHSGRKLQWQSTIGHCVLKAEFKEGKKELQVSLFQTLVLLMFNEGEEFSLEEIKQATGIEDGELRRTLQSLACGKARVLAKNPKGKDIEDGDKFICNDDFKHKLFRIKINQIQMKETVEEQASTTERVFQDRQYQIDAAIVRIMKMRKTLSHNLLVSEVYNQLKFPVKPADLKKRIESLIDRDYMERDKENPNQYNYIA

SEQ ID NO: 6056 - protein, 5395 aa, Homo sapiens
MFPVLWAGIPGRDVGSLQPLPPGFKQFCTSASRVAVIADERDRVQKKTFTKWVNKHLMKVRKHINDLYEDLRDGHNLISLLEVLSGIKLPREKGRMRFHRLQNVQIALDFLKQRQVKLVNIRNDDITDGNPKLTLGLIWTIILHFQISDIYISGESGDMSAKEKLLLWTQKVTAGYTGIKCTNFSSCWSDGKMFNALIHRYRPDLVDMERVQIQSNRENLEQAFEVAERLGVTRLLDAEDVDVPSPDEKSVITYVSSIYDAFPKVPEGGEGISATEVDSRWQEYQSRVDSLIPWIKQHTILMSDKTFPQNPVELKALYNQYIHFKETEILAKEREKGRIEELYKLLEVWIEFGRIKLPQGYHPNDVEEEWGKLIIEMLEREKSLRPAVERLELLLQIANKIQNGALNCEEKLTLAKNTLQADAAHLESGQPVQCESDVIMYIQECEGLIRQLQVDLQILRDENYYQLEELAFRVMRLQDELVTLRLECTNLYRKGHFTSLELVPPSTLTTTHLKAEPLTKATHSSSTSWFRKPMTRAELVAISSSEDEGNLRFVYELLSWVEEMQMKLERAEWGNDLPSVELQLETQQHIHTSVEELGSSVKEARLYEGKMSQNFHTSYAETLGKLETQYCKLKETSSFRMRHLQSLHKFVSRATAELIWLNEKEEEELAYDWSDNNSNISAKRNYFSELTMELEEKQDVFRSLQDTAELLSLENHPAKQTVEAYSAAVQSQLQWMKQLCLCVEQHVKENTAYFQFFSDARELESFLRNLQDSIKRKYSCDHNTSLSRLEDLLQDSMDEKEQLIQSKSSVASLVGRSKTIVQLKPRSPDHVLKNTISVKAVCDYRQIEITICKNDECVLEDNSQRTKWKVISPTGNEAMVPSVCFLIPPPNKDAIEMASRVEQSYQKVMALWHQLHVNTKSLISWNYLRKDLDLVQTWNLEKLRSSAPGECHQIMKNLQAHYEDFLQDSRDSVLFSVADRLRLEEEVEACKARFQHLMKSMENEDKEETVAKMYISELKNIRLRLEEYEQRVVKRIQSLASSRTDRDAWQDNALRIAEQEHTQEDLQQLRSDLDAVSMKCDSFLHQSPSSSSVPTLRSELNLLVEKMDHVYGLSTVYLNKLKTVDVIVRSIQDAELLVKGYEIKLSQEEVVLADLSALEAHWSTLRHWLSDVKDKNSVFSVLDEEIAKAKVVAEQMSRLTPERNLDLERYQEKGSQLQERWHRVIAQLEIRQSELESIQEVLGDYRACHGTLIKWIEETTAQQEMMKPGQAEDSRVLSEQLSQQTALFAEIERNQTKLDQCQKFSQQYSTIVKDYELQLMTYKAFVESQQKSPGKRRRMLSSSDAITQEFMDLRTRYTALVTLTTQHVKYISDALRRLEEEEKVVEEEKQEHVEKVKELLGWVSTLARNTQGKATSSETKESTDIEKAILEQQVLSEELTTKKEQVSEAIKASQIFLAKHGHKLSEKEKKQISEQLNALNKAYHDLCDGSANQLQQLQSQLAHQTEQKTLQKQQNTCHQQLEDLCSWVGQAERALAGHQGRTTQQDLSALQKNQSDLKDLQDDIQNRATSFATVVKDIEGFMEENQTKLSPRELTALREKLHQAKEQYEALQEETRVAQKELEEAVTSALQQETEKSKAAKELAENKKKIDALLDWVTSVGSSGGQLLTNLPGMEQLSGASLEKGALDTTDGYMGVNQAPEKLDKQCEMMKARHQELLSQQQNFILATQSAQAFLDQHGHNLTPEEQQMLQQKLGELKEQYSTSLAQSEAELKQVQTLQDELQKFLQDHKEFESWLERSEKELENMHKGGSSPETLPSLLKRQGSFSEDVISHKGDLRFVTISGQKVLDMENSFKEGKEPSEIGNLVKDKLKDATERYTALHSKCTRLGSHLNMLLGQYHQFQNSADSLQAWMQACEANVEKLLSDTVASDPGVLQEQLATTKQLQEELAEHQVPVEKLQKVARDIMEIEGEPAPDHRHVQETTDSILSHFQSLSYSLAERSSLLQKAIAQSQSVQESLESLLQSIGEVEQNLEGKQVSSLSSGVIQEALATNMKLKQDIARQKSSLEATREMVTRFMETADSTTAAVLQGKLAEVSQRFEQLCLQQQEKESSLKKLLPQAEMFEHLSGKLQQFMENKSRMLASGNQPDQDITHFFQQIQELNLEMEDQQENLDTLEHLVTELSSCGFALDLCQHQDRVQNLRKDFTELQKTVKEREKDASSCQEQLDEFRKLVRTFQKWLKETEGSIPPTETSMSAKELEKQIEHLKSLLDDWASKGTLVEEINCKGTSLENLIMEITAPDSQGKTGSILPSVGSSVGSVNGYHTCKDLTEIQCDMSDVNLKYEKLGGVLHERQESLQAILNRMEEVHKEANSVLQWLESKEEVLKSMDAMSSPTKTETVKAQAESNKAFLAELEQNSPKIQKVKEALAGLLVTYPNSQEAENWKKIQEELNSRWERATEVTVARQRQLEESASHLACFQAAESQLQPWLMEKELMMGVLGPLSIDPNMLNAQKQQVQFMLKEFEARRQQHEQLNEAAQGILTGPGDVSLSTSQVQKELQSINQKWVELTDKLNSRSSQIDQAIVKSTQYQELLQDLSEKVRAVGQRLSVQSAISTQPEAVKQQLEETSEIRSDLEQLDHEVKEAQTLCDELSVLIGEQYLKDELKKRLETVALPLQGLEDLAADRINRLQAALASTQQFQQMFDELRTWLDDKQSQQAKNCPISAKLERLQSQLQENEEFQKSLNQHSGSYEVIVAEGESLLLSVPPGEEKRTLQNQLVELKNHWEELSKKTADRQSRLKDCMQKAQKYQWHVEDLVPWIEDCKAKMSELRVTLDPVQLESSLLRSKAMLNEVEKRRSLLEILNSAADILINSSEADEDGIRDEKAGINQNMDAVTEELQAKTGSLEEMTQRLREFQESFKNIEKKVEGAKHQLEIFDALGSQACSNKNLEKLRAQQEVLQALEPQVDYLRNFTQGLVEDAPDGSDASQLLHQAEVAQQEFLEVKQRVNSGCVMMENKLEGIGQFHCRVREMFSQLADLDDELDGMGAIGRDTDSLQSQIEDVRLFLNKIHVLKLDIEASEAECRHMLEEEGTLDLLGLKRELEALNKQCGKLTERGKARQEQLELTLGRVEDFYRKLKGLNDATTAAEEAEALQWVVGTEVEIINQQLADFKMFQKEQVDPLQMKLQQVNGLGQGLIQSAGKDCDVQGLEHDMEEINARWNTLNKKVAQRIAQLQEALLHCGKFQDALEPLLSWLADTEELIANQKPPSAEYKVVKAQIQEQKLLQRLLDDRKATVDMLQAEGGRIAQSAELADREKITGQLESLESRWTELLSKAAARQKQLEDILVLAKQFHETAEPISDFLSVTEKKLANSEPVGTQTAKIQQQIIRHKALEEDIENHATDVHQAVKIGQSLSSLTSPAEQGVLSEKIDSLQARYSEIQDRCCRKAALLDQALSNARLFGEDEVEVLNWLAEVEDKLSSVFVKDFKQDVLHRQHADHLALNEEIVNRKKNVDQAIKNGQALLKQTTGEEVLLIQEKLDGIKTRYADITVTSSKALRTLEQARQLATKFQSTYEELTGWLREVEEELATSGGQSPTGEQIPQFQQRQKELKKEVMEHRLVLDTVNEVSRALLELVPWRAREGLDKLVSDANEQYKLVSDTIGQRVDEIDAAIQRSQQYEQAADAELAWVAETKRKLMALGPIRLEQDQTTAQLQVQKAFSIDIIRHKDSMDELFSHRSEIFGTCGEEQKTVLQEKTESLIQQYEAISLLNSERYARLERAQVLVNQFWETYEELSPWIEETRALIAQLPSPAIDHEQLRQQQEEMRQLRESIAEHKPHIDKLLKIGPQLKELNPEEGEMVEEKYQKAENMYAQIKEEVRQRALALDEAVSQSTQITEFHDKIEPMLETLENLSSRLRMPPLIPAEVDKIRECISDNKSATVELEKLQPSFEALKRRGEELIGRSQGADKDLAAKEIQDKLDQMVFFWEDIKARAEEREIKFLDVLELAEKFWYDMAALLTTIKDTQDIVHDLESPGIDPSIIKQQVEAAETIKEETDGLHEELEFIRILGADLIFACGETEKPEVRKSIDEMNNAWENLNKTWKERLEKLEDAMQAAVQYQDTLQAMFDWLDNTVIKLCTMPPVGTDLNTVKDQLNEMKEFKVEVYQQQIEMEKLNHQGELMLKKATDETDRDIIREPLTELKHLWENLGEKIAHRQHKLEGALLALGQFQHALEELMSWLTHTEELLDAQRPISGDPKVIEVELAKHHVLKNDVLAHQATVETVNKAGNELLESSAGDDASSLRSRLEAMNQCWESVLQKTEEREQQLQSTLQQAQGFHSEIEDFLLELTRMESQLSASKPTGGLPETAREQLDTHMELYSQLKAKEETYNQLLDKGRLMLLSRDDSGSGSKTEQSVALLEQKWHVVSSKMEERKSKLEEALNLATEFQNSLQEFINWLTLAEQSLNIASPPSLILNTVLSQIEEHKVFANEVNAHRDQIIELDQTGNQLKFLSQKQDVVLIKNLLVSVQSRWEKVVQRSIERGRSLDDARKRAKQFHEAWKKLIDWLEDAESHLDSELEISNDPDKIKLQLSKHKEFQKTLGGKQPVYDTTIRTGRALKEKTLLPEDSQKLDNFLGEVRDKWDTVCGKSVERQHKLEEALLFSGQFMDALQALVDWLYKVEPQLAEDQPVHGDLDLVMNLMDAHKVFQKELGKRTGTVQVLKRSGRELIENSRDDTTWVKGQLQELSTRWDTVCKLSVSKQSRLEQALKQAEVFRDTVHMLLEWLSEAEQTLRFRGALPDDTEALQSLIDTHKEFMKKVEEKRVDVNSAVAMGEVILAVCHPDCITTIKHWITIIRARFEEVLTWAKQHQQRLETALSELVANAELLEELLAWIQWAETTLIQRDQEPIPQNIDRVKALIAEHQTFMEEMTRKQPDVDRVTKTYKRKNIEPTHAPFIEKSRSGGRKSLSQPTPPPMPILSQSEAKNPRINQLSARWQQVWLLALERQRKLNDALDRLEELKEFANFDFDVWRKKYMRWMNHKKSRVMDFFRRIDKDQDGKITRQEFIDGILASKFPTTKLEMTAVADIFDRDGDGYIDYYEFVAALHPNKDAYRPTTDADKIEDEVTRQVAQCKCAKRFQVEQIGENKYRFGDSQQLRLVRILRSTVMVRVGGGWMALDEFLVKNDPCRARGRTNIELREKFILPEGASQGMTPFRSRGRRSKPSSRAASPTRSSSSASQSNHSCTSMPSSPATPASGTKVIPSSGSKLKRPTPTFHSSRTSLAGDTSNSSSPASTGAKTNRADPKKSASRPGSRAGSRAGSRASSRRGSDASDFDLLETQSACSDTSESSAAGGQGNSRRGLNKPSKIPTMSKKTTTASPRTPGPKR

SEQ ID NO: 6057 - protein, 5938 aa, Homo sapiens
MQKGLLDQDTGLVLLESQVIMSGLIAPETGENLSLEEGIARNLINPQMYQQLRELQDALALISRLTESRGPLSVVEAIEKRIISETVGLKILEAHLATGGFSLSPSENCINLEEAFHQGLISAWLHSVLESYLRTSKNLIDPNTAEKIGLLDLMQRCIVHQESGFKLLPVKQLAGGMVSLKSGRKVSIFRAVQEGLIDRQVTVRLLEAQLFAGGIVDPRTGHRLTVEEAVRHNLIDQDMACAILIRQLQTGGIIDTVTGQRLTIDEAVSNDLVAAKIALVILESLWSFMGLLWPESGEILPITDALEQGIVSTELAHKILSNRQHIKALFLPATTEILSWKKAIESGILDRDLANNLKSICIPDVMPHMQLADSAEQNINPGAAVLPCSKSHPKATASQSENLLFQLMTHSYINVQNGQRLLLLDKELMETLTSRDEYQTSPPKVVEIGHQRQKTPEGLQESANVKISGTFSSGWTVRLPEFQFSSQNKEYPDREDCTTEKGKKTTVETEDSSVENPEQDLFVEQKERNPNIDALKVINKVKLEVQRQLIGTQREDQTAVSVRENASRGHLLTIPPAEAEGVPLVVDKDVFSVETPKKEHQPLRNTSFTCQNEQAHTLETEYIHDETGGSHIKPQSKKLQVQVKKTLGIKLELKSETDGNVHPLDKKEMLKKTFLAKDDHKESQEAQNIAGGSMMMSEKTDEEDSGREIFLSCSHPLELLEEATLNVLSAQLLDGGIFHEQTGQKLLLNEAISRGIVPSHTAVKLMEKLNMFQGFFDSQTCESLTTEEVINEGLMDEKLLHNVLMADKAISGVLDPRTQTLCSVKDAVTVGLLDKETATRILERQVVTGGIIDLKRGKKVSVTLASTLGLVDVADQPELINLEKASKGRDAEKTVRERLISLQMETTGLIDPDSKAPLTVVQSIDRGLLEREEAVRLLTKQVVDGGIIHHISGMRLSVDNAFRHGLIGEDLAEKLKRVENLNIHQIFNPETKENISLPKAIKLDLITSDLKREIQEVQAFTGNFVDLISGQRLTLAEAKKEGLLTNEAVLSPGMMHGIVDPENCRIVPYSELVKKCKIDIESGQRYLEVIPFSDIKDGVSDKVLTLSQAIQLGKVDFASTLKVLEAQANTGGIIDTATGKRLTLASALEEKLVDENMVRIIASHQVLNGGIVDIFSDQRVTLVEAIEKRLISPELANMIQIDSSEFSDHRAQIEKQEGIEVCALQNEFLGKDMLIACNQTAEMSCNKVEESERLFQVENQSAQEKVKVRVSDGEQAKKSREISLKEFGCKDQRKPRMSSDAKEFISIINPHNLKGKSLGQVSLTHPYSECDFKLKEVARNNMGNDTNEEQEKAVTKIEIISHMKQSTSCLDSEEIRENQGEVILEVQETYCETSGKLPSEQVLQQPMNARVKSKREKREVIVEESIRTCKPAFLSEEKLYQETAIRDEHDSHIKSQPREMTSSEKGKEADTEMGFSITFKIEESSSQVVPQGISVKHLDALTLFSSKQANEGKVNNLSLCLTLKPEENLSREIACGAQSEPFPCMTPRPEGLHYQESDGKAQVTGPSQISKTDKSFQGTTRQETNYQDSWVTSKTKETKHQISSSNECKEKSYQEVSFDPARGLKLEEITVSRPDSKEVRYLEFSDRKDLHHQGSKSDDKLCGTLKSEIATQELTGEKFLEMANPNVAGLEAGSIEDIVTQRGSRVLGSFLPEKLFKGVSQKENTGQQNAIISPTVLETSEEKTVSLTVCSAVKTEKTPQEKLRESPGSEQTPFMTAPEGKGNGGVNPEPFRATQNVFTRQLCLEHDEKLVSYLSLLRNIEMRTKQIQPLELNLAELQDLLCQAKVLERELKDLTTLVSQELECVNQIIISQPQEVPAQLLKALEKDAKNLQKSLSSVSDTWNSRLLHFQNAVEIEKTKVLNQHTQLEGRLQDLRAWVGNKNLILNSKGSNSEIDVDSLNLCLQQYEDLKQPMAERKAQLDALAFDIQFFISEHAQDLSPQQNRQMLRLLNELQRSFQDILEQTAAQVDALQGHLQQMEQEALVKTLQKQQNTCHQQLEDLCSWVGQAERALAGHQGRTTQQDLSALQKNQSDLKDLQDDIQNRATSFATVVKDIEGFMEENQTKLSPRELTALREKLHQAKEQYEALQEETRVAQKELEEAVTSALQQETEKSKAAKELAENKKKIDALLDWVTSVGSSGGQLLTNLPGMEQLSGASLEKGALDTTDGYMGVNQAPEKLDKQCEMMKARHQELLSQQQNFILATQSAQAFLDQHGHNLTPEEQQMLQQKLGELKEQYSTSLAQSEAELKQVQTLQDELQKFLQDHKEFESWLERSEKELENMHKGGSSPETLPSLLKRQGSFSEDVISHKGDLRFVTISGQKVLDMENSFKEGKEPSEIGNLVKDKLKDATERYTALHSKCTRLGSHLNMLLGQYHQFQNSADSLQAWMQACEANVEKLLSDTVASDPGVLQEQLATTKQLQEELAEHQVPVEKLQKVARDIMEIEGEPAPDHRHVQETTDSILSHFQSLSYSLAERSSLLQKAIAQSQSVQESLESLLQSIGEVEQNLEGKQVSSLSSGVIQEALATNMKLKQDIARQKSSLEATREMVTRFMETADSTTAAVLQGKLAEVSQRFEQLCLQQQEKESSLKKLLPQAEMFEHLSGKLQQFMENKSRMLASGNQPDQDITHFFQQIQELNLEMEDQQENLDTLEHLVTELSSCGFALDLCQHQDRVQNLRKDFTELQKTVKEREKDASSCQEQLDEFRKLVRTFQKWLKETEGSIPPTETSMSAKELEKQIEHLKSLLDDWASKGTLVEEINCKGTSLENLIMEITAPDSQGKTGSILPSVGSSVGSVNGYHTCKDLTEIQCDMSDVNLKYEKLGGVLHERQESLQAILNRMEEVHKEANSVLQWLESKEEVLKSMDAMSSPTKTETVKAQAESNKAFLAELEQNSPKIQKVKEALAGLLVTYPNSQEAENWKKIQEELNSRWERATEVTVARQRQLEESASHLACFQAAESQLRPWLMEKELMMGVLGPLSIDPNMLNAQKQQVQFMLKEFEARRQQHEQLNEAAQGILTGPGDVSLSTSQVQKELQSINQKWVELTDKLNSRSSQIDQAIVKSTQYQELLQDLSEKVRAVGQRLSVQSAISTQPEAVKQQLEETSEIRSDLEQLDHEVKEAQTLCDELSVLIGEQYLKDELKKRLETVALPLQGLEDLAADRINRLQAALASTQQFQQMFDELRTWLDDKQSQQAKNCPISAKLERLQSQLQENEEFQKSLNQHSGSYEVIVAEGESLLLSVPPGEEKRTLQNQLVELKNHWEELSKKTADRQSRLKDCMQKAQKYQWHVEDLVPWIEDCKAKMSELRVTLDPVQLESSLLRSKAMLNEVEKRRSLLEILNSAADILINSSEADEDGIRDEKAGINQNMDAVTEELQAKTGSLEEMTQRLREFQESFKNIEKKVEGAKHQLEIFDALGSQACSNKNLEKLRAQQEVLQALEPQVDYLRNFTQGLVEDAPDGSDASQLLHQAEVAQQEFLEVKQRVNSGCVMMENKLEGIGQFHCRVREMFSQLADLDDELDGMGAIGRDTDSLQSQIEDVRLFLNKIHVLKLDIEASEAECRHMLEEEGTLDLLGLKRELEALNKQCGKLTERGKARQEQLELTLGRVEDFYRKLKGLNDATTAAEEAEALQWVVGTEVEIINQQLADFKMFQKEQVDPLQMKLQQVNGLGQGLIQSAGKDCDVQGLEHDMEEINARWNTLNKKVAQRIAQLQEALLHCGKFQDALEPLLSWLADTEELIANQKPPSAEYKVVKAQIQEQKLLQRLLDDRKATVDMLQAEGGRIAQSAELADREKITGQLESLESRWTELLSKAAARQKQLEDILVLAKQFHETAEPISDFLSVTEKKLANSEPVGTQTAKIQQQIIRHKALEEDIENHATDVHQAVKIGQSLSSLTSPAEQGVLSEKIDSLQARYSEIQDRCCRKAALLDQALSNARLFGEDEVEVLNWLAEVEDKLSSVFVKDFKQDVLHRQHADHLALNEEIVNRKKNVDQAIKNGQALLKQTTGEEVLLIQEKLDGIKTRYADITVTSSKALRTLEQARQLATKFQSTYEELTGWLREVEEELATSGGQSPTGEQIPQFQQRQKELKKEVMEHRLVLDTVNEVSRALLELVPWRAREGLDKLVSDANEQYKLVSDTIGQRVDEIDAAIQRSQQYEQAADAELAWVAETKRKLMALGPIRLEQDQTTAQLQVQKAFSIDIIRHKDSMDELFSHRSEIFGTCGEEQKTVLQEKTESLIQQYEAISLLNSERYARLERAQVLVNQFWETYEELSPWIEETRALIAQLPSPAIDHEQLRQQQEEMRQLRESIAEHKPHIDKLLKIGPQLKELNPEEGEMVEEKYQKAENMYAQIKEEVRQRALALDEAVSQSTQITEFHDKIEPMLETLENLSSRLRMPPLIPAEVDKIRECISDNKSATVELEKLQPSFEALKRRGEELIGRSQGADKDLAAKEIQDKLDQMVFFWEDIKARAEEREIKFLDVLELAEKFWYDMAALLTTIKDTQDIVHDLESPGIDPSIIKQQVEAAETIKEETDGLHEELEFIRILGADLIFACGETEKPEVRKSIDEMNNAWENLNKTWKERLEKLEDAMQAAVQYQDTLQAMFDWLDNTVIKLCTMPPVGTDLNTVKDQLNEMKEFKVEVYQQQIEMEKLNHQGELMLKKATDETDRDIIREPLTELKHLWENLGEKIAHRQHKLEGALLALGQFQHALEELMSWLTHTEELLDAQRPISGDPKVIEVELAKHHVLKNDVLAHQATVETVNKAGNELLESSAGDDASSLRSRLEAMNQCWESVLQKTEEREQQLQSTLQQAQGFHSEIEDFLLELTRMESQLSASKPTGGLPETAREQLDTHMELYSQLKAKEETYNQLLDKGRLMLLSRDDSGSGSKTEQSVALLEQKWHVVSSKMEERKSKLEEALNLATEFQNSLQEFINWLTLAEQSLNIASPPSLILNTVLSQIEEHKVFANEVNAHRDQIIELDQTGNQLKFLSQKQDVVLIKNLLVSVQSRWEKVVQRSIERGRSLDDARKRAKQFHEAWKKLIDWLEDAESHLDSELEISNDPDKIKLQLSKHKEFQKTLGGKQPVYDTTIRTGRALKEKTLLPEDTQKLDNFLGEVRDKWDTVCGKSVERQHKLEEALLFSGQFMDALQALVDWLYKVEPQLAEDQPVHGDLDLVMNLMDAHKVFQKELGKRTGTVQVLKRSGRELIENSRDDTTWVKGQLQELSTRWDTVCKLSVSKQSRLEQALKQAEVFRDTVHMLLEWLSEAEQTLRFRGALPDDTEALQSLIDTHKEFMKKVEEKRVDVNSAVAMGEVILAVCHPDCITTIKHWITIIRARFEEVLTWAKQHQQRLETALSELVANAELLEELLAWIQWAETTLIQRDQEPIPQNIDRVKALIAEHQTFMEEMTRKQPDVDRVTKTYKRKNIEPTHAPFIEKSRSGGRKSLSQPTPPPMPILSQSEAKNPRINQLSARWQQVWLLALERQRKLNDALDRLEELKEFANFDFDVWRKKYMRWMNHKKSRVMDFFRRIDKDQDGKITRQEFIDGILASKFPTTKLEMTAVADIFDRDGDGYIDYYEFVAALHPNKDAYRPTTDADKIEDEVTRQVAQCKCAKRFQVEQIGENKYRFFLGNQFGDSQQLRLVRILRSTVMVRVGGGWMALDEFLVKNDPCRARGRTNIELREKFILPEGASQGMTPFRSRGRRSKPSSRAASPTRSSSSASQSNHSCTSMPSSPATPASGTKVIPSSGSKLKRPTPTFHSSRTSLAGDTSNSSSPASTGAKTNRADPKKSASRPGSRAGSRAGSRASSRRGSDASDFDLLETQSACSDTSESSAAGGQGNSRRGLNKPSKIPTMSKKTTTASPRTPGPKR

SEQ ID NO: 6058 - protein, 5430 aa, Homo sapiens
MSSSDEETLSERSCRSERSCRSERSYRSERSGSLSPCPPGDTLPWNLPLHEQKKRKSQDSVLDPAERAVVRVADERDRVQKKTFTKWVNKHLMKVRKHINDLYEDLRDGHNLISLLEVLSGIKLPREKGRMRFHRLQNVQIALDFLKQRQVKLVNIRNDDITDGNPKLTLGLIWTIILHFQISDIYISGESGDMSAKEKLLLWTQKVTAGYTGIKCTNFSSCWSDGKMFNALIHRYRPDLVDMERVQIQSNRENLEQAFEVAERLGVTRLLDAEDVDVPSPDEKSVITYVSSIYDAFPKVPEGGEGISATEVDSRWQEYQSRVDSLIPWIKQHTILMSDKTFPQNPVELKALYNQYIHFKETEILAKEREKGRIEELYKLLEVWIEFGRIKLPQGYHPNDVEEEWGKLIIEMLEREKSLRPAVERLELLLQIANKIQNGALNCEEKLTLAKNTLQADAAHLESGQPVQCESDVIMYIQECEGLIRQLQVDLQILRDENYYQLEELAFRVMRLQDELVTLRLECTNLYRKGHFTSLELVPPSTLTTTHLKAEPLTKATHSSSTSWFRKPMTRAELVAISSSEDEGNLRFVYELLSWVEEMQMKLERAEWGNDLPSVELQLETQQHIHTSVEELGSSVKEARLYEGKMSQNFHTSYAETLGKLETQYCKLKETSSFRMRHLQSLHKFVSRATAELIWLNEKEEEELAYDWSDNNSNISAKRNYFSELTMELEEKQDVFRSLQDTAELLSLENHPAKQTVEAYSAAVQSQLQWMKQLCLCVEQHVKENTAYFQFFSDARELESFLRNLQDSIKRKYSCDHNTSLSRLEDLLQDSMDEKEQLIQSKSSVASLVGRSKTIVQLKPRSPDHVLKNTISVKAVCDYRQIEITICKNDECVLEDNSQRTKWKVISPTGNEAMVPSVCFLIPPPNKDAIEMASRVEQSYQKVMALWHQLHVNTKSLISWNYLRKDLDLVQTWNLEKLRSSAPGECHQIMKNLQAHYEDFLQDSRDSVLFSVADRLRLEEEVEACKARFQHLMKSMENEDKEETVAKMYISELKNIRLRLEEYEQRVVKRIQSLASSRTDRDAWQDNALRIAEQEHTQEDLQQLRSDLDAVSMKCDSFLHQSPSSSSVPTLRSELNLLVEKMDHVYGLSTVYLNKLKTVDVIVRSIQDAELLVKGYEIKLSQEEVVLADLSALEAHWSTLRHWLSDVKDKNSVFSVLDEEIAKAKVVAEQMSRLTPERNLDLERYQEKGSQLQERWHRVIAQLEIRQSELESIQEVLGDYRACHGTLIKWIEETTAQQEMMKPGQAEDSRVLSEQLSQQTALFAEIERNQTKLDQCQKFSQQYSTIVKDYELQLMTYKAFVESQQKSPGKRRRMLSSSDAITQEFMDLRTRYTALVTLTTQHVKYISDALRRLEEEEKVVEEEKQEHVEKVKELLGWVSTLARNTQGKATSSETKESTDIEKAILEQQVLSEELTTKKEQVSEAIKASQIFLAKHGHKLSEKEKKQISEQLNALNKAYHDLCDGSANQLQQLQSQLAHQTEQKTLQKQQNTCHQQLEDLCSWVGQAERALAGHQGRTTQQDLSALQKNQSDLKDLQDDIQNRATSFATVVKDIEGFMEENQTKLSPRELTALREKLHQAKEQYEALQEETRVAQKELEEAVTSALQQETEKSKAAKELAENKKKIDALLDWVTSVGSSGGQLLTNLPGMEQLSGASLEKGALDTTDGYMGVNQAPEKLDKQCEMMKARHQELLSQQQNFILATQSAQAFLDQHGHNLTPEEQQMLQQKLGELKEQYSTSLAQSEAELKQVQTLQDELQKFLQDHKEFESWLERSEKELENMHKGGSSPETLPSLLKRQGSFSEDVISHKGDLRFVTISGQKVLDMENSFKEGKEPSEIGNLVKDKLKDATERYTALHSKCTRLGSHLNMLLGQYHQFQNSADSLQAWMQACEANVEKLLSDTVASDPGVLQEQLATTKQLQEELAEHQVPVEKLQKVARDIMEIEGEPAPDHRHVQETTDSILSHFQSLSYSLAERSSLLQKAIAQSQSVQESLESLLQSIGEVEQNLEGKQVSSLSSGVIQEALATNMKLKQDIARQKSSLEATREMVTRFMETADSTTAAVLQGKLAEVSQRFEQLCLQQQEKESSLKKLLPQAEMFEHLSGKLQQFMENKSRMLASGNQPDQDITHFFQQIQELNLEMEDQQENLDTLEHLVTELSSCGFALDLCQHQDRVQNLRKDFTELQKTVKEREKDASSCQEQLDEFRKLVRTFQKWLKETEGSIPPTETSMSAKELEKQIEHLKSLLDDWASKGTLVEEINCKGTSLENLIMEITAPDSQGKTGSILPSVGSSVGSVNGYHTCKDLTEIQCDMSDVNLKYEKLGGVLHERQESLQAILNRMEEVHKEANSVLQWLESKEEVLKSMDAMSSPTKTETVKAQAESNKAFLAELEQNSPKIQKVKEALAGLLVTYPNSQEAENWKKIQEELNSRWERATEVTVARQRQLEESASHLACFQAAESQLQPWLMEKELMMGVLGPLSIDPNMLNAQKQQVQFMLKEFEARRQQHEQLNEAAQGILTGPGDVSLSTSQVQKELQSINQKWVELTDKLNSRSSQIDQAIVKSTQYQELLQDLSEKVRAVGQRLSVQSAISTQPEAVKQQLEETSEIRSDLEQLDHEVKEAQTLCDELSVLIGEQYLKDELKKRLETVALPLQGLEDLAADRINRLQAALASTQQFQQMFDELRTWLDDKQSQQAKNCPISAKLERLQSQLQENEEFQKSLNQHSGSYEVIVAEGESLLLSVPPGEEKRTLQNQLVELKNHWEELSKKTADRQSRLKDCMQKAQKYQWHVEDLVPWIEDCKAKMSELRVTLDPVQLESSLLRSKAMLNEVEKRRSLLEILNSAADILINSSEADEDGIRDEKAGINQNMDAVTEELQAKTGSLEEMTQRLREFQESFKNIEKKVEGAKHQLEIFDALGSQACSNKNLEKLRAQQEVLQALEPQVDYLRNFTQGLVEDAPDGSDASQLLHQAEVAQQEFLEVKQRVNSGCVMMENKLEGIGQFHCRVREMFSQLADLDDELDGMGAIGRDTDSLQSQIEDVRLFLNKIHVLKLDIEASEAECRHMLEEEGTLDLLGLKRELEALNKQCGKLTERGKARQEQLELTLGRVEDFYRKLKGLNDATTAAEEAEALQWVVGTEVEIINQQLADFKMFQKEQVDPLQMKLQQVNGLGQGLIQSAGKDCDVQGLEHDMEEINARWNTLNKKVAQRIAQLQEALLHCGKFQDALEPLLSWLADTEELIANQKPPSAEYKVVKAQIQEQKLLQRLLDDRKATVDMLQAEGGRIAQSAELADREKITGQLESLESRWTELLSKAAARQKQLEDILVLAKQFHETAEPISDFLSVTEKKLANSEPVGTQTAKIQQQIIRHKALEEDIENHATDVHQAVKIGQSLSSLTSPAEQGVLSEKIDSLQARYSEIQDRCCRKAALLDQALSNARLFGEDEVEVLNWLAEVEDKLSSVFVKDFKQDVLHRQHADHLALNEEIVNRKKNVDQAIKNGQALLKQTTGEEVLLIQEKLDGIKTRYADITVTSSKALRTLEQARQLATKFQSTYEELTGWLREVEEELATSGGQSPTGEQIPQFQQRQKELKKEVMEHRLVLDTVNEVSRALLELVPWRAREGLDKLVSDANEQYKLVSDTIGQRVDEIDAAIQRSQQYEQAADAELAWVAETKRKLMALGPIRLEQDQTTAQLQVQKAFSIDIIRHKDSMDELFSHRSEIFGTCGEEQKTVLQEKTESLIQQYEAISLLNSERYARLERAQVLVNQFWETYEELSPWIEETRALIAQLPSPAIDHEQLRQQQEEMRQLRESIAEHKPHIDKLLKIGPQLKELNPEEGEMVEEKYQKAENMYAQIKEEVRQRALALDEAVSQSTQITEFHDKIEPMLETLENLSSRLRMPPLIPAEVDKIRECISDNKSATVELEKLQPSFEALKRRGEELIGRSQGADKDLAAKEIQDKLDQMVFFWEDIKARAEEREIKFLDVLELAEKFWYDMAALLTTIKDTQDIVHDLESPGIDPSIIKQQVEAAETIKEETDGLHEELEFIRILGADLIFACGETEKPEVRKSIDEMNNAWENLNKTWKERLEKLEDAMQAAVQYQDTLQAMFDWLDNTVIKLCTMPPVGTDLNTVKDQLNEMKEFKVEVYQQQIEMEKLNHQGELMLKKATDETDRDIIREPLTELKHLWENLGEKIAHRQHKLEGALLALGQFQHALEELMSWLTHTEELLDAQRPISGDPKVIEVELAKHHVLKNDVLAHQATVETVNKAGNELLESSAGDDASSLRSRLEAMNQCWESVLQKTEEREQQLQSTLQQAQGFHSEIEDFLLELTRMESQLSASKPTGGLPETAREQLDTHMELYSQLKAKEETYNQLLDKGRLMLLSRDDSGSGSKTEQSVALLEQKWHVVSSKMEERKSKLEEALNLATEFQNSLQEFINWLTLAEQSLNIASPPSLILNTVLSQIEEHKVFANEVNAHRDQIIELDQTGNQLKFLSQKQDVVLIKNLLVSVQSRWEKVVQRSIERGRSLDDARKRAKQFHEAWKKLIDWLEDAESHLDSELEISNDPDKIKLQLSKHKEFQKTLGGKQPVYDTTIRTGRALKEKTLLPEDSQKLDNFLGEVRDKWDTVCGKSVERQHKLEEALLFSGQFMDALQALVDWLYKVEPQLAEDQPVHGDLDLVMNLMDAHKVFQKELGKRTGTVQVLKRSGRELIENSRDDTTWVKGQLQELSTRWDTVCKLSVSKQSRLEQALKQAEVFRDTVHMLLEWLSEAEQTLRFRGALPDDTEALQSLIDTHKEFMKKVEEKRVDVNSAVAMGEVILAVCHPDCITTIKHWITIIRARFEEVLTWAKQHQQRLETALSELVANAELLEELLAWIQWAETTLIQRDQEPIPQNIDRVKALIAEHQTFMEEMTRKQPDVDRVTKTYKRKNIEPTHAPFIEKSRSGGRKSLSQPTPPPMPILSQSEAKNPRINQLSARWQQVWLLALERQRKLNDALDRLEELKEFANFDFDVWRKKYMRWMNHKKSRVMDFFRRIDKDQDGKITRQEFIDGILASKFPTTKLEMTAVADIFDRDGDGYIDYYEFVAALHPNKDAYRPTTDADKIEDEVTRQVAQCKCAKRFQVEQIGENKYRFGDSQQLRLVRILRSTVMVRVGGGWMALDEFLVKNDPCRARGRTNIELREKFILPEGASQGMTPFRSRGRRSKPSSRAASPTRSSSSASQSNHSCTSMPSSPATPASGTKVIPSSGSKLKRPTPTFHSSRTSLAGDTSNSSSPASTGAKTNRADPKKSASRPGSRAGSRAGSRASSRRGSDASDFDLLETQSACSDTSESSAAGGQGNSRRGLNKPSKIPTMSKKTTTASPRTPGPKR

SEQ ID NO: 6059 - protein, 1036 aa, Homo sapiens
MALRGAAGATDTPVSSAGGAPGGSASSSSTSSGGSASAGAGLWAALYDYEARGEDELSLRRGQLVEVLSQDAAVSGDEGWWAGQVQRRLGIFPANYVAPCRPAASPAPPPSRPSSPVHVAFERLELKELIGAGGFGQVYRATWQGQEVAVKAARQDPEQDAAAAAESVRREARLFAMLRHPNIIELRGVCLQQPHLCLVLEFARGGALNRALAAANAAPDPRAPGPRRARRIPPHVLVNWAVQIARGMLYLHEEAFVPILHRDLKSSNILLLEEIEHDDICNKTLKITDFGLAREWHRTTKMSTAGTYAWMAPEVIKSSLFSKGSDIWSCGVLLWELLTGEVPYRGIDGLAVAYGVAVNKLTLPIPSTCPEPFAKLMKECWQQDPHIRPSFALILEQLTAIEGAVMTEMPQESFHSMQDDWKLEIQQMFDELRTKEKELRSREEELTRAALQQKSQEELLKRREQQLAEREIDVLERELNILIFQLNQEKPKVKKRKGKFKRSRLKLKDGHRISLPSDFQHKITVQASPNLDKRRSLNSSSSSPPSSPTMMPRLRAIQLTSDESNKTWGRNTVFRQEEFEDVKRNFKKKGCTWGPNSIQMKDRTDCKERIRPLSDGNSPWSTILIKNQKTMPLASLFVDQPGSCEEPKLSPDGLEHRKPKQIKLPSQAYIDLPLGKDAQRENPAEAGSWEEAASANAATVTIEMAPTNSLSRSPQRKKTESALYGCTVLLASVALGLDLRELHKAQAAEEPLPKEEKKKREGIFQRASKSRRSASPPTSLSSTCGEASSPPSLPLSSALGILSTPSFSTKCLLQMDSEDPLVDSAPVTCDSEMLTPDFCPTAPGSGREPALMPRLDTDCSVSRNLPSSFLQRTCGNVPYCASSKHRPSHHRRTMSDGNPTPTGATIISATGASALPLCPSPAPHSHLPREVSPKKHSTVHIVPQRRPASLRSRSDLPQAYPQTAVSQLAQTACVVGRPGPHPTQFLAAKERTKSHVPSLLDVDVEGQSRDYTVPLGRMRSKTSRPSIYELEKEFLS

SEQ ID NO: 6060 - protein, 412 aa, Homo sapiens
MANVADTKLYDILGVPPGASENELKKAYRKLAKEYHPDKNPNAGDKFKEISFAYEVLSNPEKRELYDRYGEQGLREGSGGGGGMDDIFSHIFGGGLFGFMGNQSRSRNGRRRGEDMMHPLKVSLEDLYNGKTTKLQLSKNVLCSACSGQGGKSGAVQKCSACRGRGVRIMIRQLAPGMVQQMQSVCSDCNGEGEVINEKDRCKKCEGKKVIKEVKILEVHVDKGMKHGQRITFTGEADQAPGVEPGDIVLLLQEKEHEVFQRDGNDLHMTYKIGLVEALCGFQFTFKHLDGRQIVVKYPPGKVIEPGCVRVVRGEGMPQYRNPFEKGDLYIKFDVQFPENNWINPDKLSELEDLLPSRPEVPNIIGETEEVELQEFDSTRGSGGGQRREAYNDSSDEESSSHHGPGVQCAHQ

SEQ ID NO: 6061 - protein, 371 aa, Homo sapiens
MSVVKSIELVLPEDRIYLAGSSIKGQVILTLNSTLVDPIVKVELVGRGYVEWSEEAGASCDYSRNVICNNKADYVHKTKTFPVEDNWLSAGSHTFDFHFNLPPRLPSTFTSKFGHVFYFVQASCMGREHILAKKRMYLLVQGTSTFHKETPFQVPMGERWRWEQSPSSKEEEGRRGGGAPAAPEKAEEKPEAEKWENPLFVEAEEKVSYNCCRQGTVCLQIQMERNTFTPGEKVVFTTEINNQTSKCIKTVVFALYAHIQYEGFTPSAERRSRLDSSELLRQEANTPVTRFNTTKVVSTFNLPLLLSVSSSTQDGEIMHTRYELVTTVHLPWSLTSLKAKVPIIITSASVDSAICQLSEDGVLPVNPDHQN

SEQ ID NO: 6062 - protein, 725 aa, Homo sapiens
MSFPKAPLKRFNDPSGCAPSPGAYDVKTLEVLKGPVSFQKSQRFKQQKESKQNLNVDKDTTLPASARKVKSSESKKESQKNDKDLKILEKEIRVLLQERGAQDRRIQDLETELEKMEARLNAALREKTSLSANNATLEKQLIELTRTNELLKSKFSENGNQKNLRILSLELMKLRNKRETKMRGMMAKQEGMEMKLQVTQRSLEESQGKIAQLEGKLVSIEKEKIDEKSETEKLLEYIEEISCASDQVEKYKLDIAQLEENLKEKNDEILSLKQSLEENIVILSKQVEDLNVKCQLLEKEKEDHVNRNREHNENLNAEMQNLKQKFILEQQEREKLQQKELQIDSLLQQEKELSSSLHQKLCSFQEEMVKEKNLFEEELKQTLDELDKLQQKEEQAERLVKQLEEEAKSRAEELKLLEEKLKGKEAELEKSSAAHTQATLLLQEKYDSMVQSLEDVTAQFESYKALTASEIEDLKLENSSLQEKAAKAGKNAEDVQHQILATESSNQEYVRMLLDLQTKSALKETEIKEITVSFLQKITDLQNQLKQQEEDFRKQLEDEEGRKAEKENTTAELTEEINKWRLLYEELYNKTKPFQLQLDAFEVEKQALLNEHGAAQEQLNKIRDSYAKLLGHQNLKQKIKHVVKLKDENSQLKSEVSKLRCQLAKKKQSETKLQEELNKVLGIKHFDPSKAFHHESKENFALKTPLKEGNTNCYRAPMECQESWK

SEQ ID NO: 6063 - protein, 724 aa, Homo sapiens
MSFPKAPLKRFNDPSGCAPSPGAYDVKTLEVLKGPVSFQKSQRFKQQKESKQNLNVDKDTTLPASARKVKSSESKESQKNDKDLKILEKEIRVLLQERGAQDSRIQDLETELEKMEARLNAALREKTSLSANNATLEKQLIELTRTNELLKSKFSENGNQKNLRILSLELMKLRNKRETKMRGMMAKQEGMEMKLQVTQRSLEESQGKIAQLEGKLVSIEKEKIDEKSETEKLLEYIEEISCASDQVEKYKLDIAQLEENLKEKNDEILSLKQSLEENIVILSKQVEDLNVKCQLLEKEKEDHVNRNREHNENLNAEMQNLKQKFILEQQEREKLQQKELQIDSLLQQEKELSSSLHQKLCSFQEEMVKEKNLFEEELKQTLDELDKLQQKEEQAERLVKQLEEEAKSRAEELKLLEEKLKGKEAELEKSSAAHTQATLLLQEKYDSMVQSLEDVTAQFESYKALTASEIEDLKLENSSLQEKAAKAGKNAEDVQHQILATESSNQEYVRMLLDLQTKSALKETEIKEITVSFLQKITDLQNQLKQQEEDFRKQLEDEEGRKAEKENTTAELTEEINKWRLLYEELYNKTKPFQLQLDAFEVEKQALLNEHGAAQEQLNKIRDSYAKLLGHQNLKQKIKHVVKLKDENSQLKSEVSKLRCQLAKKKQSETKLQEELNKVLGIKHFDPSKAFHHESKENFALKTPLKEGNTNCYRAPMECQESWK

SEQ ID NO: 6064 - protein, 709 aa, Homo sapiens
MSFPKAPLKRFNDPSGCAPSPGAYDVKTLEVLKGPVSFQKSQRFKQQKESKQNLNVDKDTTLPASARKVKSSESKIRVLLQERGAQDSRIQDLETELEKMEARLNAALREKTSLSANNATLEKQLIELTRTNELLKSKFSENGNQKNLRILSLELMKLRNKRETKMRGMMAKQEGMEMKLQVTQRSLEESQGKIAQLEGKLVSIEKEKIDEKSETEKLLEYIEEISCASDQVEKYKLDIAQLEENLKEKNDEILSLKQSLEENIVILSKQVEDLNVKCQLLEKEKEDHVNRNREHNENLNAEMQNLKQKFILEQQEREKLQQKELQIDSLLQQEKELSSSLHQKLCSFQEEMVKEKNLFEEELKQTLDELDKLQQKEEQAERLVKQLEEEAKSRAEELKLLEEKLKGKEAELEKSSAAHTQATLLLQEKYDSMVQSLEDVTAQFESYKALTASEIEDLKLENSSLQEKAAKAGKNAEDVQHQILATESSNQEYVRMLLDLQTKSALKETEIKEITVSFLQKITDLQNQLKQQEEDFRKQLEDEEGRKAEKENTTAELTEEINKWRLLYEELYNKTKPFQLQLDAFEVEKQALLNEHGAAQEQLNKIRDSYAKLLGHQNLKQKIKHVVKLKDENSQLKSEVSKLRCQLAKKKQSETKLQEELNKVLGIKHFDPSKAFHHESKENFALKTPLKEGNTNCYRAPMECQESWK

SEQ ID NO: 6065 - protein, 496 aa, Homo sapiens
MKLGKKPMYKPVDPYSRMQSTYNYNMRGGAYPPRYFYPFPVPPLLYQVELSVGGQQFNGKGKTRQAAKHDAAAKALRILQNEPLPERLEVNGRESEEENLNKSEISQVFEIALKRNLPVNFEVARESGPPHMKNFVTKVSVGEFVGEGEGKSKKISKKNAAIAVLEELKKLPPLPAVERVKPRIKKKTKPIVKPQTSPEYGQGINPISRLAQIQQAKKEKEPEYTLLTERGLPRRREFVMQVKVGNHTAEGTGTNKKVAKRNAAENMLEILGFKVPQRQPTKPALKSEEKTPIKKPGDGRKVTFFEPGSGDENGTSNKEDEFRMPYLSHQQLPAGILPMVPEVAQAVGVSQGHHTKDFTRAAPNPAKATVTAMIARELLYGGTSPTAETILKNNISSGHVPHGPLTRPSEQLDYLSRVQGFQVEYKDFPKNNKNEFVSLINCSSQPPLISHGIGKDVESCHDMAALNILKLLSELDQQSTEMPRTGNGPMSVCGRC

SEQ ID NO: 6066 - protein, 577 aa, Homo sapiens
MSQVQVQVQNPSAALSGSQILNKNQSLLSQPLMSIPSTTSSLPSENAGRPIQNSALPSASITSTSAAAESITPTVELNALCMKLGKKPMYKPVDPYSRMQSTYNYNMRGGAYPPRYFYPFPVPPLLYQVELSVGGQQFNGKGKTRQAAKHDAAAKALRILQNEPLPERLEVNGRESEEENLNKSEISQVFEIALKRNLPVNFEVARESGPPHMKNFVTKVSVGEFVGEGEGKSKKISKKNAAIAVLEELKKLPPLPAVERVKPRIKKKTKPIVKPQTSPEYGQGINPISRLAQIQQAKKEKEPEYTLLTERGLPRRREFVMQVKVGNHTAEGTGTNKKVAKRNAAENMLEILGFKVPQRQPTKPALKSEEKTPIKKPGDGRKVTFFEPGSGDENGTSNKEDEFRMPYLSHQQLPAGILPMVPEVAQAVGVSQGHHTKDFTRAAPNPAKATVTAMIARELLYGGTSPTAETILKNNISSGHVPHGPLTRPSEQLDYLSRVQGFQVEYKDFPKNNKNEFVSLINCSSQPPLISHGIGKDVESCHDMAALNILKLLSELDQQSTEMPRTGNGPMSVCGRC

SEQ ID NO: 6067 - protein, 594 aa, Homo sapiens
RHFLPGCGRLSGSSAFAPAAAASLSAPASFDRLPPPARRRPPPPRPLRLFPPFVPSSSPFFPSSFPSSPPPPRTAGRGTSSEQQPESITPTVELNALCMKLGKKPMYKPVDPYSRMQSTYNYNMRGGAYPPRYFYPFPVPPLLYQVELSVGGQQFNGKGKTRQAAKHDAAAKALRILQNEPLPERLEVNGRESEEENLNKSEISQVFEIALKRNLPVNFEVARESGPPHMKNFVTKVSVGEFVGEGEGKSKKISKKNAAIAVLEELKKLPPLPAVERVKPRIKKKTKPIVKPQTSPEYGQGINPISRLAQIQQAKKEKEPEYTLLTERGLPRRREFVMQVKVGNHTAEGTGTNKKVAKRNAAENMLEILGFKVPQAQPTKPALKSEEKTPIKKPGDGRKVTFFEPGSGDENGTSNKEDEFRMPYLSHQQLPAGILPMVPEVAQAVGVSQGHHTKDFTRAAPNPAKATVTAMIARELLYGGTSPTAETILKNNISSGHVPHGPLTRPSEQLDYLSRVQGFQVEYKDFPKNNKNEFVSLINCSSQPPLISHGIGKDVESCHDMAALNILKLLSELDQQSTEMPRTGNGPMSVCGRC

SEQ ID NO: 6068 - protein, 760 aa, Homo sapiens
MKTWVKIVFGVATSAVLALLVMCIVLRPSRVHNSEENTMRALTLKDILNGTFSYKTFFPNWISGQEYLHQSADNNIVLYNIETGQSYTILSNRTMKSVNASNYGLSPDRQFVYLESDYSKLWRYSYTATYYIYDLSNGEFVRGNELPRPIQYLCWSPVGSKLAYVYQNNIYLKQRPGDPPFQITFNGRENKIFNGIPDWVYEEEMLATKYALWWSPNGKFLAYAEFNDTDIPVIAYSYYGDEQYPRTINIPYPKAGAKNPVVRIFIIDTTYPAYVGPQEVPVPAMIASSDYYFSWLTWVTDERVCLQWLKRVQNVSVLSICDFREDWQTWDCPKTQEHIEESRTGWAGGFFVSTPVFSYDAISYYKIFSDKDGYKHIHYIKDTVENAIQITSGKWEAINIFRVTQDSLFYSSNEFEEYPGRRNIYRISIGSYPPSKKCVTCHLRKERCQYYTASFSDYAKYYALVCYGPGIPISTLHDGRTDQEIKILEENKELENALKNIQLPKEEIKKLEVDEITLWYKMILPPQFDRSKKYPLLIQVYGGPCSQSVRSVFAVNWISYLASKEGMVIALVDGRGTAFQGDKLLYAVYRKLGVYEVEDQITAVRKFIEMGFIDEKRIAIWGWSYGGYVSSLALASGTGLFKCGIAVAPVSSWEYYASVYTERFMGLPTKDDNLEHYKNSTVMARAEYFRNVDYLLIHGTADDNVHFQNSAQIAKALVNAQVDFQAMWYSDQNHGLSGLSTNHLYTHMTHFLKQCFSLSD

SEQ ID NO: 6069 - protein, 239 aa, Homo sapiens
MILPPQFDRSKKYPLLIQVYGGPCSQSVRSVFAVNWISYLASKEGMVIALVDGRGTAFQGDKLLYAVYRKLGVYEVEDQITAVRKFIEMGFIDEKRIAIWGWSYGGYVSSLALASGTGLFKCGIAVAPVSSWEYYASVYTERFMGLPTKDDNLEHYKNSTVMARAEYFRNVDYLLIHGTADDNVHFQNSAQIAKALVNAQVDFQAMWYSDQNHGLSGLSTNHLYTHMTHFLKQCFSLSD

SEQ ID NO: 6070 - protein, 760 aa, Homo sapiens [sequence omitted]

SEQ ID NO: 6071 - protein, 265 aa, Homo sapiens
MPMRHRKKAADKNLPCRPLVCAVLDLMVEFIVTHMMKEFPMDLYIRCIQVVHKLLCYQKKCRVRLHYTWRELWSALINLLKFLMSNETVLLAKHNIFTLALMIVNLFNMFITYGDTFLPTPSSYDELYYEIIRMHQSFDNLYSMVLRLSTNAGQWKEAASKVTHALVNIRAIINHFNPKIESYAAVNHISQLSEEQVLEVVRANYDTLTLKLQDGLDQYERYSEQHKEAAFFKELVRSISTNVRRNLVFHTLSQEVLLKEFSTIS

SEQ ID NO: 6072 - protein, 758 aa, Homo sapiens [sequence omitted]

SEQ ID NO: 6073 - protein, 740 aa, Homo sapiens
MAPAMQPAEIQFAQRLASSEKGIRDRAVKKLRQYISVKTQRETGGFSQEELLQEELANTIAQLVHAVNNSAAQHLFIQTFWQTMNREWKGIDRLRLDKYYMLIRLVLRQSFEVLKRNGWEESRIKVFLDVLMKEVLCPESQSPNGVRFHFIDIYLDELSKVGGKELLADQNLKFIDPFCKIAAKTKDHTLVQTIARGVFEAIVDQSPFVPEETMEEQKTKVGDGDLSAEEIPENEVSLRRAVSKKKTALGKNHSRKDGLSDERGRDDCGTFEDTGPLLQFDYKAVADRLLEMTSRKNTPHFNRKRLSKLIKKFQDLSEGSSISQLSFAEDISADEDDQILSQGKHKKKGNKLLEKTNLEKEKGSRVFCVEEEDSESSLQKRRRKKKKKHHLQPENPGPGGAAPSLEQNRGREPEASGPKALKARVAEPGAEATSSTGEESGSEHPPAVPMHNKRKRPRKKSPRAHREMLESAVLPPEDMSQSGPSGSHPQGPRGSPTGGAQLLKRKRKLGVVPVNGSGLSTPAWPPLQQEGPPTGPAEGANSHTTLPQRRRLQKKKAGPGSLELCGLPSQKTASLKKRKKMRVMSNLVEHNGVLESEAGQPQALGSSGTCSSLKKQKLRAESDFVKFDTPFLPKPLFFRRAKSSTATHPPGPAVQLNKTPSSSKKVTFGLNRNMTAEFKKTDKSILVSPTGPSRVAFDPEQKPLHGVLKTPTSSPASSPLVAKKPLTTTPRRRPRAMDFF

SEQ ID NO: 6074 - protein, 902 aa, Homo sapiens
MNISGSSCGSPNSADTSSDFKDLWTKLKECHDREVQGLQVKVTKLKQERILDAQRLEEFFTKNQQLREQQKVLHETIKVLEDRLRAGLCDRCAVTEEHMRKKQQEFENIRQQNLKLITELMNERNTLQEENKKLSEQLQQKIENDQQHQAAELECEEDVIPDSPITAFSFSGVNRLRRKENPHVRYIEQTHTKLEHSVCANEMRKVSKSSTHPQHNPNENEILVADTYDQSQSPMAKAHGTSSYTPDKSSFNLATVVAETLGLGVQEESETQGPMSPLGDELYHCLEGNHKKQPFEESTRNTEDSLRFSDSTSKTPPQEELPTRVSSPVFGATSSIKSGLDLNTSLSPSLLQPGKKKHLKTLPFSNTCISRLEKTRSKSEDSALFTHHSLGSEVNKIIIQSSNKQILINKNISESLGEQNRTEYGKDSNTDKHLEPLKSLGGRTSKRKKTEEESEHEVSCPQASFDKENAFPFPMDNQFSMNGDCVMYKPLDLSDRFSAIQRQEKSQGSETSKNKFRQVTLYEALKTIPKGFSSSRKASDGNCTLPKDSPGEPCSQECIILQPLNKCSPDNKPSLQIKEENAVFKIPLRPRESLETENVLDDIKSAGSHEPIKIQTRSDHGGCELASVLQLNPCRTGKIKSLQNNQDVSFENIQWSIDPGADLSQYKMDVTVIDTKDGSQSKLGGETVDMDCTLVSETVLLKMKKQEQKGEKSSMLFYIDEERKMNDSLEDMFDRTTHEEYESCLADSFSQAADEEEELSTATKKLHTHGDKQDKVKQKAFVEPYFKGDERETSLQNFPHIEVVRKKEERRKLLGHTCKECEIYYADMPAEEREKKLASCSRHRFRYIPPNTPENFWEVGFPSTQTCMERGYIKEDLDPCPRPKRRQPYNAIFSPKGKEQKT

SEQ ID NO: 6075 - protein, 897 aa, Homo sapiens
MNISGSSCGSPNSADTSSDFKDLWTKLKECHDREVQGLQVKVTKLKQERILDAQRLEEFFTKNQQLREQQKVLHETIKVLEDRLRAGLCDRCAVTEEHMRKKQQEFENIRQQNLKLITELMNERNTLQEENKKLSEQLQQKIENDQQHQAAELECEEDVIPDSPITAFSFSGVNRLRRKENPHVRYIEQTHTKLEHSVCANEMRKVSKSSTHPQHNPNENEILVADTYDQSQSPMAKAHGTSSYTPDKSSFNLATVVAETLGLGVQEESETQGPMSPLGDELYHCLEGNHKKQPFEESTRNTEDSLRFSDSTSKTPPQEELPTRVSSPVFGATSSIKSGLDLNTSLSPSLLQPGKKKHLKTLPFSNTCISRLEKTRSKSEDSALFTHHSLGSEVNKIIIQSSNKQILINKNISESLGEQNRTEYGKDSNTDKHLEPLKSLGGRTSKRKKTEEESEHEVSCPQASFDKENAFPFPMDNQFSMNGDCVMDKPLDLSDRFSAIQRQEKSQGSETSKNKFRQVTLYEALKTIPKGFSSSRKASDGNCTLPKDSPGEPCSQECIILQPLNKCSPDNKPSLQIKEENAVFKIPLRPRESLETENVLDDIKSAGSHEPIKIQTRSDHGGCELASVLQLNPCRTGKIKSLQNNQDVSFENIQWSIDPGADLSQYKMDVTVIDTKDGSQSKLGGETVDMDCTLVSETVLLKMKKQEQKGEKSSNEERKMNDSLEDMFDRTTHEEYESCLADSFSQAADEEEELSTATKKLHTHGDKQDKVKQKAFVEPYFKGDERETSLQNFPHIEVVRKKEERRKLLGHTCKECEIYYADMPAEEREKKLASCSRHRFRYIPPNTPENFWEVGFPSTQTCMERGYIKEDLDPCPRPKRRQPYNAIFSPKGKEQKT

SEQ ID NO: 6076 - protein, 693 aa, Homo sapiens
MAALGVQSINWQTAFNRQAHHTDKFSSQELILRRGQNFQVLMIMNKGLGSNERLEFIVSTGPYPSESAMTKAVFPLSNGSSGGWSAVLQASNGNTLTISISSPASAPIGRYTMALQIFSQGGISSVKLGTFILLFNPWLNVDSVFMGNHAEREEYVQEDAGIIFVGSTNRIGMIGWNFGQFEEDILSICLSILDRSLNFRRDAATDVASRNDPKYVGRVLSAMINSNDDNGVLAGNWSGTYTGGRDPRSWNGSVEILKNWKKSGFSPVRYGQCWVFAGTLNTALRSLGIPSRVITNFNSAHDTDRNLSVDVYYDPMGNPLDKGSDSVWNFHVWNEGWFVRSDLGPSYGGWQVLDATPQERSQGVFQCGPASVIGVREGDVQLNFDMPFIFAEVNADRITWLYDNTTGKQWKNSVNSHTIGRYISTKAVGSNARMDVTDKYKYPEGSDQERQVFQKALGKLKPNTPFAATSSMGLETEEQEPSIIGKLKVAGMLAVGKEVNLVLLLKNLSRDTKTVTVNMTAWTIIYNGTLVHEVWKDSATMSLDPEEEAEHPIKISYAQYEKYLKSDNMIRITAVCKVPDESEVVVERDIILDNPTLTLEVLNEARVRKPVNVQMLFSNPLDEPVRDCVLMVEGSGLLLGNLKIDVPTLGPKEGSRVRFDILPSRSGTKQLLADFSCNKFPAIKAMLSIDVAE

SEQ ID NO: 6077 - protein, 2839 aa, Homo sapiens
MAAHRPVEWVQAVVSRFDEQLPIKTGQQNTHTKVSTEHNKECLINISKYKFSLVISGLTTILKNVNNMRIFGEAAEKNLYLSQLIILDTLEKCLAGQPKDTMRLDETMLVKQLLPEICHFLHTCREGNQHAAELRNSASGVLFSLSCNNFNAVFSRISTRLQELTVCSEDNVDVHDIELLQYINVDCAKLKRLLKETAFKFKALKKVAQLAVINSLEKAFWNWVENYPDEFTKLYQIPQTDMAECAEKLFDLVDGFAESTKRKAAVWPLQIILLILCPEIIQDISKDVVDENNMNKKLFLDSLRKALAGHGGSRQLTESAAIACVKLCKASTYINWEDNSVIFLLVQSMVVDLKNLLFNPSKPFSRGSQPADVDLMIDCLVSCFRISPHNNQHFKICLAQNSPSTFHYVLVNSLHRIITNSALDWWPKIDAVYCHSVELRNMFGETLHKAVQGCGAHPAIRMAPSLTFKEKVTSLKFKEKPTDLETRSYKYLLLSMVKLIHADPKLLLCNPRKQGPETQGSTAELITGLVQLVPQSHMPEIAQEAMEALLVLHQLDSIDLWNPDAPVETFWEISSQMLFYICKKLTSHQMLSSTEILKWLREILICRNKFLLKNKQADRSSCHFLLFYGVGCDIPSSGNTSQMSMDHEELLRTPGASLRKGKGNSSMDSAAGCSGTPPICRQAQTKLEVALYMFLWNPDTEAVLVAMSCFRHLCEEADIRCGVDEVSVHNLLPNYNTFMEFASVSNMMSTGRAALQKRVMALLRRIEHPTAGNTEAWEDTHAKWEQATKLILNYPKAKMEDGQAAESLHKTIVKRRMSHVSGGGSIDLSDTDSLQEWINMTGFLCALGGVCLQQRSNSGLATYSPPMGPVSERKGSMISVMSSEGNADTPVSKFMDRLLSLMVCNHEKVGLQIRTNVKDLVGLELSPALYPMLFNKLKNTISKFFDSQGQVLLTDTNTQFVEQTIAIMKNLLDNHTEGSSEHLGQASIETMMLNLVRYVRVLGNMVHAIQIKTKLCQLVEVMMARRDDLSFCQEMKFRNKMVEYLTDWVMGTSNQAADDDVKCLTRDLDQASMEAVVSLLAGLPLQPEEGDGVELMEAKSQLFLKYFTLFMNLLNDCSEVEDESAQTGGRKRGMSRRLASLRHCTVLAMSNLLNANVDSGLMHSIGLGYHKDLQTRATFMEVLTKILQQGTEFDTLAETVLADRFERLVELVTMMGDQGELPIAMALANVVPCSQWDELARVLVTLFDSRHLLYQLLWNMFSKEVELADSMQTLFRGNSLASKIMTFCFKVYGATYLQKLLDPLLRIVITSSDWQHVSFEVDPTRLEPSESLEENQRNLLQMTEKFFHAIISSSSEFPPQLRSVCHCLYQATCHSLLNKATVKEKKENKKSVVSQRFPQNSIGAVGSAMFLRFINPAIVSPYEAGILDKKPPPRIERGLKLMSKILQSIANHVLFTKEEHMRPFNDFVKSNFDAARRFFLDIASDCPTSDAVNHSLSFISDGNVLALHRLLWNNQEKIGQYLSSNRDHKAVGRRPFDKMATLLAYLGPPEHKPVADTHWSSLNLTSSKFEEFMTRHQVHEKEEFKALKTLSIFYQAGTSKAGNPIFYYVARRFKTGQINGDLLIYHVLLTLKPYYAKPYEIVVDLTHTGPSNRFKTDFLSKWFVVFPGFAYDNVSAVYIYNCNSWVREYTKYHERLLTGLKGSKRLVFIDCPGKLAEHIEHEQQKLPAATLALEEDLKVFHNALKLAHKDTKVSIKVGSTAVQVTSAERTKVLGQSVFLNDIYYASEIEEICLVDENQFTLTIANQGTPLTFMHQECEAIVQSIIHIRTRWELSQPDSIPQHTKIRPKDVPGTLLNIALLNLGSSDPSLRSAAYNLLCALTCTFNLKIEGQLLETSGLCIPANNTLFIVSISKTLAANEPHLTLEFLEECISGFSKSSIELKHLCLEYMTPWLSNLVRFCKHNDDAKRQRVTAILDKLITMTINEKQMYPSIQAKIWGSLGQITDLLDVVLDSFIKTSATGGLGSIKAEVMADTAVALASGNVKLVSSKVIGRMCKIIDKTCLSPTPTLEQHLMWDDIAILARYMLMLSFNNSLDVAAHLPYLFHVVTFLVATGPLSLRASTHGLVINIIHSLCTCSQLHFSEETKQVLRLSLTEFSLPKFYLLFGISKVKSAAVIAFRSSYRDRSFSPGSYERETFALTSLETVTEALLEIMEACMRDIPTCKWLDQWTELAQRFAFQYNPSLQPRALVVFGCISKRVSHGQIKQIIRILSKALESCLKGPDTYNSQVLIEATVIALTKLQPLLNKDSPLHKALFWVAVAVLQLDEVNLYSAGTALLEQNLHTLDSLRIFNDKSPEEVFMAIRNPLEWHCKQMDHFVGLNFNSNFNFALVGHLLKGYRHPSPAIVARTVRILHTLLTLVNKHRNCDKFEVNTQSVAYLAALLTVSEEVRSRCSLKHRKSLLLTDISMENVPMDTYPIHHGDPSYRTLKETQPWSSPKGSEGYLAATYPTVGQTSPRARKSMSLDMGQPSQANTKKLLGTRKSFDHLISDTKAPKRQEMESGITTPPKMRRVAETDYEMETQRISSSQQHPHLRKVSVSESNVLLDEEVLTDPKIQALLLTVLATLVKYTTDEFDQRILYEYLAEASVVFPKVFPVVHNLLDSKINTLLSLCQDPNLLNPIHGIVQSVVYHEESPPQYQTSYLQSFGFNGLWRFAGPFSKQTQIPDYAELIVKFLDALIDTYLPGIDEETSEESLLTPTSPYPPALQSQLSITANLNLSNSMTSLATSQHSPGIDKENVELSPTTGHCNSGRTRHGSASQVQKQRSAGSFKRNSIKKIV

SEQ ID NO: 6078 - protein, 2818 aa, Homo sapiens
MAAHRPVEWVQAVVSRFDEQLPIKTGQQNTHTKVSTEHNKECLINISKYKFSLVISGLTTILKNVNNMRIFGEAAEKNLYLSQLIILDTLEKCLAGQPKDTMRLDETMLVKQLLPEICHFLHTCREGNQHAAELRNSASGVLFSLSCNNFNAVFSRISTRLQELTVCSEDNVDVHDIELLQYINVDCAKLKRLLKETAFKFKALKKVAQLAVINSLEKAFWNWVENYPDEFTKLYQIPQTDMAECAEKLFDLVDGFAESTKRKAAVWPLQIILLILCPEIIQDISKDVVDENNMNKKLFLDSLRKALAGHGGSRQLTESAAIACVKLCKASTYINWEDNSVIFLLVQSMVVDLKNLLFNPSKPFSRGSQPADVDLMIDCLVSCFRISPHNNQHFKICLAQNSPSTFHYVLVNSLHRIITNSALDWWPKIDAVYCHSVELRNMFGETLHKAVQGCGAHPAIRMAPSLTFKEKVTSLKFKEKPTDLETRSYKYLLLSMVKLIHADPKLLLCNPRKQGPETQGSTAELITGLVQLVPQSHMPEIAQEAMEALLVLHQLDSIDLWNPDAPVETFWEISSQMLFYICKKLTSHQMLSSTEILKWLREILICRNKFLLKNKQADRSSCHFLLFYGVGCDIPSSGNTSQMSMDHEELLRTPGASLRKGKGNSSMDSAAGCSGTPPICRQAQTKLEVALYMFLWNPDTEAVLVAMSCFRHLCEEADIRCGVDEVSVHNLLPNYNTFMEFASVSNMMSTGRAALQKRVMALLRRIEHPTAGNTEAWEDTHAKWEQATKLILNYPKAKMEDGQAAESLHKTIVKRRMSHVSGGGSIDLSDTDSLQEWINMTGFLCALGGVCLQQRSNSGLATYSPPMGPVSERKGSMISVMSSEGNADTPVSKFMDRLLSLMVCNHEKVGLQIRTNVKDLVGLELSPALYPMLFNKLKNTISKFFDSQGQVLLTDTNTQFVEQTIAIMKNLLDNHTEGSSEHLGQASIETMMLNLVRYVRVLGNMVHAIQIKTKLCQLVEVMMARRDDLSFCQEMKFRNKMVEYLTDWVMGTSNQAADDDVKCLTRDLDQASMEAVVSLLAGLPLQPEEGDGVELMEAKSQLFLKYFTLFMNLLNDCSEVEDESAQTGGRKRGMSRRLASLRHCTVLAMSNLLNANVDSGLMHSIGLGYHKDLQTRATFMEVLTKILQQGTEFDTLAETVLADRFERLVELVTMMGDQGELPIAMALANVVPCSQWDELARVLVTLFDSRHLLYQLLWNMFSKEVELADSMQTLFRGNSLASKIMTFCFKVYGATYLQKLLDPLLRIVITSSDWQHVSFEVDPTRLEPSESLEENQRNLLQMTEKFFHAIISSSSEFPPQLRSVCHCLYQVVSQRFPQNSIGAVGSAMFLRFINPAIVSPYEAGILDKKPPPRIERGLKLMSKILQSIANHVLFTKEEHMRPFNDFVKSNFDAARRFFLDIASDCPTSDAVNHSLSFISDGNVLALHRLLWNNQEKIGQYLSSNRDHKAVGRRPFDKMATLLAYLGPPEHKPVADTHWSSLNLTSSKFEEFMTRHQVHEKEEFKALKTLSIFYQAGTSKAGNPIFYYVARRFKTGQINGDLLIYHVLLTLKPYYAKPYEIVVDLTHTGPSNRFKTDFLSKWFVVFPGFAYDNVSAVYIYNCNSWVREYTKYHERLLTGLKGSKRLVFIDCPGKLAEHIEHEQQKLPAATLALEEDLKVFHNALKLAHKDTKVSIKVGSTAVQVTSAERTKVLGQSVFLNDIYYASEIEEICLVDENQFTLTIANQGTPLTFMHQECEAIVQSIIHIRTRWELSQPDSIPQHTKIRPKDVPGTLLNIALLNLGSSDPSLRSAAYNLLCALTCTFNLKIEGQLLETSGLCIPANNTLFIVSISKTLAANEPHLTLEFLEECISGFSKSSIELKHLCLEYMTPWLSNLVRFCKHNDDAKRQRVTAILDKLITMTINEKQMYPSIQAKIWGSLGQITDLLDVVLDSFIKTSATGGLGSIKAEVMADTAVALASGNVKLVSSKVIGRMCKIIDKTCLSPTPTLEQHLMWDDIAILARYMLMLSFNNSLDVAAHLPYLFHVVTFLVATGPLSLRASTHGLVINIIHSLCTCSQLHFSEETKQVLRLSLTEFSLPKFYLLFGISKVKSAAVIAFRSSYRDRSFSPGSYERETFALTSLETVTEALLEIMEACMRDIPTCKWLDQWTELAQRFAFQYNPSLQPRALVVFGCISKRVSHGQIKQIIRILSKALESCLKGPDTYNSQVLIEATVIALTKLQPLLNKDSPLHKALFWVAVAVLQLDEVNLYSAGTALLEQNLHTLDSLRIFNDKSPEEVFMAIRNPLEWHCKQMDHFVGLNFNSNFNFALVGHLLKGYRHPSPAIVARTVRILHTLLTLVNKHRNCDKFEVNTQSVAYLAALLTVSEEVRSRCSLKHRKSLLLTDISMENVPMDTYPIHHGDPSYRTLKETQPWSSPKGSEGYLAATYPTVGQTSPRARKSMSLDMGQPSQANTKKLLGTRKSFDHLISDTKAPKRQEMESGITTPPKMRRVAETDYEMETQRISSSQQHPHLRKVSVSESNVLLDEEVLTDPKIQALLLTVLATLVKYTTDEFDQRILYEYLAEASVVFPKVFPVVHNLLDSKINTLLSLCQDPNLLNPIHGIVQSVVYHEESPPQYQTSYLQSFGFNGLWRFAGPFSKQTQIPDYAELIVKFLDALIDTYLPGIDEETSEESLLTPTSPYPPALQSQLSITANLNLSNSMTSLATSQHSPGIDKENVELSPTTGHCNSGRTRHGSASQVQKQRSAGSFKRNSIKKIV

SEQ ID NO: 6079 - protein, 1839 aa, Homo sapiens
MYHIDCRDQLERVFLRLGHAETDEQLQNIISKFLPPVLLKLSSTQEGVRKKVMELLVHLNKRIKSRPKIQLPVETLLVQYQDPAAVSFVTNFTIIYVKMGYPRLPVEKQCELAPTLLTAMEGKPQPQQDSLMHLLIPTLFHMKYPVESSKSASPFNLAEKPKTVQLLLDFMLDVLLMPYGYVLNESQSRQNSSSAQGSSSNSGGGSGIPQPPPGMSFYAAKRVIGDNPWTPEQLEQCKLGIVKFIEAEQVPELEAVLHLVIASSDTRHSVATAADLELKSKQSLIDWNNPAIINKMYKVYLGDIPLKTKEGAVLKPELKRDPVSTRVKLKIVPHLLRSRQAAETFPANIQVVYDGLFGTNTNSKLRTLSLQFVHHICITCPEIKIKPLGPMLLNGLTKLINEYKEDPKLLSMAYSAVGKLSSRMPHLFTKDIALVQQLFEALCKEEPETRLAIQEALSMMVGAYSTLEGAQRTLMEALVASYLIKPEVQVRQVAVKFASTVFPSDHIPSRYLLLLAAGDPREEVHGEAQRVLRCLPGRNRKESTSEQMPSFPEMVYYIQEKASHRMKTPVKYMTGTTVLPFNPAAFGEIVLYLRMCLAHSAGVVPTSQSLADMQDHAPAIGRYIRTLMSSGQMAPSSSNKSGETNPVQIYIGLLQQLLAGVGGLPVMYCLLEAVSVYPEKLATKFVDKTEWIKSLMNNSKEEMRELAALFYSVVVSTVSGNELKSMIEQLIKTTKDNHSPEIQHGSLLALGFTVGRYLAKKKMRMSEQQDLERNADTLPDQEELIQSATETIGSFLDSTSPLLAIAACTALGEIGRNGPLPIPSEGSGFTKLHLVESLLSRIPSSKETNKMKERAIQTLGYFPVGDGDFPHQKLLLQGLMDSVEAKQIELQFTIGEAITSAAIGTSSVAARDAWQMTEEEYTPPAGAKVNDVVPWVLDVILNKHIISPNPHVRQAACIWLLSLVRKLSTHKEVKSHLKEIQSAFVSVLSENDELSQDVASKGLGLVYELGNEQDQQELVSTLVETLMTGKRVKHEVSGETVVFQGGALGKTPDGQGLSTYKELCSLASDLSQPDLVYKFMNLANHHAMWNSRKGAAFGFNVIATRAGEQLAPFLPQLVPRLYRYQFDPNLGIRQAMTSIWNALVTDKSMVDKYLKEILQDLVKNLTSNMWRVRESSCLALNDLLRGRPLDDIIDKLPEIWETLFRVQDDIKESVRKAAELALKTLSKVCVKMCDPAKGAAGQRTIAALLPCLLDKGMMSTVTEVRALSINTLVKISKSAGAMLKPHAPKLIPALLESLSVLEPQVLNYLSLRATEQEKAAMDSARLSAAKSSPMMETINMCLQYLDVSVLGELVPRLCELIRSGVGLGTKGGCASVIVSLTTQCPQDLTPYSGKLMSALLSGLTDRNSVIQKSCAFAMGHLVRTSRDSSTEKLLQKLNGWYMEKEEPIYKTSCALTIHAIGRYSPDVLKNHAKEVLPLAFLGMHEIADEEKSEKEECNLWTEVWQENVPGSFGGIRLYLQELITITQKALQSQSWKMKAQGAIAMASIAKQTSSLVPPYLGMILTALLQGLAGRTWAGKEELLKAIACVVTACSAELEKSVPNQPSTNEILQAVLKECSKENVKYKIVAISCAADILKATKEDRFQEFSNIVIPLIKKNSLESSGVRTTKNEEENEKEKELQLEYLLGAFESLGKAWPRNAETQRCYRQELCKLMCERLKLSTWKVQLGVLQSMNAFFQGLMLLEEEHADPEALAEILLETCKSITYSLENKTYSSVRTEALSVIELLLKKLEESKQWECLTSECRVLLIESLATMEPDSRPELQEKAALLKKTLENLE

SEQ ID NO: 6080 - protein, 536 aa, Homo sapiens
MSPRVVSNSSVLASQSVGITNVRTVFSNVFNNTTAFPILRGSNCHKITAPGLGKGQLVNLLPPENLPWCGGSQGPRMLRTCYVLCSQAGPPSRGWQSLSFDGGAFHLKGTGELTRALLVLRLCAWPPLVTHGLLLQAWSRRLLGSRLSGAFLRASVYGQFVAGETAEEVKGCVQQLRTLSLRPLLAVPTEEEPDSAAKSGEAWYEGNLGAMLRCVDLSRGLLEPPSLAEASLMQLKVTALTSTRLCKELASWVRRPGASLELSPERLAEAMDSGQNLQVSCLNAEQNQHLRASLSRLHRVAQYARAQHVRLLVDAEYTSLNPALSLLVAALAVRWNSPGEGGPWVWNTYQACLKDTFERLGRDAEAAHRAGLAFGVKLVRGAYLDKERAVAQLHGMEDPTQPDYEATSQSYSRCLELMLTHVARHGPMCHLMVASHNEESVRQATKRMWELGIPLDGTVCFGQLLGMCDHVSLALGQAGYVVYKSIPYGSLEEVIPYLIRRAQENRSVLQGARREQELLSQELWRRLLPGCRRIPH

SEQ ID NO: 6081 - protein, 701 aa, Homo sapiens
CITSSYVPLKPFEKNCQNITVEVEEFVPEMTKYCYPFTIYKNHLYVYPLQLKYDSQKTFAKARNIAVCVEFRDSDESDASALKCIYGKPAGSVFTTNAYAVVSHHNQNPEFYDEIKIELPIHLHQKHHLLFTFYHVSCEINTKGTTKKQDTVETPVGFAWVPLLKDGRIITFEQQLPVSANLPPGYLNLNDAESRRQCNVDIKWVDGAKPLLKIKSHLESTIYTQDLHVHKFFHHCQLIQSGSKEVPGELIKYLKCLHAMEIQVMIQFLPVILMQLFRVLTNMTHEDDVPINCTMVLLHIVSKCHEEGLDSYLRSFIKYSFRPEKPSAPQAQLIHETLATTMIAILKQSADFLSINKLLKYSWFFFEIIAKSMATYLLEENKIKLPRGQRFPETYHHVLHSLLLAIIPHVTIRYAEIPDESRNVNYSLASFLKRCLTLMDRGFIFNLINDYISGFSPKDPKVLAEYKFEFLQTICNHEHYIPLNLPMAFAKPKLQRVQDSNLEYSLSDEYCKHHFLVGLLLRETSIALQDNYEIRYTAISVIKNLLIKHAFDTRYQHKNQQAKIAQLYLPFVGLLLENIQRLAGRDTLYSCAAMPNSLMGLFKMDMELREKIQEVPSSQKEQQDFQIRATLVKIHDYFKILPLKHMAYENETQYSWLYLCEDSKTRQSSTRSSVSQYNRLDQYEIRSLLMCYLYIVKMISE

SEQ ID NO: 6082 - protein, 2073 aa, Homo sapiens
MAEVRKFTKRLSKPGTAAELRQSVSEAVRGSVVLEKAKVVEPLDYENVIAQRKTQIYSDPLRDLLMFPMEDISISVIGRQRRTVQSTVPEDAEKRAQSLFVKECIKTYSTDWHVVNYKYEDFSGDFRMLPCKSLRPEKIPNHVFEIDEDCEKDEDSSSLCSQKGGVIKQGWLHKANVNSTITVTMKVFKRRYFYLTQLPDGSYILNSYKDEKNSKESKGCIYLDACIDVVQCPKMRRHAFELKMLDKYSHYLAAETEQEMEEWLITLKKIIQINTDSLVQEKKETVETAQDDETSSQGKAENIMASLERSMHPELMKYGRETEQLNKLSRGDGRQNLFSFDSEVQRLDFSGIEPDIKPFEEKCNKRFLVNCHDLTFNILGQIGDNAKGPPTNVEPFFINLALFDVKNNCKISADFHVDLNPPSVREMLWGSSTQLASDGSPKGSSPESYIHGIAESQLRYIQQGIFSVTNPHPEIFLVARIEKVLQGNITHCAEPYIKNSDPVKTAQKVHRTAKQVCSRLGQYRMPFAWAARPIFKDTQGSLDLDGRFSPLYKQDSSKLSSEDILKLLSEYKKPEKTKLQIIPGQLNITVECVPVDLSNCITSSYVPLKPFEKNCQNITVEVEEFVPEMTKYCYPFTIYKNHLYVYPLQLKYDSQKTFAKARNIAVCVEFRDSDESDASALKCIYGKPAGSVFTTNAYAVVSHHNQNPEFYDEIKIELPIHLHQKHRLLFTFYHVSCEINTKGTTKKQDTVETPVGFAWVPLLKDGRIITFEQQLPVSANLPPGYLNLNDAESRRQCNVDIKWVDGAKPLLKIKSHLESTIYTQDLHVHKFFHHCQLIQSGSKEVPGELIKYLKCLHAMEIQVMIQFLPVILMQLFRVLTNMTHEDDVPINCTMVLLHIVSKCHEEGLDSYLRSFIKYSFRPEKPSAPQAQLIHETLATTMIAILKQSADFLSINKLLKYSWFFFEIIAKSMATYLLEENKIKLPRGQRFPETYHHVLHSLLLAIIPHVTIRYAEIPDESRNVNYSLASFLKRCLTLMDRGFIFNLINDYISGFSPKDPKVLAEYKFEFLQTICNHEHYIPLNLPMAFAKPKLQRVQDSNLEYSLSDEYCKHHFLVGLLLRETSIALQDNYEIRYTAISVIKNLLIKHAFDTRYQHKNQQAKIAQLYLPFVGLLLENIQRLAGRDTLYSCAAMPNSASRDEFPCGFTSPANRGSLSTDKDTAYGSFQNGHGIKREDSRGSLIPEGATGFPDQGNTGENTRQSSTRSSVSQYNRLDQYEIRSLLMCYLYIVKMISEDTLLTYWNKVSPQELINILILLEVCLFHFRYMGKRNIARVHDAWLSKHFGIDRKSQTMPALRNRSGVMQARLQHLSSLESSFTLNHSSTTTEADIFHQALLEGNTATEVSLTVLDTISFFTQCFKTQLLNNDGHNPLMKKVFDIHLAFLKNGQSEVSLKHVFASLRAFISKFPSAFFKGRVNMCAAFCYEVLKCCTSKISSTRNEASALLYLLMRNNFEYTKRKTFLRTHLQIIIAVSQLIADVALSGGSRFQESLFIINNFANSDRPMKATAFPAEVKDLTKRIRTVLMATAQMKEHEKDPEMLIDLQYSLAKSYASTPELRKTWLDSMAKIHVKNGDFSEAAMCYVHVAALVAEFLHRKKLFPNGCSAFKKITPNIDEEGAMKEDAGMMDVHYSEEVLLELLEQCVDGLWKAERYEIISEISKLIVPIYEKRREFEKLTQVYRTLHGAYTKILEVMHTKKRLLGTFFRVAFYGQSFFEEEDGKEYIYKEPKLTGLSEISLRLVKLYGEKFGTENVKIIQDSDKVNAKELDPKYAHIQVTYVKPYFDDKELTERKTEFERNHNISRFVFEAPYTLSGKKQGCIEEQCKRRTILTTSNSFPYVKKRIPINCEQQINLKPIDVATDEIKDKTAELQKLCSSTDVDMIQLQLKLQGCVSVQVNAGPLAYARAFLNDSQASKYPPKKVSELKDMFRKFIQACSIALELNERLIKEDQVEYHEGLKSNFRDMVKELSDIIHEQILQEDTMHSPWMSNTLHVFCAISGTSSDRGYGSPRYAEV

SEQ ID NO: 6083 - protein, 477 aa, Homo sapiens
RLVNSAAQTCSGLRVRAQRRAGGLARALPRPACVPRPAPPPPSRSPPRAPGSAGPMPAGRRGPAAQSARRPPPLLPLLLLLCVLGAPRAGSGAHTAVISPQDPTLLIGSSLLATCSVHGDPPGATAEGLYWTLNGRRLPPELSRVLNASTLALALANLNGSRQRSGDNLVCHARDGSILAGSCLYVGLPPEKPVNISCWSKNMKDLTCRWTPGAHGETFLHTNYSLKYKLRWYGQDNTCEEYHTVGPHSCHIPKDLALFTPYEIWVEATNRLGSARSDVLTLDILDVVTTDPPPDVHVSRVGGLEDQLSVRWVSPPALKDFLFQAKYQIRYRVEDSVDWKVVDDVSNQTSCRLAGLKPGTVYFVQVRCNPFGIYGSKKAGIWSEWSHPTAASTPRSERPGPGGGACEPRGGEPSSGPVRRELKQFLGWLKKHAYCSNLSFRLYDQWRAWMQKSHKTRNQDEGILPSGRRGTARGPAR

SEQ ID NO: 6084 - protein, 261 aa, Homo sapiens
MGCIQSITCKARIRRENIVVYDVCATIDQCPTRIEETSPIVLRYKTPYFKASARVVMPPIPRHETWVVGWIQACNQMEFFNTYSDLGMSSWELPDLREGRVKAISDSDGVSYPWYGNTTETVTLVGPTNKISRFSVSMNDNFYPSVTWAVPVSDSNVPLLTRIKRDQSFTTWLVAMNTTTKEKIILQTIKWRMRVDIEVDPLQLLGQRARLVGRTQQEQPRILSRMEPIPPNALVKPNANDAQVLMWRPKRGPPLVVIPPK

SEQ ID NO: 6085 - protein, 660 aa, Homo sapiens
MSHVVVKNDPELDQQLANLDLNSEKQSGGASTASKGRYIPPHLRNREASKGFHDKDSSGWSCSKDKDAYSSFGSRDSRGKPGYFSERGSGSRGRFDDRGRSDYDGIGNRERPGFGRFERSGHSRWCDKSVEDDWSKPLPPSERLEQELFSGGNTGINFEKYDDIPVEATGSNCPPHIENFSDIDMGEIIMGNIELTRYTRPTPVQKHAIPIIKGKRDLMACAQTGSGKTAAFLLPILSQIYTDGPGEALKAVKENGRYGRRKQYPISLVLAPTRELAVQIYEEARKFSYRSRVRPCVVYGGADIGQQIRDLERGCHLLVATPGRLVDMMERGKIGLDFCKYLVLDEADRMLDMGFEPQIRRIVEQDTMPPKGVRHTMMFSATFPKEIQMLARDFLDEYIFLAVGRVGSTSENITQKVVWVEDLDKRSFLLDILGATGSDSLTLVFVETKKGADSLEDFLYHEGYACTSIHGDRSQRDREEALHQFRSGKSPILVATAVAARGLDISNVRHVINFDLPSDIEEYVHRIGRTGRVGNLGLATSFFNEKNMNITKDLLDLLVEAKQEVPSWLENMAYEHHYKGGSRGRSKSNRFSGGFGARDYRQSSGSSSSGFGASRGSSSRSGGGGYGNSRGFGGGGYGGFYNSDGYGGNYNSQGVDWWGN

SEQ ID NO: 6086 - protein, 660 aa, Homo sapiens [sequence omitted]

SEQ ID NO: 6087 - protein, 1794 aa, Homo sapiens
MGDVKLVASSHISKTSLSVDPSRVDSMPLTEAPAFILPPRNLCIKEGATAKFEGRVRGYPEPQVTWHRNGQPITSGGRFLLDCGIRGTFSLVIHAVHEEDRGKYTCEATNGSGARQVTVELTVEGSFAKQLGQPVVSKTLGDRFSASAVETRPSIWGECPPKFATKLGRVVVKEGQMGRFSCKITGRPQPQVTWLKGNVPLQPSARVSVSEKNGMQVLEIHGVNQDDVGVYTCLVVNGSGKASMSAELSIQGLDSANRSFVRETKATNSDVRKEVTNVISKESKLDSLEAAAKSKNCSSPQRGGSPPWAANSQPQPPRESKLESCKDSPRTAPQTPVLQKTSSSITLQAARVQPEPRAPGLGVLSPSGEERKRPAPPRPATFPTRQPGLGSQDVVSKAANRRIPMEGQRDSAFPKFESKPQSQEVKENQTVKFRCEGLAVMEVAPSFSSVLKDCAVIEGQDFVLQCSVRGTPVPRITWLLNGQPIQYARSTCEAGVAELHIQDALPEDHGTYTCLAENALGQVSCSAWVTVHEKKSSRKSEYLLPVAPSKPTAPIFLQGLSDLKVMDGSQVTMTVQVSGNPPPEVIWLHNGNEIQESEDFHFEQRGTQHSLWIQEVFPEDTGTYTCEAWNSAGEVRTQAVLTVQEPHDGTQPWFISKPRSVTASLGQSVLISCAIAGDPFPTVHWLRDGKALCKDTGHFEVLQNEDVFTLVLKKVQPWHAGQYEILLKNRVGECSCQVSLMLQNSSARALPRGREPASCEDLCGGGVGADGGGSDRYGSLRPGWPARGQGWLEEEDGEDVRGVLKRRVETRQHTEEAIRQQEVEQLDFRDLLGKKVSTKTLSEDDLKEIPAEQMDFRANLQRQVKPKTVSEEERKVHSPQQVDFRSVLAKKGTSKTPVPEKVPPPKPATPDFRSVLGGKKKLPAENGSSSAETLNAKAVESSKPLSNAQPSGPLKPVGNAKPAETLKPMGNAKPAETLKPMGNAKPDENLKSASKEELKKDVKNDVNCKRGHAGTTDNEKRSESQGTAPAFKQKLQDVHVAEGKKLLLQCQVSSDPPATIIWTLNGKTLKTTKFIILSQEGSLCSVSIEKALPEDRGLYKCVAKNDAGQAECSCQVTVDDAPASENTKAPEMKSRRPKSSLPPVLGTESDATVKKKPAPKTPPKAAMPPQIIQFPEDQKVRAGESVELFGKVTGTQPITCTWMKFRKQIQESEHMKVENSENGSKLTILAARQEHCGCYTLLVENKLGSRQAQVNLTVVDKPDPPAGTPCASDIRSSSLTLSWYGSSYDGGSAVQSYSIEIWDSANKTWKELATCRSTSFNVQDLLPDHEYKFRVRAINVYGTSEPSQESELTTVGEKPEEPKDEVEVSDDDEKEPEVDYRTVTINTEQKVSDFYDIEERLGSGKFGQVFRLVEKKTRKVWAGKFFKAYSAKEKENIRQEISIMNCLHHPKLVQCVDAFEEKANIVMVLEIVSGGELFERIIDEDFELTERECIKYMRQISEGVEYIHKQGIVHLDLKPENIMCVNKTGTRIKLIDFGLARRLENAGSLKVLFGTPEFVAPEVINYEPIDATDMWSIGVICYILNRLDWLTQCLQHPWLMKDTKNMEAKKLSKDRMKKYMARRKWQKTGNAVRAIGRLSSMAMISGLSGRKSSTGSPTSPLNAEKLESEEDVSQAFLEAVAEEKPHVKPYFSKTIRDLEVVEGSAARFDCKIEGYPDPEVVWFKDDQSIRESRHFQIDYDEDGNCSLIISDVCGDDDAKYTCKAVNSLGEATCTAELIVETMEEGEGEGEEEEE

SEQ ID NO: 6088 - protein, 1863 aa, Homo sapiens
MGDVKLVASSHISKTSLSVDPSRVDSMPLTEAPAFILPPRNLCIKEGATAKFEGRVRGYPEPQVTWHRNGQPITSGGRFLLDCGIRGTFSLVIHAVHEEDRGKYTCEATNGSGARQVTVELTVEGSFAKQLGQPVVSKTLGDRFSASAVETRPSIWGECPPKFATKLGRVVVKEGQMGRFSCKITGRPQPQVTWLKGNVPLQPSARVSVSEKNGMQVLEIHGVNQDDVGVYTCLVVNGSGKASMSAELSIQGLDSANRSFVRETKATNSDVRKEVTNVISKESKLDSLEAAAKSKNCSSPQRGGSPPWAANSQPQPPRESKLESCKDSPRTAPQTPVLQKTSSSITLQAARVQPEPRAPGLGVLSPSGEERKRPAPPRPATFPTRQPGLGSQDVVSKAANRRIPMEGQRDSAFPKFESKPQSQEVKENQTVKFRCEVSGIPKPEVAWFLEGTPVRRQEGSIEVYEDAGSHYLCLLKARTRDSGTYSCTASNAQGQVSCSWTLQVERLAVMEVAPSFSSVLKDCAVIEGQDFVLQCSVRGTPVPRITWLLNGQPIQYARSTCEAGVAELHIQDALPEDHGTYTCLAENALGQVSCSAWVTVHEKKSSRKSEYLLPVAPSKPTAPIFLQGLSDLKVMDGSQVTMTVQVSGNPPPEVIWLHNGNEIQESEDFHFEQRGTQHSLWIQEVFPEDTGTYTCEAWNSAGEVRTQAVLTVQEPHDGTQPWFISKPRSVTASLGQSVLISCAIAGDPFPTVHWLRDGKALCKDTGHFEVLQNEDVFTLVLKKVQPWHAGQYEILLKNRVGECSCQVSLMLQNSSARALPRGREPASCEDLCGGGVGADGGGSDRYGSLRPGWPARGQGWLEEEDGEDVRGVLKRRVETRQHTEEAIRQQEVEQLDFRDLLGKKVSTKTLSEDDLKEIPAEQMDFRANLQRQVKPKTVSEEERKVHSPQQVDFRSVLAKKGTSKTPVPEKVPPPKPATPDFRSVLGGKKKLPAENGSSSAETLNAKAVESSKPLSNAQPSGPLKPVGNAKPAETLKPMGNAKPAETLKPMGNAKPDENLKSASKEELKKDVKNDVNCKRGHAGTTDNEKRSESQGTAPAFKQKLQDVHVAEGKKLLLQCQVSSDPPATIIWTLNGKTLKTTKFIILSQEGSLCSVSIEKALPEDRGLYKCVAKNDAGQAECSCQVTVDDAPASENTKAPEMKSRRPKSSLPPVLGTESDATVKKKPAPKTPPKAAMPPQIIQFPEDQKVRAGESVELFGKVTGTQPITCTWMKFRKQIQESEHMKVENSENGSKLTILAARQEHCGCYTLLVENKLGSRQAQVNLTVVDKPDPPAGTPCASDIRSSSLTLSWYGSSYDGGSAVQSYSIEIWDSANKTWKELATCRSTSFNVQDLLPDHEYKFRVRAINVYGTSEPSQESELTTVGEKPEEPKMKWRCQTDDEKEPEVDYRTVTINTEQKVSDFYDIEERLGSGKFGQVFRLVEKKTRKVWAGKFFKAYSAKEKENIRQEISIMNCLHHPKLVQCVDAFEEKANIVMVLEIVSGGELFERIIDEDFELTERECIKYMRQISEGVEYIHKQGIVHLDLKPENIMCVNKTGTRIKLIDFGLARRLENAGSLKVLFGTPEFVAPEVINYEPIGYATDMWSIGVICYILNRLDCTQCLQHPWLMKDTKNMEAKKLSKDRMKKYMARRKWQKTGNAVRAIGRLSSMAMISGLSGRKSSTGSPTSPLNAEKLESEEDVSQAFLEAVAEEKPHVKPYFSKTIRDLEVVEGSAARFDCKIEGYPDPEVVWFKDDQSIRESRHFQIDYDEDGNCSLIISDVCGDDDAKYTCKAVNSLGEATCTAELIVETMEEGEGEGEEEEE

SEQ ID NO: 6089 - protein, 1914 aa, Homo sapiens
MGDVKLVASSHISKTSLSVDPSRVDSMPLTEAPAFILPPRNLCIKEGATAKFEGRVRGYPEPQVTWHRNGQPITSGGRFLLDCGIRGTFSLVIHAVHEEDRGKYTCEATNGSGARQVTVELTVEGSFAKQLGQPVVSKTLGDRFSASAVETRPSIWGECPPKFATKLGRVVVKEGQMGRFSCKITGRPQPQVTWLKGNVPLQPSARVSVSEKNGMQVLEIHGVNQDDVGVYTCLVVNGSGKASMSAELSIQGLDSANRSFVRETKATNSDVRKEVTNVISKESKLDSLEAAAKSKNCSSPQRGGSPPWAANSQPQPPRESKLESCKDSPRTAPQTPVLQKTSSSITLQAARVQPEPRAPGLGVLSPSGEERKRPAPPRPATFPTRQPGLGSQDVVSKAANRRIPMEGQRDSAFPKFESKPQSQEVKENQTVKFRCEVSGIPKPEVAWFLEGTPVRRQEGSIEVYEDAGSHYLCLLKARTRDSGTYSCTASNAQGQVSCSWTLQVERLAVMEVAPSFSSVLKDCAVIEGQDFVLQCSVRGTPVPRITWLLNGQPIQYARSTCEAGVAELHIQDALPEDHGTYTCLAENALGQVSCSAWVTVHEKKSSRKSEYLLPVAPSKPTAPIFLQGLSDLKVMDGSQVTMTVQVSGNPPPEVIWLHNGNEIQESEDFHFEQRGTQHSLWIQEVFPEDTGTYTCEAWNSAGEVRTQAVLTVQEPHDGTQPWFISKPRSVTASLGQSVLISCAIAGDPFPTVHWLRDGKALCKDTGHFEVLQNEDVFTLVLKKVQPWHAGQYEILLKNRVGECSCQVSLMLQNSSARALPRGREPASCEDLCGGGVGADGGGSDRYGSLRPGWPARGQGWLEEEDGEDVRGVLKRRVETRQHTEEAIRQQEVEQLDFRDLLGKKVSTKTLSEDDLKEIPAEQMDFRANLQRQVKPKTVSEEERKVHSPQQVDFRSVLAKKGTSKTPVPEKVPPPKPATPDFRSVLGGKKKLPAENGSSSAETLNAKAVESSKPLSNAQPSGPLKPVGNAKPAETLKPMGNAKPAETLKPMGNAKPDENLKSASKEELKKDVKNDVNCKRGHAGTTDNEKRSESQGTAPAFKQKLQDVHVAEGKKLLLQCQVSSDPPATIIWTLNGKTLKTTKFIILSQEGSLCSVSIEKALPEDRGLYKCVAKNDAGQAECSCQVTVDDAPASENTKAPEMKSRRPKSSLPPVLGTESDATVKKKPAPKTPPKAAMPPQIIQFPEDQKVRAGESVELFGKVTGTQPITCTWMKFRKQIQESEHMKVENSENGSKLTILAARQEHCGCYTLLVENKLGSRQAQVNLTVVDKPDPPAGTPCASDIRSSSLTLSWYGSSYDGGSAVQSYSIEIWDSANKTWKELATCRSTSFNVQDLLPDHEYKFRVRAINVYGTSEPSQESELTTVGEKPEEPKDEVEVSDDDEKEPEVDYRTVTINTEQKVSDFYDIEERLGSGKFGQVFRLVEKKTRKVWAGKFFKAYSAKEKENIRQEISIMNCLHHPKLVQCVDAFEEKANIVMVLEIVSGGELFERIIDEDFELTERECIKYMRQISEGVEYIHKQGIVHLDLKPENIMCVNKTGTRIKLIDFGLARRLENAGSLKVLFGTPEFVAPEVINYEPIGYATDMWSIGVICYILVSGLSPFMGDNDNETLANVTSATWDFDDEAFDEISDDAKDFISNLLKKDMKNRLDCTQCLQHPWLMKDTKNMEAKKLSKDRMKKYMARRKWQKTGNAVRAIGRLSSMAMISGLSGRKSSTGSPTSPLNAEKLESEEDVSQAFLEAVAEEKPHVKPYFSKTIRDLEVVEGSAARFDCKIEGYPDPEVVWFKDDQSIRESRHFQIDYDEDGNCSLIISDVCGDDDAKYTCKAVNSLGEATCTAELIVETMEEGEGEGEEEEE

SEQ ID NO: 6090 - protein, 1794 aa, Homo sapiens
MGDVKLVASSHISKTSLSVDPSRVDSMPLTEAPAFILPPRNLCIKEGATAKFEGRVRGYPEPQVTWHRNGQPITSGGRFLLDCGIRGTFSLVIHAVHEEDRGKYTCEATNGSGARQVTVELTVEGSFAKQLGQPVVSKTLGDRFSASAVETRPSIWGECPPKFATKLGRVVVKEGQMGRFSCKITGRPQPQVTWLKGNVPLQPSARVSVSEKNGMQVLEIHGVNQDDVGVYTCLVVNGSGKASMSAELSIQGLDSANRSFVRETKATNSDVRKEVTNVISKESKLDSLEAAAKSKNCSSPQRGGSPPWAANSQPQPPRESKLESCKDSPRTAPQTPVLQKTSSSITLQAARVQPEPRAPGLGVLSPSGEERKRPAPPRPATFPTRQPGLGSQDVVSKAANRRIPMEGQRDSAFPKFESKPQSQEVKENQTVKFRCEGLAVMEVAPSFSSVLKDCAVIEGQDFVLQCSVRGTPVPRITWLLNGQPIQYARSTCEAGVAELHIQDALPEDHGTYTCLAENALGQVSCSAWVTVHEKKSSRKSEYLLPVAPSKPTAPIFLQGLSDLKVMDGSQVTMTVQVSGNPPPEVIWLHNGNEIQESEDFHFEQRGTQHSLWIQEVFPEDTGTYTCEAWNSAGEVRTQAVLTVQEPHDGTQPWFISKPRSVTASLGQSVLISCAIAGDPFPTVHWLRDGKALCKDTGHFEVLQNEDVFTLVLKKVQPWHAGQYEILLKNRVGECSCQVSLMLQNSSARALPRGREPASCEDLCGGGVGADGGGSDRYGSLRPGWPARGQGWLEEEDGEDVRGVLKRRVETRQHTEEAIRQQEVEQLDFRDLLGKKVSTKTLSEDDLKEIPAEQMDFRANLQRQVKPKTVSEEERKVHSPQQVDFRSVLAKKGTSKTPVPEKVPPPKPATPDFRSVLGGKKKLPAENGSSSAETLNAKAVESSKPLSNAQPSGPLKPVGNAKPAETLKPMGNAKPAETLKPMGNAKPDENLKSASKEELKKDVKNDVNCKRGHAGTTDNEKRSESQGTAPAFKQKLQDVHVAEGKKLLLQCQVSSDPPATIIWTLNGKTLKTTKFIILSQEGSLCSVSIEKALPEDRGLYKCVAKNDAGQAECSCQVTVDDAPASENTKAPEMKSRRPKSSLPPVLGTESDATVKKKPAPKTPPKAAMPPQIIQFPEDQKVRAGESVELFGKVTGTQPITCTWMKFRKQIQESEHMKVENSENGSKLTILAARQEHCGCYTLLVENKLGSRQAQVNLTVVDKPDPPAGTPCASDIRSSSLTLSWYGSSYDGGSAVQSYSIEIWDSANKTWKELATCRSTSFNVQDLLPDHEYKFRVRAINVYGTSEPSQESELTTVGEKPEEPKMKWRCQTDDEKEPEVDYRTVTINTEQKVSDFYDIEERLGSGKFGQVFRLVEKKTRKVWAGKFFKAYSAKEKENIRQEISIMNCLHHPKLVQCVDAFEEKANIVMVLEIVSGGELFERIIDEDFELTERECIKYMRQISEGVEYIHKQGIVHLDLKPENIMCVNKTGTRIKLIDFGLARRLENAGSLKVLFGTPEFVAPEVINYEPIGYATDMWSIGVICYILNRLDCTQCLQHPWLMKDTKNMEAKKLSKDRMKKYMARRKWQKTGNAVRAIGRLSSMAMISGLSGRKSSTGSPTSPLNAEKLESEEDVSQAFLEAVAEEKPHVKPYFSKTIRDLEVVEGSAARFDCKIEGYPDPEVVWFKDDQSIRESRHFQIDYDEDGNCSLIISDVCGDDDAKYTCKAVNSLGEATCTAELIVETMEEGEGEGEEEEE

SEQ ID NO: 6091 - protein, 1841 aa, Homo sapiens
MGDVKLVASSHISKTSLSVDPSRVDSMPLTEAPAFILPPRNLCIKEGATAKFEGRVRGYPEPQVTWHRNGQPITSGGRFLLDCGIRGTFSLVIHAVHEEDRGKYTCEATNGSGARQVTVELTVEGSFAKQLGQPVVSKTLGDRFSASAVETRPSIWGECPPKFATKLGRVVVKEGQMGRFSCKITGRPQPQVTWLKGNVPLQPSARVSVSEKNGMQVLEIHGVNQDDVGVYTCLVVNGSGKASMSAELSIQGLDSANRSFVRETKATNSDVRKEVTNVISKESKLDSLEAAAKSKNCSSPQRGGSPPWAANSQPQPPRESKLESCKDSPRTAPQTPVLQKTSSSITLQAARVQPEPRAPGLGVLSPSGEERKRPAPPRPATFPTRQPGLGSQDVVSKAANRRIPMEGQRDSAFPKFESKPQSQEVKENQTVKFRCEVSGIPKPEVAWFLEGTPVRRQEGSIEVYEDAGSHYLCLLKARTRDSGTYSCTASNAQGQVSCSWTLQVERLAVMEVAPSFSSVLKDCAVIEGQDFVLQCSVRGTPVPRITWLLNGQPIQYARSTCEAGVAELHIQDALPEDHGTYTCLAENALGQVSCSAWVTVHEKKSSRKSEYLLPVAPSKPTAPIFLQGLSDLKVMDGSQVTMTVQVSGNPPPEVIWLHNGNEIQESEDFHFEQRGTQHSLWIQEVFPEDTGTYTCEAWNSAGEVRTQAVLTVQEPHDGTQPWFISKPRSVTASLGQSVLISCAIAGDPFPTVHWLRDGKALCKDTGHFEVLQNEDVFTLVLKKVQPWHAGQYEILLKNRVGECSCQVSLMLQNSSARALPRGREPASCEDLCGGGVGADGGGSDRYGSLRPGWPARGQGWLEEEDGEDVRGVLKRRVETRQHTEEAIRQQEVEQLDFRDLLGKKVSTKTLSEDDLKEIPAEQMDFRANLQRQVKPKTVSEEERKVHSPQQVDFRSVLAKKGTSKTPVPEKVPPPKPATPDFRSVLGGKKKLPAENGSSSAETLNAKAVESSKPLSNAQPSGPLKPVGNAKPAETLKPMGNAKPAETLKPMGNAKPDENLKSASKEELKKDVKNDVNCKRGHAGTTDNEKRSESQGTAPAFKQKLQDVHVAEGKKLLLQCQVSSDPPATIIWTLNGKTLKTTKFIILSQEGSLCSVSIEKALPEDRGLYKCVAKNDAGQAECSCQVTVDDAPASENTKAPEMKSRRPKSSLPPVLGTESDATVKKKPAPKTPPKAAMPPQIIQFPEDQKVRAGESVELFGKVTGTQPITCTWMKFRKQIQESEHMKVENSENGSKLTILAARQEHCGCYTLLVENKLGSRQAQVNLTVVDKPDPPAGTPCASDIRSSSLTLSWYGSSYDGGSAVQSYSIEIWDSANKTWKELATCRSTSFNVQDLLPDHEYKFRVRAINVYGTSEPSQESELTTVGEKPEEPKDEVEVSDDDEKEPEVDYRTVTINTEQKVSDFYDIEERLGSLFERIIDEDFELTERECIKYMRQISEGVEYIHKQGIVHLDLKPENIMCVNKTGTRIKLIDFGLARRLENAGSLKVLFGTPEFVAPEVINYEPIGYATDMWSIGVICYILVSGLSPFMGDNDNETLANVTSATWDFDDEAFDEISDDAKDFISNLLKKDMKNRLDCTQCLQHPWLMKDTKNMEAKKLSKDRMKKYMARRKWQKTGNAVRAIGRLSSMAMISGLSGRKSSTGSPTSPLNAEKLESEEDVSQAFLEAVAEEKPHVKPYFSKTIRDLEVVEGSAARFDCKIEGYPDPEVVWFKDDQSIRESRHFQIDYDEDGNCSLIISDVCGDDDAKYTCKAVNSLGEATCTAELIVETMEEGEGEGEEEEE

SEQ ID NO: 6092 - protein, 1845 aa, Homo sapiens
MGDVKLVASSHISKTSLSVDPSRVDSMPLTEAPAFILPPRNLCIKEGATAKFEGRVRGYPEPQVTWHRNGQPITSGGRFLLDCGIRGTFSLVIHAVHEEDRGKYTCEATNGSGARQVTVELTVEGSFAKQLGQPVVSKTLGDRFSASAVETRPSIWGECPPKFATKLGRVVVKEGQMGRFSCKITGRPQPQVTWLKGNVPLQPSARVSVSEKNGMQVLEIHGVNQDDVGVYTCLVVNGSGKASMSAELSIQGLDSANRSFVRETKATNSDVRKEVTNVISKESKLDSLEAAAKSKNCSSPQRGGSPPWAANSQPQPPRESKLESCKDSPRTAPQTPVLQKTSSSITLQAARVQPEPRAPGLGVLSPSGEERKRPAPPRPATFPTRQPGLGSQDVVSKAANRRIPMEGQRDSAFPKFESKPQSQEVKENQTVKFRCEGLAVMEVAPSFSSVLKDCAVIEGQDFVLQCSVRGTPVPRITWLLNGQPIQYARSTCEAGVAELHIQDALPEDHGTYTCLAENALGQVSCSAWVTVHEKKSSRKSEYLLPVAPSKPTAPIFLQGLSDLKVMDGSQVTMTVQVSGNPPPEVIWLHNGNEIQESEDFHFEQRGTQHSLWIQEVFPEDTGTYTCEAWNSAGEVRTQAVLTVQEPHDGTQPWFISKPRSVTASLGQSVLISCAIAGDPFPTVHWLRDGKALCKDTGHFEVLQNEDVFTLVLKKVQPWHAGQYEILLKNRVGECSCQVSLMLQNSSARALPRGREPASCEDLCGGGVGADGGGSDRYGSLRPGWPARGQGWLEEEDGEDVRGVLKRRVETRQHTEEAIRQQEVEQLDFRDLLGKKVSTKTLSEDDLKEIPAEQMDFRANLQRQVKPKTVSEEERKVHSPQQVDFRSVLAKKGTSKTPVPEKVPPPKPATPDFRSVLGGKKKLPAENGSSSAETLNAKAVESSKPLSNAQPSGPLKPVGNAKPAETLKPMGNAKPAETLKPMGNAKPDENLKSASKEELKKDVKNDVNCKRGHAGTTDNEKRSESQGTAPAFKQKLQDVHVAEGKKLLLQCQVSSDPPATIIWTLNGKTLKTTKFIILSQEGSLCSVSIEKALPEDRGLYKCVAKNDAGQAECSCQVTVDDAPASENTKAPEMKSRRPKSSLPPVLGTESDATVKKKPAPKTPPKAAMPPQIIQFPEDQKVRAGESVELFGKVTGTQPITCTWMKFRKQIQESEHMKVENSENGSKLTILAARQEHCGCYTLLVENKLGSRQAQVNLTVVDKPDPPAGTPCASDIRSSSLTLSWYGSSYDGGSAVQSYSIEIWDSANKTWKELATCRSTSFNVQDLLPDHEYKFRVRAINVYGTSEPSQESELTTVGEKPEEPKDEVEVSDDDEKEPEVDYRTVTINTEQKVSDFYDIEERLGSGKFGQVFRLVEKKTRKVWAGKFFKAYSAKEKENIRQEISIMNCLHHPKLVQCVDAFEEKANIVMVLEIVSGGELFERIIDEDFELTERECIKYMRQISEGVEYIHKQGIVHLDLKPENIMCVNKTGTRIKLIDFGLARRLENAGSLKVLFGTPEFVAPEVINYEPIGYATDMWSIGVICYILVSGLSPFMGDNDNETLANVTSATWDFDDEAFDEISDDAKDFISNLLKKDMKNRLDCTQCLQHPWLMKDTKNMEAKKLSKDRMKKYMARRKWQKTGNAVRAIGRLSSMAMISGLSGRKSSTGSPTSPLNAEKLESEEDVSQAFLEAVAEEKPHVKPYFSKTIRDLEVVEGSAARFDCKIEGYPDPEVVWFKDDQSIRESRHFQIDYDEDGNCSLIISDVCGDDDAKYTCKAVNSLGEATCTAELIVETMEEGEGEGEEEEE

SEQ ID NO: 6093 - protein, 1863 aa, Homo sapiens
MGDVKLVASSHISKTSLSVDPSRVDSMPLTEAPAFILPPRNLCIKEGATAKFEGRVRGYPEPQVTWHRNGQPITSGGRFLLDCGIRGTFSLVIHAVHEEDRGKYTCEATNGSGARQVTVELTVEGSFAKQLGQPVVSKTLGDRFSASAVETRPSIWGECPPKFATKLGRVVVKEGQMGRFSCKITGRPQPQVTWLKGNVPLQPSARVSVSEKNGMQVLEIHGVNQDDVGVYTCLVVNGSGKASMSAELSIQGLDSANRSFVRETKATNSDVRKEVTNVISKESKLDSLEAAAKSKNCSSPQRGGSPPWAANSQPQPPRESKLESCKDSPRTAPQTPVLQKTSSSITLQAARVQPEPRAPGLGVLSPSGEERKRPAPPRPATFPTRQPGLGSQDVVSKAANRRIPMEGQRDSAFPKFESKPQSQEVKENQTVKFRCEVSGIPKPEVAWFLEGTPVRRQEGSIEVYEDAGSHYLCLLKARTRDSGTYSCTASNAQGQVSCSWTLQVERLAVMEVAPSFSSVLKDCAVIEGQDFVLQCSVRGTPVPRITWLLNGQPIQYARSTCEAGVAELHIQDALPEDHGTYTCLAENALGQVSCSAWVTVHEKKSSRKSEYLLPVAPSKPTAPIFLQGLSDLKVMDGSQVTMTVQVSGNPPPEVIWLHNGNEIQESEDFHFEQRGTQHSLWIQEVFPEDTGTYTCEAWNSAGEVRTQAVLTVQEPHDGTQPWFISKPRSVTASLGQSVLISCAIAGDPFPTVHWLRDGKALCKDTGHFEVLQNEDVFTLVLKKVQPWHAGQYEILLKNRVGECSCQVSLMLQNSSARALPRGREPASCEDLCGGGVGADGGGSDRYGSLRPGWPARGQGWLEEEDGEDVRGVLKRRVETRQHTEEAIRQQEVEQLDFRDLLGKKVSTKTLSEDDLKEIPAEQMDFRANLQRQVKPKTVSEEERKVHSPQQVDFRSVLAKKGTSKTPVPEKVPPPKPATPDFRSVLGGKKKLPAENGSSSAETLNAKAVESSKPLSNAQPSGPLKPVGNAKPAETLKPMGNAKPAETLKPMGNAKPDENLKSASKEELKKDVKNDVNCKRGHAGTTDNEKRSESQGTAPAFKQKLQDVHVAEGKKLLLQCQVSSDPPATIIWTLNGKTLKTTKFIILSQEGSLCSVSIEKALPEDRGLYKCVAKNDAGQAECSCQVTVDDAPASENTKAPEMKSRRPKSSLPPVLGTESDATVKKKPAPKTPPKAAMPPQIIQFPEDQKVRAGESVELFGKVTGTQPITCTWMKFRKQIQESEHMKVENSENGSKLTILAARQEHCGCYTLLVENKLGSRQAQVNLTVVDKPDPPAGTPCASDIRSSSLTLSWYGSSYDGGSAVQSYSIEIWDSANKTWKELATCRSTSFNVQDLLPDHEYKFRVRAINVYGTSEPSQESELTTVGEKPEEPKDEVEVSDDDEKEPEVDYRTVTINTEQKVSDFYDIEERLGSGKFGQVFRLVEKKTRKVWAGKFFKAYSAKEKENIRQEISIMNCLHHPKLVQCVDAFEEKANIVMVLEIVSGGELFERIIDEDFELTERECIKYMRQISEGVEYIHKQGIVHLDLKPENIMCVNKTGTRIKLIDFGLARRLENAGSLKVLFGTPEFVAPEVINYEPIGYATDMWSIGVICYILNRLDCTQCLQHPWLMKDTKNMEAKKLSKDRMKKYMARRKWQKTGNAVRAIGRLSSMAMISGLSGRKSSTGSPTSPLNAEKLESEEDVSQAFLEAVAEEKPHVKPYFSKTIRDLEVVEGSAARFDCKIEGYPDPEVVWFKDDQSIRESRHFQIDYDEDGNCSLIISDVCGDDDAKYTCKAVNSLGEATCTAELIVETMEEGEGEGEEEEE

SEQ ID NO: 6094 - protein, 1841 aa, Homo sapiens
MGDVKLVASSHISKTSLSVDPSRVDSMPLTEAPAFILPPRNLCIKEGATAKFEGRVRGYPEPQVTWHRNGQPITSGGRFLLDCGIRGTFSLVIHAVHEEDRGKYTCEATNGSGARQVTVELTVEGSFAKQLGQPVVSKTLGDRFSASAVETRPSIWGECPPKFATKLGRVVVKEGQMGRFSCKITGRPQPQVTWLKGNVPLQPSARVSVSEKNGMQVLEIHGVNQDDVGVYTCLVVNGSGKASMSAELSIQGLDSANRSFVRETKATNSDVRKEVTNVISKESKLDSLEAAAKSKNCSSPQRGGSPPWAANSQPQPPRESKLESCKDSPRTAPQTPVLQKTSSSITLQAARVQPEPRAPGLGVLSPSGEERKRPAPPRPATFPTRQPGLGSQDVVSKAANRRIPMEGQRDSAFPKFESKPQSQEVKENQTVKFRCEVSGIPKPEVAWFLEGTPVRRQEGSIEVYEDAGSHYLCLLKARTRDSGTYSCTASNAQGQVSCSWTLQVERLAVMEVAPSFSSVLKDCAVIEGQDFVLQCSVRGTPVPRITWLLNGQPIQYARSTCEAGVAELHIQDALPEDHGTYTCLAENALGQVSCSAWVTVHEKKSSRKSEYLLPVAPSKPTAPIFLQGLSDLKVMDGSQVTMTVQVSGNPPPEVIWLHNGNEIQESEDFHFEQRGTQHSLWIQEVFPEDTGTYTCEAWNSAGEVRTQAVLTVQEPHDGTQPWFISKPRSVTASLGQSVLISCAIAGDPFPTVHWLRDGKALCKDTGHFEVLQNEDVFTLVLKKVQPWHAGQYEILLKNRVGECSCQVSLMLQNSSARALPRGREPASCEDLCGGGVGADGGGSDRYGSLRPGWPARGQGWLEEEDGEDVRGVLKRRVETRQHTEEAIRQQEVEQLDFRDLLGKKVSTKTLSEDDLKEIPAEQMDFRANLQRQVKPKTVSEEERKVHSPQQVDFRSVLAKKGTSKTPVPEKVPPPKPATPDFRSVLGGKKKLPAENGSSSAETLNAKAVESSKPLSNAQPSGPLKPVGNAKPAETLKPMGNAKPAETLKPMGNAKPDENLKSASKEELKKDVKNDVNCKRGHAGTTDNEKRSESQGTAPAFKQKLQDVHVAEGKKLLLQCQVSSDPPATIIWTLNGKTLKTTKFIILSQEGSLCSVSIEKALPEDRGLYKCVAKNDAGQAECSCQVTVDDAPASENTKAPEMKSRRPKSSLPPVLGTESDATVKKKPAPKTPPKAAMPPQIIQFPEDQKVRAGESVELFGKVTGTQPITCTWMKFRKQIQESEHMKVENSENGSKLTILAARQEHCGCYTLLVENKLGSRQAQVNLTVVDKPDPPAGTPCASDIRSSSLTLSWYGSSYDGGSAVQSYSIEIWDSANKTWKELATCRSTSFNVQDLLPDHEYKFRVRAINVYGTSEPSQESELTTVGEKPEEPKMKWRCQTDDEKEPEVDYRTVTINTEQKVSDFYDIEERLGSLFERIIDEDFELTERECIKYMRQISEGVEYIHKQGIVHLDLKPENIMCVNKTGTRIKLIDFGLARRLENAGSLKVLFGTPEFVAPEVINYEPIGYATDMWSIGVICYILVSGLSPFMGDNDNETLANVTSATWDFDDEAFDEISDDAKDFISNLLKKDMKNRLDCTQCLQHPWLMKDTKNMEAKKLSKDRMKKYMARRKWQKTGNAVRAIGRLSSMAMISGLSGRKSSTGSPTSPLNAEKLESEEDVSQAFLEAVAEEKPHVKPYFSKTIRDLEVVEGSAARFDCKIEGYPDPEVVWFKDDQSIRESRHFQIDYDEDGNCSLIISDVCGDDDAKYTCKAVNSLGEATCTAELIVETMEEGEGEGEEEEE

SEQ ID NO: 6095 - protein, 1913 aa, Homo sapiens
MGDVKLVASSHISKTSLSVDPSRVDSMPLTEAPAFILPPRNLCIKEGATAKFEGRVRGYPEPQVTWHRNGQPITSGGRFLLDCGIRGTFSLVIHAVHEEDRGKYTCEATNGSGARQVTVELTVEGSFAKQLGQPVVSKTLGDRFSASAVETRPSIWGECPPKFATKLGRVVVKEGQMGRFSCKITGRPQPQVTWLKGNVPLQPSARVSVSEKNGMQVLEIHGVNQDDVGVYTCLVVNGSGKASMSAELSIQGLDSANRSFVRETKATNSDVRKEVTNVISKESKLDSLEAAAKSKNCSSPQRGGSPPWAANSQPQPPRESKLESCKDSPRTAPQTPVLQKTSSSITLQAARVQPEPRAPGLGVLSPSGEERKRPAPPRPATFPTRQPGLGSQDVVSKAANRRIPMEGQRDSAFPKFESKPQSQEVKENQTVKFRCEVSGIPKPEVAWFLEGTPVRRQEGSIEVYEDAGSHYLCLLKARTRDSGTYSCTASNAQGQVSCSWTLQVERLAVMEVAPSFSSVLKDCAVIEGQDFVLQCSVRGTPVPRITWLLNGQPIQYARSTCEAGVAELHIQDALPEDHGTYTCLAENALGQVSCSAWVTVHEKKSSRKSEYLLPVAPSKPTAPIFLQGLSDLKVMDGSQVTMTVQVSGNPPPEVIWLHNGNEIQESEDFHFEQRGTQHSLWIQEVFPEDTGTYTCEAWNSAGEVRTQAVLTVQEPHDGTQPWFISKPRSVTASLGQSVLISCAIAGDPFPTVHWLRDGKALCKDTGHFEVLQNEDVFTLVLKKVQPWHAGQYEILLKNRVGECSCQVSLMLQNSSARALPRGREPASCEDLCGGGVGADGGGSDRYGSLRPGWPARGQGWLEEEDGEDVRGVLKRRVETRQHTEEAIRQQEVEQLDFRDLLGKKVSTKTLSEDDLKEIPAEQMDFRANLQRQVKPKTVSEEERKVHSPQQVDFRSVLAKKGTSKTPVPEKVPPPKPATPDFRSVLGGKKKLPAENGSSSAETLNAKAVESSKPLSNAQPSGPLKPVGNAKPAETLKPMGNAKPAETLKPMGNAKPDENLKSASKEELKKDVKNDVNCKRGHAGTTDNEKRSESQGTAPAFKQKLQDVHVAEGKKLLLQCQVSSDPPATIIWTLNGKTLKTTKFIILSQEGSLCSVSIEKALPEDRGLYKCVAKNDAGQAECSCQVTVDDAPASENTKAPEMKSRRPKSSLPPVLGTESDATVKKKPAPKTPPKAAMPPQIIQFPEDQKVRAGESVELFGKVTGTQPITCTWMKFRKQIQESEHMKVENSENGSKLTILAARQEHCGCYTLLVENKLGSRQAQVNLTVVDKPDPPAGTPCASDIRSSSLTLSWYGSSYDGGSAVQSYSIEIWDSANKTWKELATCRSTSFNVQDLLPDHEYKFRVRAINVYGTSEPSQESELTTVGEKPEEPKDEVEVSDDDEKEPEVDYRTVTINTEQKVSDFYDIEERLGSGKFGQVFRLVEKKTRKVWAGKFFKAYSAKEKENIRQEISIMNCLHHPKLVQCVDAFEEKANIVMVLEIVSGGELFERIIDEDFELTERECIKYMRQISEGVEYIHKQGIVHLDLKPENIMCVNKTGTRIKLIDFGLARRLENAGSLKVLFGTPEFVAPEVINYEPIGYATDMWSIGVICYILVSGLSPFMGDNDNETLANVTSATWDFDDEAFDEISDDAKDFISNLLKKDMKNRLDCTQCLQHPWLMKDTKNMEAKKLSKDRMKKYMARRKWQKTGNAVRAIGRLSSMAMISGLSGRKSSTGSPTSPLNAEKLESEDVSQAFLEAVAEEKPHVKPYFSKTIRDLEVVEGSAARFDCKIEGYPDPEVVWFKDDQSIRESRHFQIDYDEDGNCSLIISDVCGDDDAKYTCKAVNSLGEATCTAELIVETMEEGEGEGEEEEE

SEQ ID NO: 6096 - protein, 473 aa, Homo sapiens
MAQHDFAPAWLNFPTPPSSTKSSLNFEKHSENFAWTENRYDVNRRRHNSSDGFDSAIGRPNGGNFGRKEKNGWRTHGRNGTENINHRGGYHGGSSRSRSSIFHAGKSQGLHENNIPDNETGRKEDKRERKQFEAEDFPSLNPEYEREPNHNKSLAAGVWEYPPNPKSRAPRMLVIKKGNTKDLQLSGFPVVGNLPSQPVKNGTGPSVYKGLVPKPAAPPTKPTQWKSQTKENKVGTSFPHESTFGVGNFNAFKSTAKNFSPSTNSVKECNRSNSSSPVDKLNQQPRLTKLTRMRTDKKSEFLKALKRDRVEEEHEDESRAGSEKDDDSFNLHNSNSTHQERDINRNFDENEIPQENGNASVISQQIIRSSTFPQTDVLSSSLEAEHRLLKEMGWQEDSENDETCAPLTEDEMREFQVISEQLQKNGLRKNGILKNGLICDFKFGPWKNSTFKPTTENDDTETSSSDTSDDDDV

SEQ ID NO: 6097 - protein, 492 aa, Homo sapiens
VKYLQRTSILFQRIQNKNTNWKIKITEKKPTPSCAVLLEFSSLNFEKHSENFAWTENRYDVNRRRHNSSDGFDSAIGRPNGGNFGRKEKNGWRTHGRNGTENINHRGGYHGGSSRSRSSIFHAGKSQGLHENNIPDNETGRKEDKRERKQFEAEDFPSLNPEYEREPNHNKSLAAGVWEYPPNPKSRAPRMLVIKKGNTKDLQLSGFPVVGNLPSQPVKNGTGPSVYKGLVPKPAAPPTKPTQWKSQTKENKVGTSFPHESTFGVGNFNAFKSTAKNFSPSTNSVKECNRSNSSSPVDKLNQQPRLTKLTRMRTDKKSEFLKALKRDRVEEEHEDESRAGSEKDDDSFNLHNSNSTHQERDINRNFDENEIPQENGNASVISQQIIRSSTFPQTDVLSSSLEAEHRLLKEMGWQEDSENDETCAPLTEDEMREFQVISEQLQKNGLRKNGILKNGLICDFKFGPWKNSTFKPTTENDDTETSSSDTSDDDDV

SEQ ID NO: 6098 - protein, 166 aa, Homo sapiens [sequence omitted]

SEQ ID NO: 6099 - protein, 315 aa, Homo sapiens
MATPYVPVPMPIGNSASSFTTNRNQRSSSFGSVSTSSNSSKGQLEDSNMGNFKQTSVPDQMDNTSSVCSSPLIRTKFTGTASSIEYSTRPRDTEEQNPETVNWEDRPSTPTILGYEVMEERAKFTLKEMFPGFRLALPPKRWFKDNYNADFLEDRQLGLQAFLQNLVAHKDIANCLAVREFLCLDDPPGPFDSLEESRAFCETLEETNYRLQKELLEKQKEMESLKKLLSEKQLHIDTLENRIRTLSLEPEESLDVSETEGEQILKVESSALEVDQDVLDEESRADNKPCLSFSEPENAVSEIEVAEVAYDAEED

SEQ ID NO: 6100 - protein, 344 aa, Homo sapiens
MATPYVPVPMPIGNSASSFTTNRNQRSSSFGSVSTSSNSSKGQLEDSNMGNFKQTSVPDQMDNTSSVCSSPLIRTKFTGTASSIEYSTRPRDTEEQNPETVNWEDRPSTPTILGYEVMEERAKFTVYKILVKKTPEESWVVFRRYTDFSRLNDKLKEMFPGFRLALPPKRWFKDNYNADFLEDRQLGLQAFLQNLVAHKDIANCLAVREFLCLDDPPGPFDSLEESRAFCETLEETNYRLQKELLEKQKEMESLKKLLSEKQLHIDTLENRIRTLSLEPEESLDVSETEGEQILKVESSALEVDQDVLDEESRADNKPCLSFSEPENAVSEIEVAEVAYDAEED

SEQ ID NO: 6101 - protein, 684 aa, Homo sapiens
MAEGEDVPPLPTSSGDGWEKDLEEALEAGGCDLETLRNIIQGRPLPADLRAKVWKIALNVAGKGDCLASWDGILDLPEQNTIHKDCLQFIDQLSVPEEKAAELLLDIESVITFYCKSRNIKYSTSLSWIHLLKPLVHLQLPRSDLYNCFYAIMNKYIPRDCSQKGRPFHPFRLLIQYHEPELCSYLDTKKITPDSYALNWLGSLFACYCSTEVTQAIWDGYLQQADPFFIYFLMLIILVNAKEVILTQESDSKEEVIKFLENTPSSLNIEDIEDLFSLAQYYCSKTPASFRKDNHHLFGSTLLGIKDDDADLSQALCLAISVSEILQANQLQGEGVRFFVVDCRPAEQYNAGHLSTAFHSDSDLMLQNPSEFAQSVKSLLEAQKQSIESGSIAGGEHLCFMGSGREEEDMYMNMVLAHFLQKNKEYVSIASGGFMALQQHLADINVDGPENGYGHWIASTSGSRSSINSVDGESPNGSSDRGMKSLVNKMTVALKTKSVNVREKVISFIENTSTPVDRHVSSSDRVGKPYRGVKPVFSIGDEEEYDTDEIDSSSMSDDDRKEVVNIQTWINKPDVKHHFPCKEVKESGHMFPSHLLVTATHMYCLREIVSRKGLAYIQSRQALNSVVKITSKKKHPELITFKYGNSSASGIEILAIERYLIPNAGDATKAIKQQIMKVLDALES

SEQ ID NO: 6102 - protein, 587 aa, Homo sapiens
MPTALCPRVLAPKESEEPRKMRSPPGENPSPQGELPSPESSRRLFRRFRYQEAAGPREALQRLWDLCGGWLRPERHTKEQILELLVLEQFLAILPREIQSWVRAQEPESGEQAVAAVEALEREPGRPWQWLKHCEDPVVIDDGDSPLDQEQEQLPVEPHSDLAKNQDAQPITLAQCLGLPSRPPSQLSGDPVLQDAFLLQEENVRDTQQVTTLQLPPSRVSPFKDMILCFSEEDWSLLDPAQTGFYGEFIIGEDYGVSMPPNDLAAQPDLSQGEENEPRVPELQDLQGKEVPQVSYLDSPSLQPFQVEERRKREELQVPEFQACPQTVVPQNTYPAGGNPRSLENSLDEEVTIEIVLSSSGDEDSQHGPYCTEELGSPTEKQRSLPASHRSSTEAGGEVQTSKKSYVCPNCGKIFRWRVNFIRHLRSRREQEKPHECSVCGELFSDSEDLDGHLESHEAQKPYRCGACGKSFRLNSHLLSHRRIHLQPDRLQPVEKREQAASEDADKGPKEPLENGKAKLSFQCCECGKAFQRHDHLARHRSHFHLKDKARPFQCRYCVKSFTQNYDLLRHERLHMKRRSKQALNSY

SEQ ID NO: 6103 - protein, 671 aa, Homo sapiens
MHHQQRMAALGTDKELSDLLDFSAMFSPPVSSGKNGPTSLASGHFTGSNVEDRSSSGSWGNGGHPSPSRNYGDGTPYDHMTSRDLGSHDNLSPPFVNSRIQSKTERGSYSSYGRESNLQGCHQQSLLGGDMDMGNPGTLSPTKPGSQYYQYSSNNPRRRPLHSSAMEVQTKKVRKVPPGLPSSVYAPSASTADYNRDSPGYPSSKPATSTFPSSFFMQDGHHSSDPWSSSSGMNQPGYAGMLGNSSHIPQSSSYCSLHPHERLSYPSHSSADINSSLPPMSTFHRSGTNHYSTSSCTPPANGTDSIMANRGSGAAGSSQTGDALGKALASIYSPDHTNNSFSSNPSTPVGSPPSLSAGTAVWSRNGGQASSSPNYEGPLHSLQSRIEDRLERLDDAIHVLRNHAVGPSTAMPGGHGDMHGIIGPSHNGAMGGLGSGYGTGLLSANRHSLMVGTHREDGVALRGSHSLLPNQVPVPQLPVQSATSPDLNPPQDPYRGMPPGLQGQSVSSGSSEIKSDDEGDENLQDTKSSEDKKLDDDKKDIKSITRSRSSNNDDEDLTPEQKAEREKERRMANNARERLRVRDINEAFKELGRMVQLHLKSDKPQTKLLILHQAVAVILSLEQQVRERNLNPKAACLKRREEEKVSSEPPPLSLAGPHPGMGDASNHMGQM

SEQ ID NO: 6104 - protein, 667 aa, Homo sapiens
MHHQQRMAALGTDKELSDLLDFSAMFSPPVSSGKNGPTSLASGHFTGSNVEDRSSSGSWGNGGHPSPSRNYGDGTPYDHMTSRDLGSHDNLSPPFVNSRIQSKTERGSYSSYGRESNLQGCHQQSLLGGDMDMGNPGTLSPTKPGSQYYQYSSNNPRRRPLHSSAMEVQTKKVRKVPPGLPSSVYAPSASTADYNRDSPGYPSSKPATSTFPSSFFMQDGHHSSDPWSSSSGMNQPGYAGMLGNSSHIPQSSSYCSLHPHERLSYPSHSSADINSSLPPMSTFHRSGTNHYSTSSCTPPANGTDSIMANRGSGAAGSSQTGDALGKALASIYSPDHTNNSFSSNPSTPVGSPPSLSAGTAVWSRNGGQASSSPNYEGPLHSLQSRIEDRLERLDDAIHVLRNHAVGPSTAMPGGHGDMHGIIGPSHNGAMGGLGSGYGTGLLSANRHSLMVGTHREDGVALRGSHSLLPNQVPVPQLPVQSATSPDLNPPQDPYRGMPPGLQGQSVSSGSSEIKSDDEGDENLQDTKSSEDKKLDDDKKDIKSITSNNDDEDLTPEQKAEREKERRMANNARERLRVRDINEAFKELGRMVQLHLKSDKPQTKLLILHQAVAVILSLEQQVRERNLNPKAACLKRREEEKVSSEPPPLSLAGPHPGMGDASNHMGQM

SEQ ID NO: 6105 - protein, 667 aa, Homo sapiens
MHHQQRMAALGTDKELSDLLDFSAMFSPPVSSGKNGPTSLASGHFTGSNVEDRSSSGSWGNGGHPSPSRNYGDGTPYDHMTSRDLGSHDNLSPPFVNSRIQSKTERGSYSSYGRESNLQGCHQQSLLGGDMDMGNPGTLSPTKPGSQYYQYSSNNPRRRPLHSSAMEVQTKKVRKVRDYNGKAVYAPSASTADYNRDSPGYPSSKPATSTFPSSFFMQDGHHSSDPWSSSSGMNQPGYAGMLGNSSHIPQSSSYCSLHPHERLSYPSHSSADINSSLPPMSTFHRSGTNHYSTSSCTPPANGTDSIMANRGSGAAGSSQTGDALGKALASIYSPDHTNNSFSSNPSTPVGSPPSLSAGTAVWSRNGGQASSSPNYEGPLHSLQSRIEDRLERLDDAIHVLRNHAVGPSTAMPGGHGDMHGIIGPSHNGAMGGLGSGYGTGLLSANRHSLMVGTHREDGVALRGSHSLLPNQVPVPQLPVQSATSPDLNPPQDPYRGMPPGLQGQSVSSGSSEIKSDDEGDENLQDTKSSEDKKLDDDKKDIKSITSNNDDEDLTPEQKAEREKERRMANNARERLRVRDINEAFKELGRMVQLHLKSDKPQTKLLILHQAVAVILSLEQQVRERNLNPKAACLKRREEEKVSSEPPPLSLAGPHPGMGDASNHMGQM

SEQ ID NO: 6106 - protein, 239 aa, Homo sapiens
EAGSRPCPRAWETLPRPGRARAPAAGGWSPLGHCEPGVSRSCRAAQAMDCEVNNGSSLRDECITNLLVFGFLQSCSDNSFRRELDALGHELPVLAPQWEGYDELQTDGNRSSHSRLGRIEADSESQEDIIRNIARHLAQVGDSMDRSIPPGLVNGLALQLRNTSRSEEDRNRDLATALEQLLQAYPRDMEKEKTMLVLALLLAKKVASHTPSLLRDVFHTTVNFINQNLRTYVRSLARN

SEQ ID NO: 6107 - protein, 284 aa, Homo sapiens
CADPRCCCWETVEWLNDPRGPWESSEALSHQVAGLARVHSFIQQIRMCSGAGVMMARWAARGRAGWRSTVRILSPLGHCEPGVSRSCRAAQAMDCEVNNGSSLRDECITNLLVFGFLQSCSDNSFRRELDALGHELPVLAPQWEGYDELQTDGNRSSHSRLGRIEADSESQEDIIRNIARHLAQVGDSMDRSIPPGLVNGLALQLRNTSRSEEDRNRDLATALEQLLQAYPRDMEKEKTMLVLALLLAKKVASHTPSLLRDVFHTTVNFINQNLRTYVRSLARN

SEQ ID NO: 6108 - protein, 441 aa, Homo sapiens
MKTLPLHSHCTEMQRLLPKLEMLTLGSSFCSLQGEFCQAMDSFTTVSHVGMCEETDASFNVFSPKFQFDRSHCQSLRFHQNMELDFGHFDERDKTSRNMRGSRMNGLPSPTHSAHCSFYRTRTLQALSNEKKAKKVRFYRNGDRYFKGIVYAVSSDRFRSFDALLADLTRSLSDNINLPQGVRYIYTIDGSRKIGSMDELEEGESYVCSSDNFFKKVEYTKNVNPNWSVNVKTSANMKAPQSLASSNSAQARENKDFVRPKLVTIIRSGVKPRKAVRVLLNKKTAHSFEQVLTDITEAIKLETGVVKKLYTLDGKQVTCLHDFFGDDDVFIACGPEKFRYAQDDFSLDENECRVMKGNPSATAGPKASPTPQKTSAKSPGPMRRSKSPADSANGTSSSQLSTPKSKQSPISTPTSPGSLRKHKDLYLPLSLDDSDSLGDSM

SEQ ID NO: 6109 - protein, 360 aa, Homo sapiens
MELDFGHFDERDKTSRNMRGSRMNGLPSPTHSAHCSFYRTRTLQALSNEKKAKKVRFYRNGDRYFKGIVYAVSSDRFRSFDALLADLTRSLSDNINLPQGVRYIYTIDGSRKIGSMDELEEGESYVCSSDNFFKKVEYTKNVNPNWSVNVKTSANMKAPQSLASSNSAQARENKDFVRPKLVTIIRSGVKPRKAVRVLLNKKTAHSFEQVLTDITEAIKLETGVVKKLYTLDGKQVTCLHDFFGDDDVFIACGPEKFRYAQDDFSLDENECRVMKGNPSATAGPKASPTPQKTSAKSPGPMRRSKSPADSANGTSSSQLSTPKSKQSPISTPTSPGSLRKHKDLYLPLSLDDSDSLGDSM

SEQ ID NO: 6110 - protein, 1272 aa, Homo sapiens
MDLFDFFRDWDLEQQCHYEQDRSALKKREWERRNQEVQQEDDLFSSGFDLFGEPYKTNKGDALANRVQNTLGNYDEMKNLLTNHSNQNHLVGIPKNSVPQNPNNKNEPSFFPEQKNRIIPPHQDNTHPSAPMPPPSVVILNSTLIHSNRKSKPEWSRDSHNPSTVLASQASGQPNKMQTLTQDQSQAKLEDFFVYPAEQPQIGEVEESNPSAKEDSNPNSSGEDAFKEIFQSNSPEESEFAVQAPGSPLVASSLLAPSSGLSVQNFPPGLYCKTSMGQQKPTAYVRPMDGQDQAPDISPTLKPSIEFENSFGNLSFGTLLDGKPSAASSKTKLPKFTILQTSEVSLPSDPSCVEEILRESQHLTPGFTLQKWNDPTTRASTKMLEDDLKLSSDEDDLEPVKTLTTQCTATELYQAVEKAKPRNNPVNPPLATPQPPPAVQASGGSGSSSESESSSESDSDTESSTTDSESNEAPRVATPEPEPPSTNKWQLDKWLNKVTSQNKSFICGPNETPMETISLPPPIIQPMEVQMKVKTNASQVPAEPKERPLLSLIREKARPRPTQKIPETKALKHKLSTTSETVSQRTIGKKQPKKVEKNTSTDEFTWPKPNITSSTPKEKESVELHDPPRGRNKATAHKPAPRKEPRPNIPLAPEKKKYRGPGKIVPKSREFIETDSSTSDSNTDQEETLQIKVLPPCIISGGNTAKSKEICGASLTLSTLMSSSGSNNNLSISNEEPTFSPIPVMQTEILSPLRDHENLKNLWVKIDLDLLSRVPGHSSLHAAPAKPDHKETATKPKRQTAVTAVEKPAPKGKRKHKPIEVAEKIPEKKQRLEEATTICLLPPCISPAPPHKPPNTRENNSSRRANRRKEEKLFPPPLSPLPEDPPRRRNVSGNNGPFGQDKNIAMTGQITSTKPKRTEGKFCATFKGISVNEGDTPKKASSATITVTNTAIATATVTATAIVTTTVTATATATATTTTTTTTISTITSTITTGLMDSSHLEMTSWAALPLLSSSSTNVRRPKLTFDDSVHNADYYMQEAKKLKHKADALFEKFGKAVNYADAALSFTECGNAMERDPLEAKSPYTMYSETVELLRYAMRLKNFASPLASDGDKKLAVLCYRCLSLLYLRMFKLKKDHAMKYSRSLMEYFKQNASKVAQIPSPWVSNGKNTPSPVSLNNVSPINAMGNCNNGPVTIPQRIHHMAASHVNITSNVLRGYEHWDMADKLTRENKEFFGDLDTLMGPLTQHSSMTNLVRYVRQGLCWLRIDAHLL

SEQ ID NO: 6111 - protein, 1311 aa, Homo sapiens
MDLFDFFRDWDLEQQCHYEQDRSALKKREWERRNQEVQQEDDLFSSGFDLFGEPYKVAEYTNKGDALANRVQNTLGNYDEMKNLLTNHSNQNHLVGIPKNSVPQNPNNKNEPSFFPEQKNRIIPPHQDNTHPSAPMPPPSVVILNSTLIHSNRKSKPEWSRDSHNPSTVLASQASGQPNKMQTLTQDQSQAKLEDFFVYPAEQPQIGEVEESNPSAKEDSNPNSSGEDAFKEIFQSNSPEESEFAVQAPGSPLVASSLLAPSSGLSVQNFPPGLYCKTSMGQQKPTAYVRPMDGQDQAPDISPTLKPSIEFENSFGNLSFGTLLDGKPSAASSKTKLPKFTILQTSEVSLPSDPSCVEEILREMTHSWPTPLTSMHTAGHSEQSTFSIPGQESQHLTPGFTLQKWNDPTTRASTKSVSFKSMLEDDLKLSSDEDDLEPVKTLTTQCTATELYQAVEKAKPRNNPVNPPLATPQPPPAVQASGGSGSSSESESSSESDSDTESSTTDSESNEAPRVATPEPEPPSTNKWQLDKWLNKVTSQNKSFICGPNETPMETISLPPPIIQPMEVQMKVKTNASQVPAEPKERPLLSLIREKARPRPTQKIPETKALKHKLSTTSETVSQRTIGKKQPKKVEKNTSTDEFTWPKPNITSSTPKEKESVELHDPPRGRNKATAHKPAPRKEPRPNIPLAPEKKKYRGPGKIVPKSREFIETDSSTSDSNTDQEETLQIKVLPPCIISGGNTAKSKEICGASLTLSTLMSSSGSNNNLSISNEEPTFSPIPVMQTEILSPLRDHENLKNLWVKIDLDLLSRVPGHSSLHAAPAKPDHKETATKPKRQTAVTAVEKPAPKGKRKHKPIEVAEKIPEKKQRLEEATTICLLPPCISPAPPHKPPNTRENNSSRRANRRKEEKLFPPPLSPLPEDPPRRRNVSGNNGPFGQDKNIAMTGQITSTKPKRTEGKFCATFKGISVNEGDTPKKASSATITVTNTAIATATVTATAIVTTTVTATATATATTTTTTTTISTITSTITTGLMDSSHLEMTSWAALPLLSSSSTNVRRPKLTFDDSVHNADYYMQEAKKLKHKADALFEKFGKAVNYADAALSFTECGNAMERDPLEAKSPYTMYSETVELLRYAMRLKNFASPLASDGDKKLAVLCYRCLSLLYLRMFKLKKDHAMKYSRSLMEYFKQNASKVAQIPSPWVSNGKNTPSPVSLNNVSPINAMGNCNNGPVTIPQRIHHMAASHVNITSNVLRGYEHWDMADKLTRENKEFFGDLDTLMGPLTQHSSMTNLVRYVRQGLCWLRIDAHLL

SEQ ID NO: 6112 - protein, 1276 aa, Homo sapiens
MDLFDFFRDWDLEQQCHYEQDRSALKKREWERRNQEVQQEDDLFSSGFDLFGEPYKTNKGDALANRVQNTLGNYDEMKNLLTNHSNQNHLVGIPKNSVPQNPNNKNEPSFFPEQKNRIIPPHQDNTHPSAPMPPPSVVILNSTLIHSNRKSKPEWSRDSHNPSTVLASQASGQPNKMQTLTQDQSQAKLEDFFVYPAEQPQIGEVEESNPSAKEDSNPNSSGEDAFKEIFQSNSPEESEFAVQAPGSPLVASSLLAPSSGLSVQNFPPGLYCKTSMGQQKPTAYVRPMDGQDQAPDISPTLKPSIEFENSFGNLSFGTLLDGKPSAASSKTKLPKFTILQTSEVSLPSDPSCVEEILRESQHLTPGFTLQKWNDPTTRASTKSVSFKSMLEDDLKLSSDEDDLEPVKTLTTQCTATELYQAVEKAKPRNNPVNPPLATPQPPPAVQASGGSGSSSESESSSESDSDTESSTTDSESNEAPRVATPEPEPPSTNKWQLDKWLNKVTSQNKSFICGPNETPMETISLPPPIIQPMEVQMKVKTNASQVPAEPKERPLLSLIREKARPRPTQKIPETKALKHKLSTTSETVSQRTIGKKQPKKVEKNTSTDEFTWPKPNITSSTPKEKESVELHDPPRGRNKATAHKPAPRKEPRPNIPLAPEKKKYRGPGKIVPKSREFIETDSSTSDSNTDQEETLQIKVLPPCIISGGNTAKSKEICGASLTLSTLMSSSGSNNNLSISNEEPTFSPIPVMQTEILSPLRDHENLKNLWVKIDLDLLSRVPGHSSLHAAPAKPDHKETATKPKRQTAVTAVEKPAPKGKRKHKPIEVAEKIPEKKQRLEEATTICLLPPCISPAPPHKPPNTRENNSSRRANRRKEEKLFPPPLSPLPEDPPRRRNVSGNNGPFGQDKNIAMTGQITSTKPKRTEGKFCATFKGISEGDTPKKASSATITVTNTAIATATVTATAIVTTTVTATATATATTTTTTTTISTITSTITTGLMDSSHLEMTSWAALPLLSSSSTNVRRPKLTFDDSVHNADYYMQEAKKLKHKADALFEKFGKAVNYADAALSFTECGNAMERDPLEAKSPYTMYSETVELLRYAMRLKNFASPLASDGDKKLAVLCYRCLSLLYLRMFKLKKDHAMKYSRSLMEYFKQNASKVAQIPSPWVSNGKNTPSPVSLNNVSPINAMGNCNNGPVTIPQRIHHMAASHVNITSNVLRGYEHWDMADKLTRENKEFFGDLDTLMGPLTQHSSMTNLVRYVRQGLCWLRIDAHLL

SEQ ID NO: 6113 - protein, 747 aa, Homo sapiens
MFGGPGPGVLGAQGMAGPLRGRVEELKLPWWRESSPLVLRHSEAARLAADALLERGEAAYLRVISEERELPFLSALDVDYMTSHVRGGPELSEAQGQEASGPDRLSLLSEVTSGTYFPMASDIDPPDLDLGWPEVPQATGFSPTQAVVHFQRDKAKNIKDLLRFLFSQAHTVVAVVMDIFTDMELLCDLMEASSRRGVPVYLLLAQEHLRHFLEMCYKMDLNGEHLPNMRVRSTCGDTYCSKAGRRFTGQALEKFVLIDCEQVVAGSYSFTWLCSQAHTSMVLQLRGRIVEDFDREFRCLYAESQPVEGFCGGEDPLSPRALRPPPVALAFRPDVPSPTSSLPSSTSLSSIKQSPLMGRSSYLALPGGGDCSDTGVVSSSLGPARREASGQPSLHRQLSDPNHGSPPGLYRANLGKLGAYPWSQSSPALNHNSTSPLTLAVGSPLLPRSRPLLQFHRGAPALSRFPENGLPGSQEPSPLRGRWVPGTTLETVEEKEKKASPSQSRGQLDLLVPFPRAREVGDPDSGVTPNSGPLRPGEQAPEDRRLSPSQADSQLDLLSRALGTGGAPELGSLRPGDRALEDRRLSLNQSRGQSDLLMQYPKAQGSRVPLETNSSARPARRAPDERRQTLGHSQLDLITKFGPFRGEGPGPNGLPISSPARTAGAGSGDEKRLTLGHSKLDLITKYHQLHGARQGTEPGGPKGGHLNGGNSDLVRDEKRLTLGHSKLDLITKYNKSKFKQLRSRFES

SEQ ID NO: 6114 - protein, 400 aa, Homo sapiens
MAAEIQPKPLTRKPILLQRMEGSQEVVNMAVIVPKEEGVISVSEDRTVRVWLKRDSGQYWPSVYHAMPSPCSCMSFNPETRRLSIGLDNGTISEFILSEDYNKMTPVKNYQAHQSRVTMILFVLELEWVLSTGQDKQFAWHCSESGQRLGGYRTSAVASGLQFDVETRHVFIGDHSGQVTILKLEQENCTLVTTFRGHTGGVTALCWDPVQRVLFSGSSDHSVIMWDIGGRKGTAIELQGHNDRVQALSYAQHTRQLISCGGDGGIVVWNMDVERQETPEWLDSDSCQKCDQPFFWNFKQMWDSKKIGLRQHHCRKCGKAVCGKCSSKRSSIPLMGFEFEVRVCDSCHEAITDEERAPTATFHDSKHNIVHVHFDATRGWLLTSGTDKVIKLWDMTPVVS

SEQ ID NO: 6115 - protein, 1010 aa, Homo sapiens
MRRPPPLGPTTASGPEGNVRNLQKRQAPGPGAAGGCGPEAGGCRENKQKRRMVARATPGRGEVESDKSVAASGAGKAARRQVEGRRGPVSPSDSSDPRGLEAAKEAELPLQTERHTKEKRKVTEASSDDPQPGLDLVRKESLTSSESFQTVECLQSLGKESIIEGIKRRIRNKKLKSLENPPLKITENEATQNIKVEFQDELYKNTPKYSCNILSPEVENNSVLKLRDCNCFPHSKGCNDENNLPYKPDGGCMHVAENFSKKENLRSLAEKSDTNSIPQLLQTEENVMGVNKLLPEESDLYQSKTNGLLSCLQHEKNKYSIEESSVGRKPRKRMKLSEKADETVTEMNFSNEYNKSELMLQENQMIADGKEAETKSPLNVLRKVSHNTVSLMDHLLSVPETVEKETSSEHHVNAVFQKTIEPLLKEETENASEPLGYESMASKEDFKSMKSFIGKSPNEYHIERRSSREDLRSASEELKLSCQRTIPMTGKRTWPYYSCARISAWCWKKASLPESSYFLRGSQESCRQVDVPKHQTNQTHLTDSKLLLQSSLTETNTESSSKEKLDSNSNCLSSVSAVEPTLMVIKEPIIKDDKKIKSEELSRRGSEVISNTTEDTQLTSETQSLTGNKKKARGNLTKLNLTATSKDGQEANNSAGKTIHRKACIAQQTFIVPDLVKILNTGRLTNFKIPLLKNKSEKRKEVNAKSSEREAYSPLELLDNLSGADVRQNRSKENVSMMMLGPQTLSIRNSVTPVQASSDSFYNKKSYSISPSFTKQGNNSKPSNHVSEPGNIVSNKEVASLTVENNAFSCDPGYVEKSPSFCCNEQETFRPVSSEVRGRKITKNFSEVGFPDILKAYEDDVLLIDVIQDDPDLFGVSNEGELSFTSEVPKISQEPNVAGEHQSTDSKYMETPVKKEPSDDLRELPVLDCGWIKPDICASNSAESEIKRDPKDVNTSLGEVANETSENETLGDFSEQIKGSDLDEKHRFTDKVITKEEKENIYEVCKRSVT

SEQ ID NO: 6116 - protein, 585 aa, Homo sapiens
  VARIANT 45: Xaa = Any Amino Acid
MAWRRPEPKTSAPPCTTPPVTARGQLLQKLLSSRSREELDELTGXVAGGGTPLLIAACYGHLDVVEYLVDPCGASVEAGGSVHFDGETMEGAPPLVGADHLDVVRSLLRRGASVNCTTRTNSTPLRAACFEGLLEVVRYLVGEHQANLEVANRHGHMCLMISCYKGHREIARYLLEQGAQVNWRSAKGNTALHNCAETSSLEILQLLLGCKASMERDSYGMTPLLPASVTGHTNIVEYLIQEQPGQEQLIGVEAQLRLPQEGSSTSQGCAQPQGAPCCIFSPEVLNGESYQSCCPTSREAAMEALELLGSTYVDKKRDLLGALKHWRRAMELRHQGGEYLPKLEPPQLVLAYDYSREVNTTEELEALITDADEMRMQALLIRERILSPSHPDTSYCIRYRGAVYADSGNIECYIRLWKYALDMQQSNLEPLSPMSASSFLSFAELFSYVLQDPAAKGSLGTQIGFADLMGVLTKGVREVEWALQLLREPRDSAQFNKALAIILHLLYLLEKVECTPSQEHLKHQTIYRLLKCAPRGKNGFTVPVPPKAQSREMRLFTSRVSVLVFKSLKRYSKKKSLNTGLWNNS

SEQ ID NO: 6117 - protein, 132 aa, Homo sapiens [sequence omitted]

SEQ ID NO: 6118 - protein, 208 aa, Homo sapiens
MKKNEVYETFSYPESYSPTLPVSRRENNSPSNLPRPSFCMEEYQRAELEEDPILSRTPSPVHPSDFSEHNCQPYYASDGATYGSSSGLCLGNPRADSIHNTYSTDHASAAPPSVTRSPVENDGYIEEGSITKHPSTWSVEAVVLFLKQTDPLALCPLVDLFRSHEIDGKALLLLTSDVLLKHLGVKLGTAVKLCYYIDRLKQGKCFEN

SEQ ID NO: 6119 - protein, 1299 aa, Homo sapiens
MEPPSCIQDEPFPHPLEPEPGVSAQPGPGKPSDKRFRLWYVGGSCLDHRTTLPMLPWLMAEIRRRSQKPEAGGCGAPAAREVILVLSAPFLRCVPAPGAGASGGTSPSATQPNPAVFIFEHKAQHISRFIHNSHDLTYFAYLIKAQPDDPESQMACHVFRATDPSQVPDVISSIRQLSKAAMKEDAKPSKDNEDAFYNSQKFEVLYCGKVTVTHKKAPSSLIDDCMEKFSLHEQQRLKIQGEQRGPDPGEDLADLEVVVPGSPGDCLPEEADGTDTHLGLPAGASQPALTSSRVCFPERILEDSGFDEQQEFRSRCSSVTGVQRRVHEGSQKSQPRRRHASAPSHVQPSDSEKNRTMLFQVGRFEINLISPDTKSVVLEKNFKDISSCSQGIKHVDHFGFICRESPEPGLSQYICYVFQCASESLVDEVMLTLKQAFSTAAALQSAKTQIKLCEACPMHSLHKLCERIEGLYPPRAKLVIQRHLSSLTDNEQADIFERVQKMKPVSDQEENELVILHLRQLCEAKQKTHVHIGEGPSTISNSTIPENATSSGRFKLDILKNKAKRSLTSSLENIFSRGANRMRGRLGSVDSFERSNSLASEKDYSPGDSPPGTPPASPPSSAWQTFPEEDSDSPQFRRRAHTFSHPPSSTKRKLNLQDGRAQGVRSPLLRQSSSEQCSNLSSVRRMYKESNSSSSLPSLHTSFSAPSFTAPSFLKSFYQNSGRLSPQYENEIRQDTASESSDGEGRKRTSSTCSNESLSVGGTSVTPRRISWRQRIFLRVASPMNKSPSAMQQQDGLDRNELLPLSPLSPTMEEEPLVIFLSGEDDPEKIEERKKSKELRSLWRKAIHQQILLLRMEKENQKLEGASRDELQSRKVKLDYEEVGACQKEVLITWDKKLLNCRAKIRCDMEDIHTLLKEGVPKSRRGEIWQFLALQYRLRHRLPNKQQPPDISYKELLKQLTAQQHAILVDLGRTFPTHPYFSVQLGPGQLSLFNLLKAYSLLDKEVGYCQGISFVAGVLLLHMSEEQAFEMLKFLMYDLGFRKQYRPDMMSLQIQMYQLSRLLHDYHRDLYNHLEENEISPSLYAAPWFLTLFASQFSLGFVARVFDIIFLQGTEVIFKVALSLLSSQETLIMECESFENIVEFLKNTLPDMNTSEMEKIITQVFEMDISKQLHAYEVEYHVLQDELQESSYSCEDSETLEKLERANSQLKRQNMDLLEKLQVAHTKIQALESNLENLLTRETKMKSLIRTLEQEKMAYQKTVEQLRKLLPADALANCDLLLRDLNCNPNNKAKIGNKP

SEQ ID NO: 6120 - protein, 249 aa, Homo sapiens
MDIDRLEKKIEDLSKTETEHQMQLHTYENTLLNKDTSLQKKGLYIEELKSTIIEYGSIIENLRGEKSKLAHELQHLQQALITNGIQLNVNGECNSIISEGEKSLHYELTLAQSAENTETERQHNVINLSSLDAMMDQEMLLLLREPAQKAVEFTATLQKLHEEISKIATLIENSRRWVTNPEITVKEKWEEQLTEFNNIMEEKLDLCILMLNILGNHKESLDKEFAKLIEILKRFRQEYFYFRKEFLAR

SEQ ID NO: 6121 - protein, 502 aa, Homo sapiens
MWTADEIAQLCYEHYGIRLPKKGKPEPNHEWTLLAAVVKIQSPADKACDTPDKPVQVTKEVVSMGTGTKCIGQSKMRKNGDILNDSHAEVIARRSFQRYLLHQLQLAATLKEDSIFVPGTQKGVWKLRRDLIFVFFSSHTPCGDASIIPMLEFEDQPCCPVFRNWAHNSSVEASSNLEAPGNERKCEDPDSPVTKKMRLEPGTAAREVTNGAAHHQSFGKQKSGPISPGIHSCDLTVEGLATVTRIAPGSAKVIDVYRTGAKCVPGEAGDSGKPGAAFHQVGLLRVKPGRGDRTRSMSCSDKMARWNVLGCQGALLMHLLEEPIYLSAVVIGKCPYSQEAMQRALIGRCQNVSALPKGFGVQELKILQSDLLFEQSRSAVQAKRADSPGRLVPCGAAISWSAVPEQPLDVTANGFPQGTTKKTIGSLQARSQISKVELFRSFQKLLSRIARDKWPHSLRVQKLDTYQEYKEAASSYQEAWSTLRKQVFGSWIRNPPDYHQFK

SEQ ID NO: 6122 - protein, 1086 aa, Homo sapiens
STERLDNKPETTRYDSFGRLTNVTFPTGQVSSFRSDTDSSVHVQVETSSKDDVTITTNLSASGAFYTLLQDQVRNSYYIGADGSLRLLLANGMEVALQTEPHLLAGTVNPTVGKRNVTLPIDNGLNLVEWRQRKEQARGQVTVFGRRLRVHNRNLLSLDFDRVTRTEKIYDDHRKFTLRILYDQAGRPSLWSPSSRLNGVNVTYSPGGYIAGIQRGIMSERMEYDQAGRITSRIFADGKTWSYTYLEKSMVLLLHSQRQYIFEFDKNDRLSSVTMPNVARQTLETIRSVGYYRNIYQPPEGNASVIQDFTEDGHLLHTFYLGTGRRVIYKYGKLSKLAETLYDTTKVSFTYDETAGMLKTINLQNEGFTCTIRYRQIGPLIDRQIFRFTEEGMVNARFDYNYDNSFRVTSMQAVINETPLPIDLYRYDDVSGKTEQFGKFGVIYYDINQIITTAVMTHTKHFDAYGRMKEVQYEIFRSLMYWMTVQYDNMGRVVKKELKVGPYANTTRYSYEYDADGQLQTVSINDKPLWRYSYDLNGNLHLLSPGNSARLTPLRYDIRDRITRLGDVQYKMDEDGFLRQRGGDIFEYNSAGLLIKAYNRAGSWSVRYRYDGLGRRVSSKSSHSHHLQFFYADLTNPTKVTHLYNHSSSEITSLYYDLQGHLFAMELSSGDEFYIACDNIGTPLAVFSGTGLMIKQILYTAYGEIYMDTNPNFQIIIGYHGGLYDPLTKLVHMGRRDYDVLAGRWTSPDHELWKHLSSSNVMPFNLYMFKNNNPISNSQDIKCFMTDVNSWLLTFGFQLHNVIPGYPKPDMDAMEPSYELIHTQMKTQEWDNSKSILGVQCEVQKQLKAFVTLERFDQLYGSTITSCQQAPKTKKFASSGSVFGKGVKFALKDGRVTTDIISVANEDGRRVAAILNHAHYLENLHFTIDGVDTHYFVKPGPSEGDLAILGLSGGRRTLENGVNVTVSQINTVLNGRTRRYTDIQLQYGALCLNTRYGTTLDEEKARVLELARQRAVRQAWAREQQRLREGEEGLRAWTEGEKQQVLSTGRVQGYDGFFVISVEQYPELSDSANNIHFMRQSEMGRR

SEQ ID NO: 6123 - protein, 780 aa, Homo sapiens
MEQVEILRKFIQRVQAMKSPDHNGEDNFARDFMRLRRLSTKYRTEKIYPTATGEKEENVKKNRYKDILPFDHSRVKLTLKTPSQDSDYINANFIKGVYGPKAYVATQGPLANTVIDFWRMVWEYNVVIIVMACREFEMGRKKCERYWPLYGEDPITFAPFKISCEDEQARTDYFIRTLLLEFQNESRRLYQFHYVNWPDHDVPSSFDSILDMISLMRKYQEHEDVPICIHCSAGCGRTGAICAIDYTWNLLKAGKIPEEFNVFNLIQEMRTQRHSAVQTKEQYELVHRAIAQLFEKQLQLYEIHGAQKIADGVNEINTENMVSSIEPEKQDSPPPKPPRTRSCLVEGDAKEEILQPPEPHPVPPILTPSPPSAFPTVTTVWQDNDRYHPKPVLHMVSSEQHSADLNRNYSKSTELPGKNESTIEQIDKKLERNLSFEIKKVPLQEGPKSFDGNTLLNRGHAIKIKSASPCIADKISKPQELSSDLNVGDTSQNSCVDCSVTQSNKVSVTPPEESQNSDTPPRPDRLPLDEKGHVTWSFHGPENAIPIPDLSEGNSSDINYQTRKTVSLTPSPTTQVETPDLVDHDNTSPLFRTPLSFTNPLHSDDSDSDERNSDGAVTQNKTNISTASATVSAATSTESISTRKVLPMSIARHNIAGTTHSGAEKDVDVSEDSPPPLPERTPESFVLASEHNTPVRSEWSELQSQERSEQKKSEGLITSENEKCDHPAGGIHYEMCIECPPTFSDKREQISENPTEATDIGFGNRCGKPKGPRDPPSEWT

SEQ ID NO: 6124 - protein, 125 aa, Homo sapiens
MIVTKSLVMLQPLQIIGESIMKRDRTSVIDVANFSDIVHTLQFIGELIVERNLTNVKNVMKLSVSNQTFKDIGEFILERNLTGVMNVARPLVGSHTLHAIVDFILERNLTSVMSVARPSVEIQPL

SEQ ID NO: 6125 - protein, 1368 aa, Homo sapiens
QYVLLIPSVLQEGSLDKACAQLFNLTESVVLTVSLNYGEVQTKIFEENVTGENFFKCISFEVPQARSDPLAFITFSAKGATLNLEERRSVAIRSRENVVFVQTDKPTYKPGQKACKNTLSYSQDPEGNRIQQWVNEESVGGILQLSFQLISEPILGWYEITVEMLNEKKTYHSFSVEEYVLPKFEVTVNAPQTVTISDDEFQVDVCAKYTFGQPVQGKTQIRVCREYFSSSNCEKNDNEICEQFIAQLENGCVSQIVNTKVFQLYRSGLFMTFHVAVIVTEFGTGNYCMQISEKTSVFITQLLGTVNFENMDTFYRRGISYFGTLKFSDPNNVPMVNKLLQLELNDEFIGNYTTDENGEAQFSIDTSDIFDPEFNLKATYVRPKSCYLPSWLTPQYLDAHFLVSRFYSRTNSFLKIVPEPKQLECNHQKVVTVHYSLNSEAYEDDSNVKFFYLVSLRNFQHRISSSPIYTAWNGNFSFPLSISADLAPAAVLFVYTLHPSGEIVADSVRFQVDKCFKHKVNIKFSNEQGLPGSNASLYLQAAPVLFCALGAVDGNVLLLKSEQQLSAESVYNMVPSIEPYGYFYHGLNLDDGKEDPCIPQRDMFYNGLYYTPVSNYGDGDIYNIVRNMGLKVFTNLHYRKPEVCVMERRLPLPKPLYLETENYGPMHSVPSRIACRGENADYVEQAIIQTVRTNFPETWMWDLVSVDSSGSANLSFLIPDTITQWEASGFCVNGDVGFGISSTTTLEVSQPFFIEIASPFSVVQNEQFDLIVNAFSYLNTCVEISVQVEESQNYEANINTWKINGSEVIQAGGRKTNIWTIIPKKLGKVNITVVAESKQSSACPNEGMEQQKLNWKDTVVKSFLVEPEGIEKERTQSFLICTEGAKASKQGVLDLPNDVVEGSARGFFTVVGDILGLAMQNLVVLQMPYGGGEQNAALLASDTYVLDYLKSTEQLTEEVQSKAFFLLSNGYQRQLSFKNSDGSYSVFWQQNQKGSIWLSALTFKTLERMKKFVFIDENVQKQTLIWLSSQQKTSGCFKNDGQLFNHAWEGGDEEDISLTAYVVGMFFEAGLNSTFPALRNALFCLEAALDSGVTNGYNHAILAYAFALAGKEKQVESLLQTLDQSATKLNNVIYWERERKPKTEEFPSFIPWAPSAQTEKSCYVLLAVISRKIPDLTYASKIVQWLAQQMNSHGGFSSNQVINVGLILIAICGEEGLFSKNQNTVTFSSEGSSEIQFNGHNRLLVQRSEVTQAPGQYTVDVEGRGCTFIQATLKYNVLLPKKASGFSLSLEIVKNYSLTVFDLTVNLKYTGIRNKSSMVVIDVKMLSGFTPTMSSIEELENKGQVMKTEVKNDHVLFYLENVSLAIFF

SEQ ID NO: 6126 - protein, 456 aa, Homo sapiens
MRGAMELEPELLLQEARENVEAAQSYRRELGHRLEGLREARRQIKESASQTRDVLKQHFNDLKGTLGKLLDERLVTLLQEVDTIEQETIKPLDDCQKLIEHGVNTAEDLVREGEIAMLGGVGEENEKLWSFTKKASHIQLDSLPEVPLLVDVPCLSAQLDDSILNIVKDHIFKHGTVASRPPVQIEELIEKPGGIIVRWCKVDDDFTAQDYRLQFRKCTSNHFEDVYVGSETEFIVLHIDPNVDYQFRVCARGDGRQEWSPWSVPQIGHSTLVPHEWTAGFEGYSLSSRRNIALRNDSESSGVLYSRAPTYFCGQTLTFRQVDIKTSHLPQEAEVETVGQPDRRDSIGVCAEKQDGYDSLQRDQAVCISTNGAVFVNGKEMTNQLPAVTSGSTVTFDIEAVTLGTTSNNEGGHFKLRVTISSNNREVVFDWLLDQSCGSLYFGCSFFYPGWKVLVF

SEQ ID NO: 6127 - protein, 747 aa, Homo sapiens
MAEAVERTDELVREYLLFRGFTHTLRQLDAEIKADKEKGFRVDKIVDQLQQLMQVYDLAALRDYWSYLERRLFSRLEDIYRPTIHKLKTSLFRFYLVYTIQTNRNDKAQEFFAKQATELQNQAEWKDWFVLPFLPSPDTNPTFATYFSRQWADTFIVSLHNFLSVLFQCMPVPVILNFDAECQRTNQVQEENEVLRQKLFALQAEIHRLKKEEQQPEEEEALVQHKLPPYVSNMDRLGDSELAMVCSQRNASLSQSPRVGFLSSLLPQSKKSPSRLSPAQGPPQPQSSAKKESFGGQGTKGKDPTSGAKDGKSLLSGLATGESGWSQHRQRRLQDHGKERKELFSTTTSQCAEKKPEASGPEAEPCPELHTEPVEPLTRASSAGPEGGGVRPEQPFIVLGQEEYGEHHSSIMHCRVDCSGRRVASLDVDGVIKVWSFNPIMQTKASSISKSPLLSLEWATKRDRLLLLGSGVGTVRLYDTEAKKNLCEININDNMPRILSLACSPNGASFVCSAAAPSLTSQVDFSAPDIGSKGMNQVPGRLLLWDTKTMKQQLQFSLDPEPIAINCTAFNHNGNLLVTGAADGVIRLFDMQQHECAMSWRAHYGEVYSVEFSYDENTVYSIGEDGKFIQWNIHKSGLKVSEYSLPSDATGPFVLSGYSGYKQVQVPRGRLFAFDSEGNYMLTCSATGGVIYKLGGDEKVLESCLSLGGHRAPVVTVDWSTAMDCGTCLTASMDGKIKLTTLLAHKA

SEQ ID NO: 6128 - protein, 636 aa, Homo sapiens
MAEAVERTDELVREYLLFRGFTHTLRQLDAEIKADKEKGFRVDKIVDQLQQLMQVYDLAALRDYWSYLERRLFSRLEDIYRPTIHKLKTSLFRFYLVYTIQTNRNDKAQEFFAKQATELQNQAEWKDWFVLPFLPSPDTNPTFATYFSRQWADTFIVSLHNFLSVLFQCMPVPVILNFDAECQRTNQVQEENEVLRQKLFALQAEIHRLKKEEQQPEEEEALVQHKLPPYVSNMDRLGDSELAMVCSQRNASLSQSPRVGFLSSLLPQSKKSPSRLSPAQGPPQPQSSAKKESFGGQGTKGKDPTSGAKDGKSLLSGLATGESGWSQHRQRRLQDHGKERKELFSTTTSQCAEKKPEASGPEAEPCPELHTEPVEPLTRASSAGPEGGGVRPEQPFIVLGQEEYGEHHSSIMHCRVDCSGRRVASLDVDGVIKVWSFNPIMQTKASSISKSPLLSLEWATKRDRLLLLGSGVGTVRLYDTEAKKNLCEININDNMPRILSLACSPNGASFVCSAAAPSLTSQVDFSAPDIGSKGMNQVPGRLLLWDTKTMKQQLQFSLDPEPIAINCTAFNHNGNLLVTGAADGVIRLFVHPVEHPQEWPQGIRVQPPLRCHGPLCAVWIQRLQAGSSPQGPTLRF

SEQ ID NO: 6129 - protein, 950 aa, Homo sapiens
MGVPAFFRWLSRKYPSIIVNCVEEKPKECNGVKIPVDASKPNPNDVEFDNLYLDMNGIIHPCTHPEDKPAPKNEDEMMVAIFEYIDRLFSIVRPRRLLYMAIDGVAPRAKMNQQRSRRFRASKEGMEAAVEKQRVREEILAKGGFLPPEEIKERFDSNCITPGTEFMDNLAKCLRYYIADRLNNDPGWKNLTVILSDASAPGEGEHKIMDYIRRQRAQPNHDPNTHHCLCGADADLIMLGLATHEPNFTIIREEFKPNKPKPCGLCNQFGHEVKDCEGLPREKKGKHDELADSLPCAEGEFIFLRLNVLREYLERELTMASLPFTFDVERSIDDWVFMCFFVGNDFLPHLPSLEIRENAIDRLVNIYKNVVHKTGGYLTESGYVNLQRVQMIMLAVGEVEDSIFKKRKDDEDSFRRRQKEKRKRMKRDQPAFTPSGILTPHALGSRNSPGSQVASNPRQAAYEMRMQNNSSPSISPNTSFTSDGSPSPLGGIKRKAEDSDSEPEPEDNVRLWEAGWKQRYYKNKFDVDAADEKFRRKVVQSYVEGLCWVLRYYYQGCASWKWYYPFHYAPFASDFEGIADMPSDFEKGTKPFKPLEQLMGVFPAASGNFLPPSWRKLMSDPDSSIIDFYPEDFAIDLNGKKYAWQGVALLPFVDERRLRAALEEVYPDLTPEETRRNSLGGDVLFVGKHHPLHDFILELYQTGSTEPVEVPPELCHGIQGKFSLDEEAILPDQIVCSPVPMLRDLTQNTVVSINFKDPQFAEDYIFKAVMLPGARKPAAVLKPSDWEKSSNGRQWKPQLGFNRDRRPVHLDQAAFRTLGHVMPRGSGTGIYSNAAPPPVTYQGNLYRPLLRGQAQIPKLMSNMRPQDSWRGPPPLFQQQRFDRGVGAEPLLPWNRMLQTQNAAFQPNQYQMLAGPGGYPPRRDDRGGRQGYPREGRKYPLPPPSGRYNWN

SEQ ID NO: 6130 - protein, 648 aa, Homo sapiens [sequence omitted]

SEQ ID NO: 6131 - protein, 1447 aa, Homo sapiens
MAHSKTRTNDGKITYPPGVKEISDKISKEEMVRRLKMVVKTFMDMDQDSEEEKELYLNLALHLASDFFLKHPDKDVRLLVACCLADIFRIYAPEAPYTSPDKLKDIFMFITRQLKGLEDTKSPQFNRYFYLLENIAWVKSYNICFELEDSNEIFTQLYRTLFSVINNGHNQKVHMHMVDLMSSIICEGDTVSQELLDTVLVNLVPAHKNLNKQAYDLAKALLKRTAQAIEPYITNFFNQVLMLGKTSISDLSEHVFDLILELYNIDSHLLLSVLPQLEFKLKSNDNEERLQVVKLLAKMFGAKDSELASQNKPLWQCYLGRFNDIHVPIRLECVKFASHCLMNHPDLAKDLTEYLKVRSHDPEEAIRHDVIVSIVTAAKKDILLVNDHLLNFVRERTLDKRWRVRKEAMMGLAQIYKKYALQSAAGKDAAKQIAWIKDKLLHIYYQNSIDDRLLVERIFAQYMVPHNLETTERMKCLYYLYATLDLNAVKALNEMWKCQNLLRHQVKDLLDLIKQPKTDASVKAIFSKVMVITRNLPDPGKAQDFMKKFTQVLEDDEKIRKQLEVLVSPTCSCKQAEGCVREITKKLGNPKQPTNPFLEMIKFLLERIAPVHIDTESISALIKQVNKSIDGTADDEDEGVPTDQAIRAGLELLKVLSFTHPISFHSAETFESLLACLKMDDEKVAEAALQIFKNTGSKIEEDFPHIRSALLPVLHHKSKKGPPRQAKYAIHCIHAIFSSKETQFAQIFEPLHKSLDPSNLEHLITPLVTIGHIALLAPDQFAAPLKSLVATFIVKDLLMNDRLPGKKTTKLWVPDEEVSPETMVKIQAIKMMVRWLLGMKNNHSKSGTSTLRLLTTILHSDGDLTEQGKISKPDMSRLRLAAGSAIVKLAQEPCYHEIITLEQYQLCALAINDECYQVRQVFAQKLHKGLSRLRLPLEYMAICALCAKDPVKERRAHARQCLVKNINVRREYLKQHAAVSEKLLSLLPEYVVPYTIHLLAHDPDYVKVQDIEQLKDVKECLWFVLEILMAKNENNSHAFIRKMVENIKQTKDAQGPDDAKMNEKLYTVCDVAMNIIMSKSTTYSLESPKDPVLPARFFTQPDKNFSNTKNYLPPEMKSFFTPGKPKTTNVLGAVNKPLSSAGKQSQTKSSRMETVSNASSSSNPSSPGRIKGRLDSSEMDHSENEDYTMSSPLPGKKSDKRDDSDLVRSELEKPRGRKKTPVTEQEEKLGMDDLTKLVQEQKPKGSQRSRKRGHTASESDEQQWPEEKRLKEDILENEDEQNSPPKKGKRGRPPKPLGGGTPKEEPTMKTSKKGSKKKSGPPAPEEEEEEERQSGNTEQKSKSKQHRVSRRAQQRAESPESSAIESTQSTPQKGRGRPSKTPSPSQPKKNVRVGRSKQAATKENDSSEEVDVFQGSSPVDDIPQEETEEEEVSTVNVRRRSAKRERR

SEQ ID NO: 6132 - protein, 1483 aa, Homo sapiens
GGGRRRLDAAAAADPGEPRSERSSESATRRGRNISVMAHSKTRTNDGKITYPPGVKEISDKISKEEMVRRLKMVVKTFMDMDQDSEEEKELYLNLALHLASDFFLKHPDKDVRLLVACCLADIFRIYAPEAPYTSPDKLKDIFMFITRQLKGLEDTKSPQFNRYFYLLENIAWVKSYNICFELEDSNEIFTQLYRTLFSVINNGHNQKVHMHMVDLMSSIICEGDTVSQELLDTVLVNLVPAHKNLNKQAYDLAKALLKRTAQAIEPYITNFFNQVLMLGKTSISDLSEHVFDLILELYNIDSHLLLSVLPQLEFKLKSNDNEERLQVVKLLAKMFGAKDSELASQNKPLWQCYLGRFNDIHVPIRLECVKFASHCLMNHPDLAKDLTEYLKVRSHDPEEAIRHDVIVSIVTAAKKDILLVNDHLLNFVRERTLDKRWRVRKEAMMGLAQIYKKYALQSAAGKDAAKQIAWIKDKLLHIYYQNSIDDRLLVERIFAQYMVPHNLETTERMKCLYYLYATLDLNAVKALNEMWKCQNLLRHQVKDLLDLIKQPKTDASVKAIFSKVMVITRNLPDPGKAQDFMKKFTQVLEDDEKIRKQLEVLVSPTCSCKQAEGCVREITKKLGNPKQPTNPFLEMIKFLLERIAPVHIDTESISALIKQVNKSIDGTADDEDEGVPTDQAIRAGLELLKVLSFTHPISFHSAETFESLLACLKMDDEKVAEAALQIFKNTGSKIEEDFPHIRSALLPVLHHKSKKGPPRQAKYAIHCIHAIFSSKETQFAQIFEPLHKSLDPSNLEHLITPLVTIGHIALLAPDQFAAPLKSLVATFIVKDLLMNDRLPGKKTTKLWVPDEEVSPETMVKIQAIKMMVRWLLGMKNNHSKSGTSTLRLLTTILHSDGDLTEQGKISKPDMSRLRLAAGSAIVKLAQEPCYHEIITLEQYQLCALAINDECYQVRQVFAQKLHKGLSRLRLPLEYMAICALCAKDPVKERRAHARQCLVKNINVRREYLKQHAAVSEKLLSLLPEYVVPYTIHLLAHDPDYVKVQDIEQLKDVKECLWFVLEILMAKNENNSHAFIRKMVENIKQTKDAQGPDDAKMNEKLYTVCDVAMNIIMSKSTTYSLESPKDPVLPARFFTQPDKNFSNTKNYLPPEMKSFFTPGKPKTTNVLGAVNKPLSSAGKQSQTKSSRMETVSNASSSSNPSSPGRIKGRLDSSEMDHSENEDYTMSSPLPGKKSDKRDDSDLVRSELEKPRGRKKTPVTEQEEKLGMDDLTKLVQEQKPKGSQRSRKRGHTASESDEQQWPEEKRLKEDILENEDEQNSPPKKGKRGRPPKPLGGGTPKEEPTMKTSKKGSKKKSGPPAPEEEEEEERQSGNTEQKSKSKQHRVSRRAQQRAESPESSAIESTQSTPQKGRGRPSKTPSPSQPKKNVRVGRSKQAATKENDSSEEVDVFQGSSPVDDIPQEETEEEEVSTVNVRRRSAKRERR

SEQ ID NO: 6133 - protein, 179 aa, Homo sapiens
MLGAGPAGVFVKVSLMNHNKFVKCKKTSAVLGSINPVYNETFSFKADATKLDTASLSLTAVQNMEGDTPRFRFGSRPSSQLHVTATATRMDVSSNSSPSCQASPSQEDVSADMQERRGDKEVLARPDLDQNLRCSEERSCLVMTQLYLLNGPAGAGYYSGTVPVSSDIRIDASHPHIPK

SEQ ID NO: 6134 - protein, 414 aa, Homo sapiens
DFVPLYQDFENFYTRNLYMRIRDNWNRPICSAPGPLFDLMERVSDDYNWTFRFTGRVIKDVINMGSYNFLGLAAKYDESMRTIKDVLEVYGTGVASTRHEMGTLDKHKELEDLVAKFLNVEAAMVFGMGFATNSMNIPALVGKGCLILSDELNHTSLVLGARLSGATIRIFKHNNTQSLEKLLRDAVIYGQPRTRRAWKKILILVEGVYSMEGSIVHLPQIIALKKKYKAYLYIDEAHSIGAVGPTGRGVTEFFGLDPHEVDVLMGTFTKSFGASGGYIAGRKDLVDYLRVHSHSAVYASSMSPPIAEQIIRSLKLIMGLDGTTQGLQRVQQLAKNTRYFRQRLQEMGFIIYGNENASVVPLLLYMPGKVAAFARHMLEKKIGVVVVGFPATPLAEARARFCVSAAHTREMLDT

SEQ ID NO: 6135 - protein, 134 aa, Homo sapiens
MGLDGTTQGLQRVQQLAKNTRYFRQRLQEMGFIIYGNENASVVPLLLYMPGKVAAFARHMLEKKIGVVVVGFPATPLAEARARFCVSAAHTREMLDTVLEALDEMGDLLQLKYSRHKKSARPELYDETSFELED

SEQ ID NO: 6136 - protein, 2139 aa, Homo sapiens
MILDQAFKYITELKRQNDELLLNGGNNEQAEEIKKLRKQLEEIQKENGRYIELLKANDICLYDDPTIHWKGNLKNSKVSVVIPSDQVQKKIIVYSNGNQPGGNSQGTAVQGITFNVSHNLQKQTANVVPVQRTCNLVTPVSISGVYPSENKPWHQTTVPALATNQPVPLCLPAAISAQSILELPTSESESNVLGATSGSLIAVSIESEPHQHHSLHTCLNDQNSSENKNGQENPKVLKKMTPCVTNIPHSSSATATKVHHGNKSCLSIQDFRGDFQNTFVVSVTTTVCSQPPRTAGDSSPMSISKSADLTSTATVVASSAPGVGKATIPISTLSGNPLDNGWTLSCSLPSSSVSTSDLKNINSLTRISSAGNTQTTWTTLQLAGNTIQPLSQTPSSAVTPVLNESGTSPTTSNHSRYVATDINLNNSFPADGQPVEQVVVTLPSCPSLPMQPLIAQPQVKSQPPKNILPLNSAMQVIQMAQPVGSAVNSAPTNQNVIILQPPSTTPCPTVMRAEVSNQTVGQQIVIIQAANQNPLPLLPAPPPGSVRLPINGANTVIGSNNSVQNVPTPQTFGGKHLVHILPRPSSLSASNSTQTFSVTMSNQQPQTISLNGQLFALQPVMSSSGTTNQTPMQIIQPTTSEDPNTNVALNTFGALASLNQSISQMAGQSCVQLSISQPANSQTAANSQTTTANCVSLTTTAAPPVTTDSSATLASTYNLVSTSSMNTVACLPNMKSKRLNKKPGGRKHLAANKSACPLNSVRDVSKLDCPNTEGSAEPPCNDGLLESFPAVLPSVSVSQANSVSVSASHSLGVLSSESLIPESVSKSKSAEKSSPPSQESVTSEHFAMAAAKSKDSTPNLQQETSQDKPPSSLALSDAAKPCASANVLIPSPSDPHILVSQVPGLSSTTSTTSTDCVSEVEIIAEPCRVEQDSSDTMQTTGLLKGQGLTTLLSDLAKKKNPQKSSLSDQMDHPDFSSENPKIVDSSVNLHPKQELLLMNNDDRDPPQHHSCLPDQEVINGSLINGRQADSPMSTSSGSSRSFSVASMLPETTREDVTSNATTNTCDSCTFVEQTDIVALAARAIFDQENLEKGRVGLQADIREVASKPSEASLLEGDPPFKSQIPKESGTGQAEATPNEFNSQGSIEATMERPLEKPSCSLGIKTSNASLQDSTSQPPSITSLSVNNLIHQSSISHPLASCAGLSPTSEQTTVPATVNLTVSSSSYGSQPPGPSLMTEYSQEQLNTMTSTIPNSQIQEPLLKPSHESRKDSAKRAVQDDLLLSSAKRQKHCQPAPLRLESMSLMSRTPDTISDQTQMMVSQIPPNSSNSVVPVSNPAHGDGLTRLFPPSNNFVTPALRQTEVQCGSQPSVAEQQQTQASQHLQALQQHVPAQESSVHSQPHNVHQQRTLQQEVQMQKKRNLVQGTQTSQLSLQPKHHGTDQSRSKTGQPHPHHQQMQQQMQQHFGSSQTEKSCENPSTSRNHHNHPQNHLNQDIMHQQQDVGSRQQGSGVSSEHVSGHNPMQRLLTSRGLEQQMVSQPSIVTRSSDMTCTPHRPERNRVSSYSAEALIGKTSSNSEQRMGISIQGSRVSDQLEMRSYLDVPRNKSLAIHNMQGRVDHTVASDIRLSDCQTFKPSGASQQPQSNFEVQSSRNNEIGNPVSSLRSMQSQAFRISQNTGPPPIDRQKRLSYPPVQSIPTGNGIPSRDSENTCHQSFMQSLLAPHLSDQVIGSQRSLSEHQRNTQCGPSSAIEYNCPPTHENVHIRRESESQNRESCDMSLGAINTRNSTLNIPFSSSSSSGDIQGRNTSPNVSVQKSNPMRITESHATKGHMNPPVTTNMHGVARPALPHPSVSHGNGDQGPAVRQANSSVPQRSRHPLQDSSGSKIRQPERNRSGNQRQSTVFDPSLPHLPLSTGGSMILGRQQPATEKRGSIVRFMPDSPQVPNDNSGPDQHTLSQNFGFSFIPEGGMNPPINANASFIPQVTQPSATRTPALIPVDPQNTLPSFYPPYSPAHPTLSNDISIPYFPNQMFSNPSTEKVNSGSLNNRFGSILSPPRPVGFAQPSFPLLPDMPPMHMTNSHLSNFNMTSLFPEIATVLPDGSAMSPLLTIANSSASDSSKQSSNRPAHNISHILGHDCSSAV

SEQ ID NO: 6137 - protein, 614 aa, Homo sapiens
MSGYSSDRDRGRDRGFGAPRFGGSRAGPLSGKKFGNPGEKLVKKKWNLDELPKFEKNFYQEHPDLARRTAQEVETYRRSKEITVRGHNCPKPVLNFYEANFPANVMDVIARQNFTEPTAIQAQGWPVALSGLDMVGVAQTGSGKTLSYLLPAIVHINHQPFLERGDGPICLVLAPTRELAQQVQQVAAEYCRACRLKSTCIYGGAPKGPQIRDLERGVEICIATPGRLIDFLECGKTNLRRTTYLVLDEADRMLDMGFEPQIRKIVDQIRPDRQTLMWSATWPKEVRQLAEDFLKDYIHINIGALELSANHNILQIVDVCHDVEKDEKLIRLMEEIMSEKENKTIVFVETKRRCDELTRKMRRDGWPAMGIHGDKSQQERDWVLNEFKHGKAPILIATDVASRGLDVEDVKFVINYDYPNSSEDYIHRIGRTARSTKTGTAYTFFTPNNIKQVSDLISVLREANQAINPKLLQLVEDRGSGRSRGRGGMKDDRRDRYSAGKRGGFNTFRDRENYDRGYSSLLKRDFGAKTQNGVYSAANYTNGSFGSNFVSAGIQTSFRTGNPTGTYQNGYDSTQQYGSNVPNMHNGMNQQAYAYPATAAAPMIGYPMPTGYSQ

SEQ ID NO: 6138 - protein, 1518 aa, Homo sapiens
MATKLDFNKMPLSVFPYYASLGTALYGKEKPLIKLPAPFEESLDLPLWKFLQKKNHLIEEINDEMRRCHCELTWSQLSGKVTIRPAATLVNEGRPRIKTWQADTSTTLSSIRSKYKVNPIKVDPTMWDTIKNDVKDDRILIEFDTLKEMVILAGKSEDVQSIEVQVRELIESTTQKIKREEQSLKEKMIISPGRYFLLCHSSLLDHLLTECPEIEICYDRVTQHLCLKGPSADVYKAKCEIQEKVYTMAQKNIQVSPEIFQFLQQVNWKEFSKCLFIAQKILALYELEGTTVLLTSCSSEALLEAEKQMLSALNYKRIEVENKEVLHGKKWKGLTHNLLKKQNSSPNTVIINELTSETTAEVIITGCVKEVNETYKLLFNFVEQNMKIERLVEVKPSLVIDYLKTEKKLFWPKIKKVNVQVSFNPENKQKGILLTGSKTEVLKAVDIVKQVWDSVCVKSVHTDKPGAKQFFQDKARFYQSEIKRLFGCYIELQENEVMKEGGSPAGQKCFSRTVLAPGVVLIVQQGDLARLPVDVVVNASNEDLKHYGGLAAALSKAAGPELQADCDQIVKREGRLLPGNATISKAGKLPYHHVIHAVGPRWSGYEAPRCVYLLRRAVQLSLCLAEKYKYRSIAIPAISSGVFGFPLGRCVETIVSAIKENFQFKKDGHCLKEIYLVDVSEKTVEAFAEAVKTVFKATLPDTAAPPGLPPAAAGPGKTSWEKGSLVSPGGLQMLLVKEGVQNAKTDVVVNSVPLDLVLSRGPLSKSLLEKAGPELQEELDTVGQGVAVSMGTVLKTSSWNLDCRYVLHVVAPEWRNGSTSSLKIMEDIIRECMEITESLSLKSIAFPAIGTGNLGFPKNIFAELIISEVFKFSSKNQLKTLQEVHFLLHPSDHENIQAFSDEFARRANGNLVSDKIPKAKDTQGFYGTVSSPDSGVYEMKIGSIIFQVASGDITKEEADVIVNSTSNSFNLKAGVSKAILECAGQNVERECSQQAQQRKNDYIITGGGFLRCKNIIHVIGGNDVKSSVSSVLQECEKKNYSSICLPAIGTGNAKQHPDKVAEAIIDAIEDFVQKGSAQSVKKVKVVIFLPQVLDVFYANMKKREGTQLSSQQSVMSKLASFLGFSKQSPQKKNHLVLEKKTESATFRVCGENVTCVEYAISWLQDLIEKEQCPYTSEDECIKDFDEKEYQELNELQKKLNINISLDHKRPLIKVLAISRDVMQARDEIEAMIKRVRLGKEQESRADCISEFIEWQYNDNNTSHCFNKMTNLKLEDARREKKKTVDVKINHRHYTVNLNTYTATDTKGHSLSVQRLTKSKVDIPAHWSDMKQQNFCVVELLPSDPEYNTVASKFNQTCSHFRIEKIERIQNPDLWNSYQAKKKTMDAKNGQTMNEKQLFHGTDAGSVPHVNRNGFNRSYAGKNAVAYGKGTYFAVNANYSANDTYSRPDANGRKHVYYVRVLTGIYTHGNHSLIVPPSKNPQNPTDLYDTVTDNVHHPSLFVAFYDYQAYPEYLITFRK

SEQ ID NO: 6139 - protein, 626 aa, Homo sapiens
MSRSGAAAEKADSRQRPQMKVNEYKENQNIAYVSLRPAQTTVLIKTAKVYLAPFSLSNYQLDQLMCPKSLSEKNSNNEVACKKTKIKKTCRRIIPPKMKNTSSKAESTLQNSSSAVHTESNKLQPKRTADAMNLSVDVESSQDGDSDEDTTPALDFSGLSPYERKRLKNISENADFFASLQLSESAARLREMIEKRQPPKSKRKKPKRENGIGCRRSMRLLKVDPSGVSLPAAPTPPTLVADETPLLPPGPLEMTSENQEDNNERFKGFLHTWAGMSKPSSKNTEKGLSSIKSYKANLNGMVISEDTVYKVTTGPIFSMALHPSETRTLVAVGAKFGQVGLCDLTQQPKEDGVYVFHPHSQPVSCLYFSPANPAHILSLSYDGTLRCGDFSRAIFEEVYRNERSSFSSFDFLAEDASTLIVGHWDGNMSLVDRRTPGTSYEKLTSSSMGKIRTVHVHPVHRQYFITAGLRDTHIYDARRLNSRRSQPLISLTEHTKSIASAYFSPLTGNRVVTTCADCNLRIFDSSCISSKIPLLTTIRHNTFTGRWLTRFQAMWDPKQEDCVIVGSMAHPRRVEIFHETGKRVHSFGGEYLVSVCSINAMHPTRYILAGGNSSGKIHVFMNEKSC

SEQ ID NO: 6140 - protein, 343 aa, Homo sapiens
MPPLSTIDPSGTRSKNMPIKDNALVMFNGKVYLLAKKGTDVLPSQIDQQNSVSPDTPVRKDTLQTVSSSPVTEISREVVNIVLAKSKSSQMETKSLSNTQLASMANLRAEKNKVEKPSPSTTNPHMNQSSNYLKQSKTLFTNPIFPVGFSTGHNAPRKVTAVIYARKGSVLQSIEKISSSVDATTVTSQQCVFRDQEPKIHNEMASTSDKGAQGRNDKKDSQGRSNKALHLKSDAEFKKIFGLTKDLRVCLTRIPDHLTSGEGFDSFSSLVKSGTYKETEFMVKEGERKQQNFDKKRKAKTNKKMDHIKKRKTENAYNAIINGEANVTGSQLQYFTNFRCVTT

SEQ ID NO: 6141 - protein, 742 aa, Homo sapiens
MYQVVQTIGSDGKNLLQLLPIPKSSGNLIPLVQSSVMSDALKGNTGKPVQVTFQTQISSSSTSASVQLPIFQPASSSNYFLTRTVDTSEKGRVTSVGTGNFSSSVSKVQSHGVKIDGLTMQTFAVPPSTQKDSSFIVVNTQSLPVTVKSPVLPSGHHLQIPAHAEVKSVPASSLPPSVQQKILATATTSTSGMVEASQMPTVIYVSPVNTVKNVVTKNFQNIYPKPVTEIAKPVILNTTQIPKNVATETQLKGGQHSQAAPVKWIFQDNLQPFTPSLVPVKSSNNVASKILKTFVDRKNLGDNTINMPPLSTIDPSGTRSKNMPIKDNALVMFNGKVYLLAKKGTDVLPSQIDQQNSVSPDTPVRKDTLQTVSSSPVTEISREVVNIVLAKSKSSQMETKSLSNTQLASMANLRAEKNKVEKPSPSTTNPHMNQSSNYLKQSKTLFTNPIFPVGFSTGHNAPRKVTAVIYARKGSVLQSIEKISSSVDATTVTSQQCVFRDQEPKIHNEMASTSDKGAQGRNDKKDSQGRSNKALHLKSDAEFKKIFGLTKDLRVCLTRIPDHLTSGEGFDSFSSLVKSGTYKETEFMVKEGERKQQNFDKKRKAKTNKKMDHIKKRKTENAYNAIINGEANVTGSQLLSSILPTSDVSQHNILTSHSKTRQEKRTEMEYYTHEKQEKGTLNSNAAYEQSHFFNKNYTEDIFPVTPPELEETIRDEKIRRLKQVLREKEAALEEMRKKMHQK

SEQ ID NO: 6142 - protein, 123 aa, Homo sapiens
MEFLEIGGSKPFRSYWEMYLSKGLLLIFVVDSADHSRLPEAKKYLHQLIAANPVLPLVVFANKQDLEAAYHITDIHEALALSEVGNDRKMFLFGTYLTKNGSEIPSTMQDAKDLIAQLAADVQ

SEQ ID NO: 6143 - protein, 466 aa, Homo sapiens
MWPQPRLPPHPAMSEKTQQGKLAAAKKKLKAYWQRKSPGIPAGANRKKKINGSSPDTATSGGYHSPGDSATGIYGEGRASSTTLEDLESQYQELAVALDSSSAIISQLTENINSLVRTSKEEKKHEIHLVQKLGRSLFKLKNQTAEPLAPEPPAGPSKVEQLQDETNHLRKELESVGRQLQAEVENNQMLSLLNRRQEERLREQEERLREQEERLREQEERLHEQEERLCEQEERLCEQEERLREHEERLCEQEERLREHEERLCEQEERLCEQEERLREQEERLCEQEERLCEQEERLCEQEERLREQEERLCEQEERLREQEERLCEQEERLREQEERLCEQEERLREQEERLCEQEKLPGQERLLEEVEKLLEQERRQEEQERLLERERLLEEVEKLLEQERRQEEQERLLERERLLEEVEKLLEQERRQEEQERLLERERLLDEVEELLDEVEELLEQERLR

SEQ ID NO: 6144 - protein, 459 aa, Homo sapiens
MWPQPRLPPHPAMSEKTQQGKLAAAKKKLKAYWQRKSPGIPAGANRKKKINGSSPDTATSGGYHSPGDSATGIYGEGRASSTTLEDLESQYQELAVALDSSSAIISQLTENINSLVRTSKEEKKHEIHLVQKLGRSLFKLKNQTAEPLAPEPPAGPSKVEQLQDETNHLRKELESVGRQLQAEVENNQMLSLLNRRQEERLREQEERLREQEERQREQEDRLHEQEERLREQEERLCEQEERLCEQEERLREHEERLCEQEERLCEQEERLREQEERLHEQEERLREQEERLCEQEERLREHEERLCEQEERLREQEERLCEQEERLREQEERLCEQEERLREQEERLCEQEKLPGQERLLEEVEKLLEQERRQEEQERLLERERLLEEVEKLLEQERQQEEQERLLERERLLEEVEKLLEQERRQEEQERLLERERLLDEVEELLDEVEELLEQERLR

SEQ ID NO: 6145 - protein, 383 aa, Homo sapiens
MWPQPRLPPHPAMSEKTQQGKLAAAKKKLKAYWQRKSPGIPAGANRKKKINGSSPDTATSGGYHSPGDSATGIYGEGRASSTTLEDLESQYQELAVALDSSSAIISQLTENINSLVRTSKEEKKHEIHLVQKLGRSLFKLKNQTAEPLAPEPPAGPSKVEQLQDETNHLRKELESVGRQLQAEVENNQMLSLLNRRQEERLREQEERLREQEERLREQEERLHEQEERLREQEERLCEQEERLREHEERLCEQEERLCEQEERLREQEERLCEQEERLCEQEERLCEQEERLREQEERLCEQEERLCEHEERLCEQEERLREQEERLREQEERLCEQEERLREQEERLCEQEERLREQEERLVFRQVELKSQEAPSLQQQPDQ

SEQ ID NO: 6146 - protein, 509 aa, Homo sapiens
MSEKTQQGKLAAAKKKVKHTRSRPPTQPQIPSDDKTGARVHTTPEAYQMGPPNPSPLGSPNQSLVSQPHPFSKQPSPCPCQSPQGDFGQEDVAVGADHSHECYRSSFPQLKAYWQRKSPGIPAGANRKKKINGSSPDTATSGGYHSPGDSATGIYGEGRASSTTLEDLESQYQELAVALDSSSAIISQLTENINSLVRTSKEEKKHEIHLVQKLGRSLFKLKNQTAEPLAPEPPAGPSKVEQLQDETNHLRKELESVGRQLQAEVENNQMLSLLNRRQEERLREQEERLREQEERLREQEERLCEQEERLREQEERLREQEERLCEQEERLREHEERLCEQEERLCEQEERLREQEERLHEQEERLCEQEERLREQEERLCEQEERLREQEERLCEQEERLREQEERLLRQQDERLWQQETLQELERLRELERMLELGWEALYEQRAEPRSGFEELNNENKSTLQLEQQVKELKKSEVGSPGVLPGLDIIIPARGMEPPNHRAEEETVV

SEQ ID NO: 6147 - protein, 503 aa, Homo sapiens
MSEKTQQGKLAAAKKKLKAYWQRKSPGIPAGANRKKKINGSSPDTATSGGYHSPGDSATGIYGEGRASSTTLEDLESQYQELAVALDSSSAIISQLTENINSLVRTSKEEKKHEIHLVQKLGRSLFKLKNQTAEPLAPEPPAGPSKVEQLQDETNHLRKELESVGRQLQAEVENNQMLSLLNRRQEERLREQEERLREQEERLREQEDRLHEQEERLREQEERLCEQEERLREHEERLCEQEERLCEQEERLREQEERLHEQEERLREQEERLCEQEERLREQEERLCEQEERLREQEERLCEQEKLPGQERLLEEVEKLLEQERRQEEQERLLERERLLEEVEKLLEQERLRQQDERLWQQETLQELERLRELERLRELERMLELGWEALYEQRAEPRSGFEELNNENKSTLQLEQQVKELKKSGGAEEPRGSESAAAARPVAGAPVPQGAWMCGQAGWTPQEHPGLSGEAVGTGEAAGGAGEAACHSFRAAENRELNITII

SEQ ID NO: 6148 - protein, 1723 aa, Homo sapiens
MREKEQEREEQLMEDKKRKKEDKKKKEATQKVTEQKTKVPEVTKPSLSQPTAASPIGSSPSPPVNGGNNAKRVAVPNGQPPSAARYMPREVPPRFRCQQDHKVLLKRGQPPPPSCMLLGGGAGPPPCTAPGANPNNAQVTGALLQSESGTAPDSTLGGAAASNYANSTWGSGASSNNGTSPNPIHIWDKVIVDGSDMEEWPCIASKDTESSSENTTDNNSASNPGSEKSTLPGSTTSNKGKGSQCQSASSGNECNLGVWKSDPKAKSVQSSNSTTENNNGLGNWRNVSGQDRIGPGSGFSNFNPNSNPSAWPALVQEGTSRKGALETDNSNSSAQVSTVGQTSREQQSKMENAGVNFVVSGREQAQIHNTDGPKNGNTNSLNLSSPNPMENKGMPFGMGLGNTSRSTDAPSQSTGDRKTGSVGSWGAARGPSGTDTVSGQSNSGNNGNNGKEREDSWKGASVQKSTGSKNDSWDNNNRSTGGSWNFGPQDSNDNKWGEGNKMTSGVSQGEWKQPTGSDELKIGEWSGPNQPNSSTGAWDNQKGHPLPENQGNAQAPCWGRSSSSTGSEVGGQSTGSNHKAGSSDSHNSGRRSYRPTHPDCQAVLQTLLSRTDLDPRVLSNTGWGQTQIKQDTVWDIEEVPRPEGKSDKGTEGWESAATQTKNSGGWGDAPSQSNQMKSGWGELSASTEWKDPKNTGGWNDYKNNNSSNWGGGRPDEKTPSSWNENPSKDQGWGGGRQPNQGWSSGKNGWGEEVDQTKNSNWESSASKPVSGWGEGGQNEIGTWGNGGNASLASKGGWEDCKRSPAWNETGRQPNSWNKQHQQQQPPQQPPPPQPEASGSWGGPPPPPPGNVRPSNSSWSSGPQPATPKDEEPSGWEEPSPQSISRKMDIDDGTSAWGDPNSYNYKNVNLWDKNSQGGPAPREPNLPTPMTSKSASDSKSMQDGWGESDGPVTGARHPSWEEEEDGGVWNTTGSQGSASSHNSASWGQGGKKQMKCSLKGGNNDSWMNPLAKQFSNMGLLSQTEDNPSSKMDLSVGSLSDKKFDVDKRAMNLGDFNDIMRKDRSGFRPPNSKDMGTTDSGPYFEKGGSHGLFGNSTAQSRGLHTPVQPLNSSPSLRAQVPPQFISPQVSASMLKQFPNSGLSPGLFNVGPQLSPQQIAMLSQLPQIPQFQLACQLLLQQQQQQQLLQNQRKISQAVRQQQEQQLARMVSALQQQQQQQQRQPGMKHSPSHPVGPKPHLDNMVPNALNVGLPDLQTKGPIPGYGSGFSSGGMDYGMVGGKEAGTESRFKQWTSMMEGLPSVATQEANMHKNGAIVAPGKTRGGSPYNQFDIIPGDTLGGHTGPAGDSWLPAKSPPTNKIGSKSSNASWPPEFQPGVPWKGIQNIDPESDPYVTPGSVLGGTATSPIVDTDHQLLRDNTTGSNSSLNTSLPSPGAWPYSASDNSFTNVHSTSAKFPDYKSTWSPDPIGHNPTHLSNKMWKNHISSRNTTPLPRPPPGLTNPKPSSPWSSTAPRSVRGWGTQDSRLASASTWSDGGSVRPSYWLVLHNLTPQIDGSTLRTICMQHGPLLTFHLNLTQGTALIRYSTKQEAAKAQTALHMCVLGNTTILAEFATDDEVSRFLAQAQPPTPAATPSAPAAGWQSLETGQNQSDPVGPALNLFGGSTGLGQWSSSAGGSSGADLAGASLWGPPNYSSSLWGVPTVEDPHRMGSPAPLLPGDLLGGGSDSI

SEQ ID NO: 6149 - protein, 1314 aa, Homo sapiens
MASKGAGMSFSRKSYRLTSDAEKSRVTGIVQEKLLNDYLNRIFSSSEHAPPAATSRKPLNFQNLPEHLDQLLQVDNEEEESQGQVEGRLGPSTVVLDHTGGFEGLLLVDDDLLGVIGHSNFGTIRSTTCVYKGKWLYEVLISSQGLMQIGWCTISCRFNQEEGVGDTHNSYAYDGNRVRKWNVTTTNYGKAWAAGDIVSCLIDLDDGTLSFCLNGVSLGTAFENLSRGLGMAYFPAISLSFKESVAFNFGSRPLRYPVAGYRPLQDPPSADLVRAQRLLGCFRAVLSVELDPVEGRLLDKESSKWRLRGQPTVLLTLAHIFHHFAPLLRKVYLVEAVLMSFLLGIVEKGTPTQAQSVVHQVLDLLWLFMEDYEVQDCLKQLMMSLLRLYRFSPIVPDLGLQIHYLRLTIAILRHEKSRKFLLSNVLFDVLRSVVFFYIKSPLRVEEAGLQELIPTTWWPHCSSREGKESTEMKEETAEERLRRRAYERGCQRLRKRIEVVEELQVQILKLLLDNKDDNGGEASRYIFLTKFRKFLQENASGRGNMPMLCPPEYMVCFLHRLISALRYYWDEYKASNPHASFSEEAYIPPQVFYNGKVDYFDLQRLGGLLSHLRKTLKDDLASKANIVIDPLELQSTAMDDLDEDEEPAPAMAQRPMQALAVGGPLPLPRPGWLSSPTLGRANRFLSTAAVSLMTPRRPLSTSEKVKVRTLSVEQRTREDIEGSHWNEGLLLGRPPEEPEQPLTENSLLEVLDGAVMMYNLSVHQQLGKMVGVSDDVNEYAMALRDTEDKLRRCPKRRKDILAELTKSQKVFSEKLDHLSRRLAWVHATVYSQEKMLDIYWLLRVCLRTIEHGDRTGSLFAFMPEFYLSVAINSYSALKNYFGPVHSMEELPGYEETLTRLAAILAKHFADARIVGTDIRDSLMQALASYVCYPHSLRAVERIPEEQRIAMVRNLLAPYEQRPWAQTNWILVRLWRGCGFGYRYTRLPHLLKTKLEDANLPSLQKPCPSTLLQQHMADLLQQGPDVAPSFLNSVLNQLNWAFSEFIGMIQEIQQAAERLERNFVDSRQLKVCATCFDLSVSLLRVLEMTITLVPEIFLDWTRPTSEMLLRRLAQLLNQVLNRVTAERNLFDRVVTLRLPGLESVDHYPILVAVTGILVQLLVRGPASEREQATSVLLADPCFQLRSICYLLGQPEPPAPGTALPAPDRKRFSLQSYADYISADELAQVEQMLAHLTSASAQAAAASLPTSEEDLCPICYAHPISAVFQPCGHKSCKACINQHLMNNKDCFFCKTTIVSVEDWEKGANTSTTSSAA

SEQ ID NO: 6150 - protein, 905 aa, Homo sapiens
MTSATSPIILKWDPKSLEIRTLTVERLLEPLVTQVTTLVNTSNKGPSGKKKGRSKKAHVLAASVEQATQNFLEKGEQIAKESQDLKEELVAAVEDVRKQGETMRIASSEFADDPCSSVKRGTMVRAARALLSAVTRLLILADMADVMRLLSHLKIVEEALEAVKNATNEQDLANRFKEFGKEMVKLNYVAARRQQELKDPHCRDEMAAARGALKKNATMLYTASQAFLRHPDVAATRANRDYVFKQVQEAIAGISNAAQATSPTDEAKGHTGIGELAAALNEFDNKIILDPMTFSEARFRPSLEERLESIISGAALMADSSCTRDDRRERIVAECNAVRQALQDLLSEYMNNTGRKEKGDPLNIAIDKMTKKTRDLRRQLRKAVMDHISDSFLETNVPLLVLIEAAKSGNEKEVKEYAQVFREHANKLVEVANLACSISNNEEGVKLVRMAATQIDSLCPQVINAALTLAARPQSKVAQDNMDVFKDQWEKQVRVLTEAVDDITSVDDFLSVSENHILEDVNKCVIALQEGDVDTLDRTAGAIRGRAARVIHIINAEMENYEAGVYTEKVLEATKLLSETVMPRFAEQVEVAIEALSANVPQPFEENEFIDASRLVYDGVRDIRKAVLMIRTPEELEDDSDFEQEDYDVRSRTSVQTEDDQLIAGQSARAIMAQLPQEEKAKIAEQVEIFHQEKSKLDAEVAKWDDSGNDIIVLAKQMCMIMMEMTDFTRGKGPLKNTSDVINAAKKIAEAGSRMDKLARAVADQCPDSACKQDLLAYLQRIALYCHQLNICSKVKAEVQNLGGELIVSGLDSATSLIQAAKNLMNAVVLTVKASYVASTKYQKVYGTAAVNSPVVSWKMKAPEKKPLVKREKPEEFQTRVRRGSQKKHISPVQALSEFKAMDSF

SEQ ID NO: 6151 - protein, 953 aa, Homo sapiens
MTSATSPIILKWDPKSLEIRTLTVERLLEPLVTQVTTLVNTSNKGPSGKKKGRSKKAHVLAASVEQATQNFLEKGEQIAKESQDLKEELVAAVEDVRKQGETMRIASSEFADDPCSSVKRGTMVRAARALLSAVTRLLILADMADVMRLLSHLKIVEEALEAVKNATNEQDLANRFKEFGKKMVKLNYVAARRQQELKDPHCRDEMAAARGALKKNATMLYTASQAFLRHPDVAATRANRDYVFKQVQEAIAGISNAAQATSPTDEAKGHTGIGELAAALNEFDNKIILDPMTFSEARFRPSLEERLESIISGAALMADSSCTRDDRRERIVAECNAVRQALQDLLSEYMNNTGRKEKGDPLNIAIDKMTKKTRDLRRQLRKAVMDHISDSFLETNVPLLVLIEAAKSGNEKEVKEYAQVFREHANKLVEVANLACSISNNEEGVKLVRMAATQIDSLCPQVINAALTLAARPQSKVAQDNMDVFKDQWEKQVRVLTEAVDDITSVDDFLSVSENHILEDVNKCVIALQEGDVDTLDRTAGAIRGRAARVIHIINAEMENYEAGVYTEKVLEATKLLSETVMPRFAEQVEVAIEALSANVPQPFEENEFIDASRLVYDGVRDIRKAVLMIRTPEELEDDSDFEQEDYDVRRGTSVQTEDDQLIAGQSARAIMAQLPQEEKAKIAEQVEIFHQEKSKLDAEVAKWDDSGNDIIVLAKQMCMIMMEMTDFTRGKGPLKNTSDVINAAKKIAEAGSRMDKLARAVADQCPDSACKQDLLAYLQRIALYCHQLNICSKVKAEVQNLGGELIVSGTGVQSTFTTFYEVDCDVIDGGRASQLSTHLPTCAEGAPIGSGSSDSSMLDSATSLIQAAKNLMNAVVLTVKASYVASTKYQKVYGTAAVNSPVVSWKMKAPEKKPLVKREKPEEFQTRVRRGSQKKHISPVQALSEFKAMDSF

SEQ ID NO: 6152 - protein, 531 aa, Homo sapiens
MSSEMEPLLLAWSYFRRRKFQLCADLCTQMLEKSPYDQAAWILKARALTEMVYIDEIDVDQEGIAEMMLDENAIAQVPRPGTSLKLPGTNQTGGPSQAVRPITQAGRPITGFLRPSTQSGRPGTMEQAIRTPRTAYTARPITSSSGRFVRLGTASMLTSPDGPFINLSRLNLTKYSQKPKLAKALFEYIFHHENDVKTIHLEDVVLHLGIYPFLLRNKNHIEKNALDLAALSTEHSQYKDWWWKVQIGKCYYRLGMYREAEKQFKSALKQQEMVDTFLYLAKVYVSLDQPVTALNLFKQGLDKFPGEVTLLCGIARIYEEMNNMSSAAEYYKEVLKQDNTHVEAIACIGSNHFYSDQPEIALRFYRRLLQMGIYNGQLFNNLGLCCFYAQQYDMTLTSFERALSLAENEEEAADVWYNLGHVAVGIGDTNLAHQCFRLALVNNNNHAEAYNNLAVLEMRKGHVEQARALLQTASSLAPHMYEPHFNFATISDKIGDLQRSYVAAQKSEAAFPDHVDTQHLIKQLRQHFAML

SEQ ID NO: 6153 - protein, 505 aa, Homo sapiens
MSSEMEPLLLAWSYFRRRKFQLCADLCTQMLEKSPYDQAAWILKARALTEMVYIDEIDVDQEGIAEMMLDENAIAQVPRPGTSLKLPGTNQTGGPSQAVRPITQAGRPITGFLRPSTQSGRPGTMEQAIRTPRTAYTARPITSSSGRFVRLGTASMLTSPDGPFINLSRLNLTKYSQKPKLAKALFEYIFHHENDVKTALDLAALSTEHSQYKDWWWKVQIGKCYYRLGMYREAEKQFKSALKQQEMVDTFLYLAKVYVSLDQPVTALNLFKQGLDKFPGEVTLLCGIARIYEEMNNMSSAAEYYKEVLKQDNTHVEAIACIGSNHFYSDQPEIALRFYRRLLQMGIYNGQLFNNLGLCCFYAQQYDMTLTSFERALSLAENEEEAADVWYNLGHVAVGIGDTNLAHQCFRLALVNNNNHAEAYNNLAVLEMRKGHVEQARALLQTASSLAPHMYEPHFNFATISDKIGDLQRSYVAAQKSEAAFPDHVDTQHLIKQLRQHFAML

SEQ ID NO: 6154 - protein, 800 aa, Homo sapiens
MSSLGASFVQIKFDDLQFFENCGGGSFGSVYRAKWISQDKEVAVKKLLKIEKEAEILSVLSHRNIIQFYGVILEPPNYGIVTEYASLGSLYDYINSNRSEEMDMDHIMTWATDVAKGMHYLHMEAPVKVIHRDLKSRNVVIAADGVLKICDFGASRFHNHTTHMSLVGTFPWMAPEVIQSLPVSETCDTYSYGVVLWEMLTREVPFKGLEGLQVAWLVVEKNERLTIPSSCPRSFAELLHQCWEADAKKRPSFKQIISILESMSNDTSLPDKCNSFLHNKAEWRCEIEATLERLKKLERDLSFKEQELKERERRLKMWEQKLTEQSNTPLLPSFEIGAWTEDDVYCWVQQLVRKGDSSAEMSVYASLFKENNITGKRLLLLEEEDLKDMGIVSKGHIIHFKSAIEKLTHDYINLFHFPPLIKDSGGEPEENEEKIVNLELVFGFHLKPGTGPQDCKWKMYMEMDGDEIAITYIKDVTFNTNLPDAEILKMTKPPFVMEKWIVGIAKSQTVECTVTYESDVRTPKSTKHVHLIQWSRTKPQDEVKAVQLAIQTLFTNSDGNPGSRSDSSADCQWLDTLRMRQIASNTSLQRSQSNPILGSPFFSHFDGQDSYAAAVRRPQVPIKYQQITPVNQSRSSSPTQYGLTKNFSSLHLNSRDSGFSSGNTDTSSERGRYSDRSRNKYGRGSISLNSSPRGRYSGKSQHSTPSRGRYPGKFYRVSQSALNPHQSPDFKRSPRDLHQPNTIPGMPLHPETDSRASEEDSKVSEGGWTKVEYRKKPHRPSPAKTNKERARGDHRGWRNF

SEQ ID NO: 6155 - protein, 455 aa, Homo sapiens
MSSLGASFVQIKFDDLQFFENCGGGSFGSVYRAKWISQDKEVAVKKLLKIEKEAEILSVLSHRNIIQFYGVILEPPNYGIVTEYASLGSLYDYINSNRSEEMDMDHIMTWATDVAKGMHYLHMEAPVKVIHRDLKSRNVVIAADGVLKICDFGASRFHNHTTHMSLVGTFPWMAPEVIQSLPVSETCDTYSYGVVLWEMLTREVPFKGLEGLQVAWLVVEKNERLTIPSSCPRSFAELLHQCWEADAKKRPSFKQIISILESMSNDTSLPDKCNSFLHNKAEWRCEIEATLERLKKLERDLSFKEQELKERERRLKMWEQKLTEQSNTPLLLPLAARMSEESYFESKTEESNSAEMSCQITATSNGEGHGMNPSLQAMMLMGFGDIFSMNKAGAVMHSGMQINMQAKQNSSKTTSKRRGKKVNMALGFSDFDLSEGDDDDDDDGEEEDNDMDNSE

SEQ ID NO: 6156 - protein, 800 aa, Homo sapiens
  VARIANT 346: Xaa = Any Amino Acid
MSSLGASFVQIKFDDLQFFENCGGGSFGSVYRAKWISQDKEVAVKKLLKIEKEAEILSVLSHRNIIQFYGVILEPPNYGIVTEYASLGSLYDYINSNRSEEMDMDHIMTWATDVAKGMHYLHMEAPVKVIHRDLKSRNVVIAADGVLKICDFGASRFHNHTTHMSLVGTFPWMAPEVIQSLPVSETCDTYSYGVVLWEMLTREVPFKGLEGLQVAWLVVEKNERLTIPSSCPRSFAELLHQCWEADAKKRPSFKQIISILESMSNDTSLPDKCNSFLHNKAEWRCEIEATLERLKKLERDLSFKEQELKERERRLKMWEQKLTEQSNTPLLPSFEIGAWTEDDVYXWVQQLVRKGDSSAEMSVYASLFKENNITGKRLLLLEEEDLKDMGIVSKGHIIHFKSAIEKLTHDYINLFHFPPLIKDSGGEPEENEEKIVNLELVFGFHLKPGTGPQDCKWKMYMEMDGDEIAITYIKDVTFNTNLPDAEILKMTKPPFVMEKWIVGIAKSQTVECTVTYESDVRTPKSTKHVHLIQWSRTKPQDEVKAVQLAIQTLFTNSDGNPGSRSDSSADCQWLDTLRMRQIASNTSLQRSQSNPILGSPFFSHFDGQDSYAAAVRRPQVPIKYQQITPVNQSRSSSPTQYGLTKNFSSLHLNSRDSGFSSGNTDTSSERGRYSDRSRNKYGRGSISLNSSPRGRYSGKSQHSTPSRGRYPGKFYRVSQSALNPHQSPDFKRSPRDLHQPNTIPGMPLHPETDSRASEEDSKVSEGGWTKVEYRKKPHRPSPAKTNKERARGDHRGWRNF

SEQ ID NO: 6157 - protein, 312 aa, Homo sapiens
MSSLGASFVQIKFDDLQFFENCGGGSFGSVYRAKWISQDKEVAVKKLLKIEKEAEILSVLSHRNIIQFYGVILEPPNYGIVTEYASLGSLYDYINSNRSEEMDMDHIMTWATDVAKGMHYLHMEAPVKVIHRDLKSRNVVIAADGVLKICDFGASRFHNHTTHMSLVGTFPWMAPEVIQSLPVSETCDTYSYGVVLWEMLTREVPFKGLEGLQVAWLVVEKNERLTIPSSCPRSFAELLHQCWEADAKKRPSFKQIISILESMSNDTSLPDKCNSFLHNKAEWRWVAPTAGHSVWLSKTITRLNEEVNQRSE

SEQ ID NO: 6158 - protein, 348 aa, Homo sapiens
MYTAIPQSGSPFPGSVQDPGLHVWRVEKLKPVPVAQENQGVFFSGDSYLVLHNGPEEVSHLHLWIGQQSSRDEQGACAVLAVHLNTLLGERPVQHREVQGNESDLFMSYFPRGLKYQEGGVESAFHKTSTGAPAAIKKLYQVKGKKNIRATERALNWDSFNTGDCFILDLGQNIFAWCGGKSNILERNKARDLALAIRDSERQGKAQVEIVTDGEEPAEMIQVLGPKPALKEGNPEEDLTADKANAQAAALYKVSDATGQMNLTKVADSSPFALELLISDDCFVLDNGLCGKIYIWKGRKANEKERQAALQVAEGFISRMQYAPNTQVEILPQGRESPIFKQFFKDWK

SEQ ID NO: 6159 - protein, 374 aa, Homo sapiens
MIEDSGKRGNTMAERRQLFAEMRAQDLDRIRLSTYRTACKLRFVHKKCNLHLVDIWNVIEALRENALNNLDPNTELNVSRLEAVLSTIFYQLNKRMPTTHQIHVEQSISLLLNFLLAAFDPEGHGKISVFAVKMALATLCGGKIMDKLRYIFSMISDSSGVMVYGRYDQFLREVLKLPTEVLEGPSFGYTEQSARSCFSQQKKVTLNGFLDTLMSDPPPQCLVWLPLLHRLANVENVFHPVECSYCHSESMMGFRYRCQQCHNYQLCQDCFWRGHAGGSHSNQHQMKEYTSWKSPAKKLTNALSKSLSCASSREPLHPMFPDQPEKPLNLAHIVDTWPPRPVTSMNDTLFSHSVPSSGSPFITRSSDGAFGGCV

SEQ ID NO: 6160 - protein, 570 aa, Homo sapiens
MIEDSGKRGNTMAERRQLFAEMRAQDLDRIRLSTYRTACKLRFVHKKCNLHLVDIWNVIEALRENALNNLDPNTELNVSRLEAVLSTIFYQLNKRMPTTHQIHVEQSISLLLNFLLAAFDPEGHGKISVFAVKMALATLCGGKIMDKLRYIFSMISDSSGVMVYGRYDQFLREVLKLPTEVLEGPSFGYTEQSARSCFSQQKKVTLNGFLDTLMSDPPPQCLVWLPLLHRLANVENVFHPVECSYCHSESMMGFRYRCQQCHNYQLCQDCFWRGHAGGSHSNQHQMKEYTSWKSPAKKLTNALSKSLSCASSREPLHPMFPDQPEKPLNLAHIVDTWPPRPVTSMNDTLFSHSVPSSGSPFITRSSPPKDSEVEQNKLLARAAPAFLKGKGIQYSLNVADRLADEHVLIGLYVNMLRNNPSCMLESSNRLDEEHRLIARYAARLAAESSSSQPPQQRSAPDISFTIDANKQQRQLIAELENKNREILQEIQRLRLEHEQASQPTPEKAQQNPTLLAELRLLRQRKDELEQRMSALQESRRELMVQLEGLMKLLKEEELKQGVSYVPYCRS

SEQ ID NO: 6161 - protein, 686 aa, Homo sapiens
MIEDSGKRGNTMAERRQLFAEMRAQDLDRIRLSTYRTACKLRFVHKKCNLHLVDIWNVIEALRENALNNLDPNTELNVSRLEAVLSTIFYQLNKRMPTTHQIHVEQSISLLLNFLLAAFDPEGHGKISVFAVKMALATLCGGKIMDKLRYIFSMISDSSGVMVYGRYDQFLREVLKLPTEVLEGPSFGYTEQSARSCFSQQKKVTLNGFLDTLMSDPPPQCLVWLPLLHRLANVENVFHPVECSYCHSESMMGFRYRCQQCHNYQLCQDCFWRGHAGGSHSNQHQMKEYTSWKSPAKKLTNALSKSLSCASSREPLHPMFPDQPEKPLNLAHIVDTWPPRPVTSMNDTLFSHSVPSSGSPFITRSMLESSNRLDEEHRLIARYAARLAAESSSSQPPQQRSAPDISFTIDANKQQRQLIAELENKNREILQEIQRLRLEHEQASQPTPEKAQQNPTLLAELRLLRQRKDELEQRMSALQESRRELMVQLEGLMKLLKTQGAGSPRSSPSHTISRPIPMPIRSASACSTPTHTPQDSLTGVGGDVQEAFAQSSRRNLRNDLLVAADSITNTMSSLVKELNSEVGSETESNVDSEFARTQFEDLVPSPTSEKAFLAQIHARKPGYIHSGATTSTMRGDMVTEDADPYVQPEDENYENDSVRQLENELQMEEYLKQKLQDEAYQVSLQG

SEQ ID NO: 6162 - protein, 513 aa, Homo sapiens
MIEDSGKRGNTMAERRQLFAEMRAQDLDRIRLSTYRTACKLRFVHKKCNLHLVDIWNVIEALRENALNNLDPNTELNVSRLEAVLSTIFYQLNKRMPTTHQIHVEQSISLLLNFLLAAFDPEGHGKISVFAVKMALATLCGGKIMDKLRYIFSMISDSSGVMVYGRYDQFLREVLKLPTEVLEGPSFGYTEQSARSCFSQQKKVTLNGFLDTLMSDPPPQCLVWLPLLHRLANVENVFHPVECSYCHSESMMGFRYRCQQCHNYQLCQDCFWRGHAGGSHSNQHQMKEYTSWKSPAKKLTNALSKSLSCASSREPLHPMFPDQPEKPLNLAHIVDTWPPRPVTSMNDTLFSHSVPSSGSPFITRSMLESSNRLDEEHRLIARYAARLAAESSSSQPPQQRSAPDISFTIDANKQQRQLIAELENKNREILQEIQRLRLEHEQASQPTPEKAQQNPTLLAELRLLRQRKDELEQRMSALQESRRELMVQLEGLMKLLKEEELKQGVSYVPYCRS

SEQ ID NO: 6163 - protein, 743 aa, Homo sapiens
MIEDSGKRGNTMAERRQLFAEMRAQDLDRIRLSTYRTACKLRFVHKKCNLHLVDIWNVIEALRENALNNLDPNTELNVSRLEAVLSTIFYQLNKRMPTTHQIHVEQSISLLLNFLLAAFDPEGHGKISVFAVKMALATLCGGKIMDKLRYIFSMISDSSGVMVYGRYDQFLREVLKLPTEVLEGPSFGYTEQSARSCFSQQKKVTLNGFLDTLMSDPPPQCLVWLPLLHRLANVENVFHPVECSYCHSESMMGFRYRCQQCHNYQLCQDCFWRGHAGGSHSNQHQMKEYTSWKSPAKKLTNALSKSLSCASSREPLHPMFPDQPEKPLNLAHIVDTWPPRPVTSMNDTLFSHSVPSSGSPFITRSSPPKDSEVEQNKLLARAAPAFLKGKGIQYSLNVADRLADEHVLIGLYVNMLRNNPSCMLESSNRLDEEHRLIARYAARLAAESSSSQPPQQRSAPDISFTIDANKQQRQLIAELENKNREILQEIQRLRLEHEQASQPTPEKAQQNPTLLAELRLLRQRKDELEQRMSALQESRRELMVQLEGLMKLLKTQGAGSPRSSPSHTISRPIPMPIRSASACSTPTHTPQDSLTGVGGDVQEAFAQSSRRNLRNDLLVAADSITNTMSSLVKELNSEVGSETESNVDSEFARTQFEDLVPSPTSEKAFLAQIHARKPGYIHSGATTSTMRGDMVTEDADPYVQPEDENYENDSVRQLENELQMEEYLKQKLQDEAYQVSLQG

SEQ ID NO: 6164 - protein, 567 aa, Homo sapiens
MIEDSGKRGNTMAERRQLFAEMRAQDLDRIRLSTYRTACKLRFVHKKCNLHLVDIWNVIEALRENALNNLDPNTELNVSRLEAVLSTIFYQLNKRMPTTHQIHVEQSISLLLNFLLAAFDPEGHGKISVFAVKMALATLCGGKIMDKLRYIFSMISDSSGVMVYGRYDQFLREVLKLPTEVLEGPSFGYTEQSARSCFSQQKKVTLNGFLDTLMSDPPPQCLVWLPLLHRLANVENVFHPVECSYCHSESMMGFRYRCQQCHNYQLCQDCFWRGHAGGSHSNQHQMKEYTSWKSPAKKLTNALSKSLSCASSREPLHPMFPDQPEKPLNLAHIVPPRPVTSMNDTLFSHSVPSSGSPFITRSSPPKDSEVEQNKLLARAAPAFLKGKGIQYSLNVADRLADEHVLIGLYVNMLRNNPSCMLESSNRLDEEHRLIARYAARLAAESSSSQPPQQRSAPDISFTIDANKQQRQLIAELENKNREILQEIQRLRLEHEQASQPTPEKAQQNPTLLAELRLLRQRKDELEQRMSALQESRRELMVQLEGLMKLLKEEELKQGVSYVPYCRS

SEQ ID NO: 6165 - protein, 640 aa, Homo sapiens
MDRRIENRMGTPAHRRRVVHTHRHTRNRLSCPWPPPFTSPTLTPGILLGTITLITELCERSPAALRHFRKVVPQLVHILRTLVTMGYSTEHSISGVSDPFLQVQILRLLRILGRNHEESSETMNDLLAQVATNTDTSRNAGNAVLFETVLTIMDIRSAAGLRVLAVNILGRFLLNSDRNIRYVALTSLLRLVQSDHSAVQRHRPTVVECLRETDASLSRRALELSLALVNSSNVRAMMQELQAFLESCPPDLRADCASGILLAAERFAPTKRWHIDTILHVLTTAGTHVRDDAVANLTQLIGGAQELHAYSVRRLYNALAEDISQQPLVQVAAWCIGEYGDLLLAGNCEEIEPLQVDEEEVLALLEKVLQSHMSLPATRGYALTALMKLSTRLCGDNNRIRQVVSIYGSCLDVELQQRAVEYDTLFRKYDHMRAAILEKMPLVERDGPQADEEAKESKEAAQLSEAAPVPTEPQASQLLDLLDLLDGASGDVQHPPHLDPSPGGALVHLLDLPCVPPPPAPIPDLKVFEREGVQLNLSFIRPPENPALLLITITATNFSEGDVTHFICQAAVPKSLQLQLQAPSGNTVPARGGLPITQLFRILNPNKAPLRLKLRLTYDHFHQSVQEIFEVNNLPVESWQ

SEQ ID NO: 6166 - protein, 785 aa, Homo sapiens
MVVPSLKLQDLIEEIRGAKTQAQEREVIQKECAHIRASFRDGDPVHRHRQLAKLLYVHMLGYPAHFGQMECLKLIASSRFTDKRVGYLGAMLLLDERHDAHLLITNSIKNDLSQGIQPVQGLALCTLSTMGSAEMCRDLAPEVEKLLLQPSPYVRKKAILTAVHMIRKVPELSSVFLPPCAQLLHERHHGILLGTITLITELCERSPAALRHFRKVVPQLVHILRTLVTMGYSTEHSISGVSDPFLQVQILRLLRILGRNHEESSETMNDLLAQVATNTDTSRNAGNAVLFETVLTIMDIRSAAGLRVLAVNILGRFLLNSDRNIRYVALTSLLRLVQSDHSAVQRHRPTVVECLRETDASLSRRALELSLALVNSSNVRAMMQELQAFLESCPPDLRADCASGILLAAERFAPTKRWHIDTILHVLTTAGTHVRDDAVANLTQLIGGAQELHAYSVRRLYNALAEDISQQPLVQVAAWCIGEYGDLLLAGNCEEIEPLQVDEEEVLALLEKVLQSHMSLPATRGYALTALMKLSTRLCGDNNRIRQVVSIYGSCLDVELQQRAVEYDTLFRKYDHMRAAILEKMPLVERDGPQADEEAKESKEAAQLSEAAPVPTEPQASQLLDLLDLLDGASGDVQHPPHLDPSPGGALVHLLDLPCVPPPPAPIPDLKVFEREGVQLNLSFIRPPENPALLLITITATNFSEGDVTHFICQAAVPKSLQLQLQAPSGNTVPARGGLPITQLFRILNPNKAPLRLKLRLTYDHFHQSVQEIFEVNNLPVESWQ

SEQ ID NO: 6167 - protein, 2002 aa, Homo sapiens
MEQDRTNHVEGNRLSPFLIPSPPICQTEPLATKLQNGSPLPERAHPEVNGDTKWHSFKSYYGIPCMKGSQNSRVSPDFTQESRGYSKCLQNGGIKRTVSEPSLSGLLQIKKLKQDQKANGERRNFGVSQERNPGESSQPNVSDLSDKKESVSSVAQENAVKDFTSFSTHNCSGPENPELQILNEQEGKSANYHDKNIVLLKNKAVLMPNGATVSASSVEHTHGELLEKTLSQYYPDCVSIAVQKTTSHINAINSQATNELSCEITHPSHTSGQINSAQTSNSELPPKPAAVVSEACDADDADNASKLAAMLNTCSFQKPEQLQQQKSVFEICPSPAENNIQGTTKLASGEEFCSGSSSNLQAPGGSSERYLKQNEMNGAYFKQSSVFTKDSFSATTTPPPPSQLLLSPPPPLPQVPQLPSEGKSTLNGGVLEEHHHYPNQSNTTLLREVKIEGKPEAPPSQSPNPSTHVCSPSPMLSERPQNNCVNRNDIQTAGTMTVPLCSEKTRPMSEHLKHNPPIFGSSGELQDNCQQLMRNKEQEILKGRDKEQTRDLVPPTQHYLKPGWIELKAPRFHQAESHLKRNEASLPSILQYQPNLSNQMTSKQYTGNSNMPGGLPRQAYTQKTTQLEHKSQMYQVEMNQGQSQGTVDQHLQFQKPSHQVHFSKTDHLPKAHVQSLCGTRFHFQQRADSQTEKLMSPVLKQHLNQQASETEPFSNSHLLQHKPHKQAAQTQPSQSSHLPQNQQQQQKLQIKNKEEILQTFPHPQSNNDQQREGSFFGQTKVEECFHGENQYSKSSEFETHNVQMGLEEVQNINRRNSPYSQTMKSSACKIQVSCSNNTHLVSENKEQTTHPELFAGNKTQNLHHMQYFPNNVIPKQDLLHRCFQEQEQKSQQASVLQGYKNRNQDMSGQQAAQLAQQRYLIHNHANVFPVPDQGGSHTQTPPQKDTQKHAALRWHLLQKQEQQQTQQPQTESCHSQMHRPIKVEPGCKPHACMHTAPPENKTWKKVTKQENPPASCDNVQQKSIIETMEQHLKQFHAKSLFDHKALTLKSQKQVKVEMSGPVTVLTRQTTAAELDSHTPALEQQTTSSEKTPTKRTAASVLNNFIESPSKLLDTPIKNLLDTPVKTQYDFPSCRCVEQIIEKDEGPFYTHLGAGPNVAAIREIMEERFGQKGKAIRIERVIYTGKEGKSSQGCPIAKWVVRRSSSEEKLLCLVRERAGHTCEAAVIVILILVWEGIPLSLADKLYSELTETLRKYGTLTNRRCALNEERTCACQGLDPETCGASFSFGCSWSMYYNGCKFARSKIPRKFKLLGDDPKEEEKLESHLQNLSTLMAPTYKKLAPDAYNNQIEYEHRAPECRLGLKEGRPFSGVTACLDFCAHAHRDLHNMQNGSTLVCTLTREDNREFGGKPEDEQLHVLPLYKVSDVDEFGSVEAQEEKKRSGAIQVLSSFRRKVRMLAEPVKTCRQRKLEAKKAAAEKLSSLENSSNKNEKEKSAPSRTKQTENASQAKQLAELLRLSGPVMQQSQQPQPLQKQPPQPQQQQRPQQQQPHHPQTESVNSYSASGSTNPYMRRPNPVSPYPNSSHTSDIYGSTSPMNFYSTSSQAAGSYLNSSNPMNPYPGLLNQNTQYPSYQCNGNLSVDNCSPYLGSYSPQSQPMDLYRYPSQDPLSKLSLPPIHTLYQPRFGNSQSFTSKYLGYGNQNMQGDGFSSCTIRPNVHHVGKLPPYPTHEMDGHFMGATSRLPPNLSNPNMDYKNGEHHSPSHIIHNYSAAPGMFNSSLHALHLQNKENDMLSHTANGLSKMLPALNHDRTACVQGGLHKLSDANGQEKQPLALVQGVASGAEDNDEVWSDSEQSFLDPDIGGVAVAPTHGSILIECAKRELHATTPLKNPNRNHPTRISLVFYQHKSMNEPKHGLALWEAKMAEKAREKEEECEKYGPDYVPQKSHGKKVKREPAEPHETSEPTYLRFIKSLAERTMSVTTDSTVTTSPYAFTRVTGPYNRYI

SEQ ID NO: 6168 - protein, 2946 aa, Homo sapiens
MASEKPGPGPGLEPQPVGLIAVGAAGGGGGGSGGGGTGGSGMGELRGASGSGSVMLPAGMINPSVPIRNIRMKFAVLIGLIQVGEVSNRDIVETVLNLLVGGEFDLEMNFIIQDAESITCMTELLEHCDVTCQAEIWSMFTAILRKSVRNLQTSTEVGLIEQVLLKMSAVDDMIADLLVDMLGVLASYSITVKELKLLFSMLRGESGIWPRHAVKLLSVLNQMPQRHGPDTFFNFPGCSAAAIALPPIAKWPYQNGFTLNTWFRMDPLNNINVDKDKPYLYCFRTSKGVGYSAHFVGNCLIVTSLKSKGKGFQHCVKYDFQPRKWYMISIVHIYNRWRNSEIRCYVNGQLVSYGDMAWHVNTNDSYDKCFLGSSETADANRVFCGQLGAVYVFSEALNPAQIFAIHQLGPGYKSTFKFKSESDIHLAEHHKQVLYDGKLASSIAFTYNAKATDAQLCLESSPKENASIFVHSPHALMLQDVKAIVTHSIHSAIHSIGGIQVLFPLFAQLDNRQLNDSQVETTVCATLLAFLVELLKSSVAMQEQMLGGKGFLVIGYLLEKSSRVHITRAVLEQFLSFAKYLDGLSHGAPLLKQLCDHILFNPAIWIHTPAKVQLSLYTYLSAEFIGTATIYTTIRRVGTVLQLMHTLKYYYWVINPADSSGITPKGLDGPRPSQKEIISLRAFMLLFLKQLILKDRGVKEDELQSILNYLLTMHEDENIHDVLQLLVALMSEHPASMIPAFDQRNGIRVIYKLLASKSESIWVQALKVLGYFLKHLGHKRKVEIMHTHSLFTLLGERLMLHTNTVTVTTYNTLYEILTEQVCTQVVHKPHPEPDSTVKIQNPMILKVVATLLKNSTPSAELMEVRRLFLSDMIKLFSNSRENRRCLLQCSVWQDWMFSLGYINPKNSEEQKITEMVYNIFRILLYHAIKYEWGGWRVWVDTLSIAHSKVTYEAHKEYLAKMYEEYQRQEEENIKKGKKGNVSTISGLSSQTTGAKGGMEIREIEDLSQSQSPESETDYPVSTDTRDLLMSTKVSDDILGNSDRPGSGVHVEVHDLLVDIKAEKVEATEVKLDDMDLSPETLVGGENGALVEVESLLDNVYSAAVEKLQNNVHGSVGIIKKNEEKDNGPLITLADEKEDLPNSSTSFLFDKIPKQEEKLLPELSSNHIIPNIQDTQVHLGVSDDLGLLAHMTGSVDLTCTSSIIEEKEFKIHTTSDGMSSISERDLASSTKGLEYAEMTATTLETESSSSKIVPNIDAGSIISDTERSDDGKESGKEIRKIQTTTTTQAVQGRSITQQDRDLRVDLGFRGMPMTEEQRRQFSPGPRTTMFRIPEFKWSPMHQRLLTDLLFALETDVHVWRSHSTKSVMDFVNSNENIIFVHNTIHLISQMVDNIIIACGGILPLLSAATSPTGSKTELENIEVTQGMSAETAVTFLSRLMAMVDVLVFASSLNFSEIEAEKNMSSGGLMRQCLRLVCCVAVRNCLECRQRQRDRGNKSSHGSSKPQEVPQSVTATAASKTPLENVPGNLSPIKDPDRLLQDVDINRLRAVVFRDVDDSKQAQFLALAVVYFISVLMVSKYRDILEPQRETTRTGSQPGRNIRQEINSPTSTVVVIPSIPHPSLNHGFLAKLIPEQSFGHSFYKETPAAFPDTIKEKETSTPGEDIQVESSIPHTDSGIGEEQVASILNGAELETSTGPDAMSELLSTLSSEVKKSQESLTENPSETLKPATSISSISQTKGINVKEILKSLVAAPVEIAECGPEPIPYPDPALKRETQAILPMQFHSFDRSVVVPVKKPPPGSLAVTTVGATTAGSGLPTGSTSNIFAATGATPKSMINTTGAVDSGSSSSSSSSSFVNGATSKNLPAVQTVAPMPEDSAENMSITAKLERALEKVAPLLREIFVDFAPFLSRTLLGSHGQELLIEGLVCMKSSTSVVELVMLLCSQEWQNSIQKNAGLAFIELINEGRLLCHAMKDHIVRVANEAEFILNRQRAEDVHKHAEFESQCAQYAADRREEEKMCDHLISAAKHRDHVTANQLKQKILNILTNKHGAWGAVSHSQLHDFWRLDYWEDDLRRRRRFVRNAFGSTHAEALLKAAIEYGTEEDVVKSKKTFRSQAIVNQNAETELMLEGDDDAVSLLQEKEIDNLAGPVVLSTPAQLIAPVVVAKGTLSITTTEIYFEVDEDDSAFKKIDTKVLAYTEGLHGKWMFSEIRAVFSRRYLLQNTALEVFMANRTSVMFNFPDQATVKKVVYSLPRVGVGTSYGLPQARRISLATPRQLYKSSNMTQRWQRREISNFEYLMFLNTIAGRTYNDLNQYPVFPWVLTNYESEELDLTLPGNFRDLSKPIGALNPKRAVFYAERYETWEDDQSPPYHYNTHYSTATSTLSWLVRIEPFTTFFLNANDGKFDHPDRTFSSVARSWRTSQRDTSDVKELIPEFYYLPEMFVNSNGYNLGVREDEVVVNDVDLPPWAKKPEDFVRINRMALESEFVSCQLHQWIDLIFGYKQRGPEAVRALNVFHYLTYEGSVNLDSITDPVLREAMEAQIQNFGQTPSQLLIEPHPPRSSAMHLCFLPQSPLMFKDQMQQDVIMVLKFPSNSPVTHVAANTLPHLTIPAVVTVTCSRLFAVNRWHNTVGLRGAPGYSLDQAHHLPIEMDPLIANNSGVNKRQITDLVDQSIQINAHCFVVTADNRYILICGFWDKSFRVYSTETGKLTQIVFGHWDVVTCLARSESYIGGDCYIVSGSRDATLLLWYWSGRHHIIGDNPNSSDYPAPRAVLTGHDHEVVCVSVCAELGLVISGAKEGPCLVHTITGDLLRALEGPENCLFPRLISVSSEGHCIIYYERGRFSNFSINGKLLAQMEINDSTRAILLSSDGQNLVTGGDNGVVEVWQACDFKQLYIYPGCDAGIRAMDLSHDQRTLITGMASGSIVAFNIDFNRWHYEHQNRY

SEQ ID NO: 6169 - protein, 2174 aa, Homo sapiens
MSASFVPNGASLEDCHCNLFCLADLTGIKWKKYVWQGPTSAPILFPVTEEDPILSSFSRCLKADVLGVWRRDQRPGRRELWIFWWGEDPVLLTLFTMTYQKKKMECGRMDFPMNAVLCFSKAVHNLLERCLMNRNFVRIGKWFVKPYEKDEKPINKSEHLSCSFTFFLHGDSNVCTSVEINQHQPVYLLSEEHITLAQQSNSPFQVILCPFGLNGTLTGQAFKMSDSATKKLIGEWKQFYPISCCLKEMSEEKQEDMDWEDDSLAAVEVLVAGVRMIYPACFVLVPQSDIPTPSPVGSTHCSSSCLGVHQVPASTRDPAMSSVTLTPPTSPEEVQTVDPQSVQKWVKFSSVSDGFNSDSTSHHGGKIPRKLANHVVDRVWQECNMNRAQNKKKYSASSGGLCEEATAAKVASWDFVEATQRTNCSCLRHKNLKSRNAGQQGQAPSLGQQQQILPKHKTNEKQEKSEEPQKRPLTPFHHRVSVSDDVGMDADSASQRLVISAPDSQVRFSNIRTNDVAKTPQMHGTEMANSPQPPPLSPHPCDVVDEGVTKTPSTPQSQHFYQMPTPDPLVPSKPMEDRIDSLSQSFPPQYQEAVEPTVYVGTAVNLEEDEANIAWKYYKFPKKKDVEFLPPQLPSDKFKDDPVGPFGQESVTSVTELMVQCKKPLKVSDELVQQYQIKNQCLSAIASDAEQEPKIDPYAFVEGDEEFLFPDKKDRQNSEREAGKKHKVEDGTSSVTVLSHEEDAMSLFSPSIKQDAPRPTSHARPPSTSLIYDSDLAVSYTDLDNLFNSDEDELTPGSKRSANGSDDKASCKESKTGNLDPLSCISTADLHKMYPTPPSLEQHIMGFSPMNMNNKEYGSMDTTPGGTVLEGNSSSIGAQFKIEVDEGFCSPKPSEIKDFSYVYKPENCQILVGCSMFAPLKTLPSQYLPLIKLPEECIYRQSWTVGKLELLSSGPSMPFIKEGDGSNMDQEYGTAYTPQTHTSCGMPPSSAPPSNSGAGILPSPSTPRFPTPRTPRTPRTPRGAGGPASAQGSVKYENSDLYSPASTPSTCRPLNSVEPATVPSIPEAHSLYVNLILSESVMNLFKDCNSDSCCICVCNMNIKGADVGVYIPDPTQEAQYRCTCGFSAVMNRKFGNNSGLFLEDELDIIGRNTDCGKEAEKRFEALRATSAEHVNGGLKESEKLSDDLILLLQDQCTNLFSPFGAADQDPFPKSGVISNWVRVEERDCCNDCYLALEHGRQFMDNMSGGKVDEALVKSSCLHPWSKRNDVSMQCSQDILRMLLSLQPVLQDAIQKKRTVRPWGVQGPLTWQQFHKMAGRGSYGTDESPEPLPIPTFLLGYDYDYLVLSPFALPYWERLMLEPYGSQRDIAYVVLCPENEALLNGAKSFFRDLTAIYESCRLGQHRPVSRLLTDGIMRVGSTASKKLSEKLVAEWFSQAADGNNEAFSKLKLYAQVCRYDLGPYLASLPLDSSLLSQPNLVAPTSQSLITPPQMTNTGNANTPSATLASAASSTMTVTSGVAISTSVATANSTLTTASTSSSSSSNLNSGVSSNKLPSFPPFGSMNSNAAGSMSTQANTVQSGQLGGQQTSALQTAGISGESSSLPTQPHPDVSESTMDRDKVGIPTDGDSHAVTYPPAIVVYIIDPFTYENTDESTNSSSVWTLGLLRCFLEMVQTLPPHIKSTVSVQIIPCQYLLQPVKHEDREIYPQHLKSLAFSAFTQCRRPLPTSTNVKTLTGFGPGLAMETALRSPDRPECIRLYAPPFILAPVKDKQTELGETFGEAGQKYNVLFVGYCLSHDQRWILASCTDLYGELLETCIINIDVPNRARRKKSSARKFGLQKLWEWCLGLVQMSSLPWRVVIGRLGRIGHGELKDWSCLLSRRNLQSLSKRLKDMCRMCGISAADSPSILSACLVAMEPQGSFVIMPDSVSTGSVFGRSTTLNMQTSQLNTPQDTSCTHILVFPTSASVQVASATYTTENLDLAFNPNNDGADGMGIFDLLDTGDDLDPDIINILPASPTGSPVHSPGSHYPHGGDAGKGQSTDRLLSTEPHEEVPNILQQPLALGYFVSTAKAGPLPDWFWSACPQAQYQCPLFLKASLHLHVPSVQSDELLHSKHSHPLDSNQTSDVLRFVLEQYNALSWLTCDPATQDRRSCLPIHFVVLNQLYNFIMNML

SEQ ID NO: 6170 - protein, 433 aa, Homo sapiens
MPCGKQGNLQVPGSKVLPGLGEGCKEMWLRKVIYGGEVWGKSPEPEFPSLVNLCQSWKINNLMSTVHSDEAGMLSYFLFEELMRCDKDSMPDGNLSEEEKLFLSYFPLHKFELEQNIKELNTLADQVDTTHELLTKTSLVASSSGAVSGVMNILGLALAPVTAGGSLMLSATGTGLGAAAAITNIVTNVLENRSNSAARDKASRLGPLTTSHEAFGGINWSEIEAAGFCVNKCVKAIQGIKDLHAYQMAKSNSGFMAMVKNFVAKRHIPFWTARGVQRAFEGTTLAMTNGAWVMGAAGAGFLLMKDMSSFLQSWKHLEDGARTETAEELRALAKKLEQELDRLTQHHRHLPQKASQTCSSSRGRAVRGSRVVKPEGSRSPLPWPVVEHQPRLGPGVALRTPKRTVSAPRMLGHQPAPPAPARKGRQAPGRHRQ

SEQ ID NO: 6171 - protein, 527 aa, Homo sapiens
MAPERLRSRALSAFKLRGLLLRGEAIKYLTEALQSISELELEDKLEKIINAVEKQPLSSNMIERSVVEAAVQECSQSVDETIEHVFNIIGAFDIPRFVYNSERKKFLPLLMTNHPAPNLFGTPRDKAEMFRERYTILHQRTHRHELFTPPVIGSHPDESGSKFQLKTIETLLGSTTKIGDAIVLGMITQLKEGKFFLEDPTGTVQLDLSKAQFHSGLYTEACFVLAEGWFEDQVFHVNAFGFPPTEPSSTTRAYYGNINFFGGPSNTSVKTSAKLKQLEEENKDAMFVFLSDVWLDQVEVLEKLRIMFAGYSPAPPTCFILCGNFSSAPYGKNQVQALKDSLKTLADIICEYPDIHQSSRFVFVPGPEDPGFGSILPRPPLAESITNEFRQRVPFSVFTTNPCRIQYCTQEITVFREDLVNKMCRNCVRFPSSNLAIPNHFVKTILSQGHLTPLPLYVCPVYWAYDYALRVYPVPDLLVIADKYDPFTTTNTECLCINPGSFPRSGFSFKVFYPSNKTVEDSKLQGF

SEQ ID NO: 6172 - protein, 571 aa, Homo sapiens
LGRRSGTPGWAGPDSSRDPAPQDQTVPLRGEAGEEESGLGAVRAALQNGVGAAVDRPLRPENCWEAVARGGTQMLEEGVLPSPGPALPQEENTGEEGMAAGLLTAGPRGSTFFSSVTVAFAQERWRCLVSTPRDRFKEGIPGKSRSLVLLGLPVSQPGMNSQLEQREGAWMLEGEDLRSPSPGWKIISGSPPEQALSEASFQDPCVEMPPGDSDHGTSDLEKSFNLRPVLSPQQRVPVEARPRKCETHTESFKNSEILKPHRAKPYACNECGKAFSYCSSLSQHQKSHTGEKPYECSECGKAFSQSSSLIQHQRIHTGEKPYKCSECGRAFSQNANLTKHQRTHTGEKPYRCSECEKAFSDCSALVQHQRIHTGEKPYECSDCGKAFRHSANLTNHQRTHTGEKPYKCSECGKAFSYCAAFIQHQRIHTGEKPYRCAACGKAFSQSANLTNHQRTHTGEKPYKCSECGKAFSQSTNLIIHQKTHTGEKPYKCNECGKFFSESSALIRHHIIHTGEKPYECNECGKAFNQSSSLSQHQRIHTGVKPYECSECGKAFRCSSAFVRHQRLHAGE

SEQ ID NO: 6173 - protein, 478 aa, Homo sapiens
  VARIANT 158, 227, 255, 276, 382, 446: Xaa = Any Amino Acid
MGSALTAMFLSGKPHLVSKFSSQAEHGSLSISPRHLWDSDTESRSHTPKALLNPGGSMGLKTETGNDAKGGIPIYSFDLRGPETKECNSADHIKFQDSQHTTHLMIPSNSVAHSSSIPSHSQTIAQSPHLLGRHQPKWCMCVQAAEAVLKGMLGSEMXGQNVSNPAPSPSLSGVSWPDNVPKIPDDGNFSLGKEVFGVLGKTAPLPCGEHPQQEDDMGFRSFFPISXGPNCNRVWQNLSEPIRPNRRTNSQLSHXPPLPFNPSRNPISLNTASAVXHGLRQGPLNKSGACSQVCSLDVNSLKSPTLHSPVQSTIWDLPSGNLKFPQVPSYLVGLMANPDAVASIKLHHLELVVNSNENAPPTPSPNLSLIKNMPGIGINNTXNLQILDPDSMIPMTTLQLSGNNLATSHSNLTPFLNATEPSILPHSAPMGPALMSHNPMISHESXEPWLMSNQTVNYFPQGKISGHKQCQGFCRWRR

SEQ ID NO: 6174 - protein, 1131 aa, Homo sapiens
MAPPSEETPLIPQRSCSLLSTEAGALHVLLPARAPGPPQRLSFSFGDHLAEDLCVQAAKASGILPVYHSLFALATEDLSCWFPPSHIFSVEDASTQVLLYRIRFYFPNWFGLEKCHRFGLRKDLASAILDLPVLEHLFAQHRSDLVSGRLPVGLSLKEQGECLSLAVLDLARMAREQAQRPGELLKTVSYKACLPPSLRDLIQGLSFVTRRAIRRTVRRALPRVAACQADRHSLMAKYIMDLERLDPAGAAETFHVGLPGALGGHDGLGLLRVAGDGGIAWTQGEQEVLQPFCDFPEIVDISIKQAPRVGPAGEHRLVTVTRTDNQILEAEFPGLPEALSFVALVDGYFRLTTDSQHFFCKEVAPPRLLEEVAEQCHGPITLDFAINKLKTGGSRPGSYVLRRSPQDFDSFLLTVCVQNPLGPDYKGCLIRRSPTGTFLLVGLSRPHSSLRELLATCWDGGLHVDGVAVTLTSCCIPRPKEKSNLIVVQRGHSPPTSSLVQPQSQYQLSQMTFHKIPADSLEWHENLGHGSFTKIYRGCRHEVVDGEARKTEVLLKVMDAKHKNCMESFLEAASLMSQVSYRHLVLLHGVCMAGDSTMVQEFVHLGAIDMYLRKRGHLVPASWKLQVVKQLAYALNYLEDKGLPHGNVSARKVLLAREGADGSPPFIKLSDPGVSPAVLSLEMLTDRIPWVAPECLREAQTLSLEADKWGFGATVWEVFSGVTMPISALDPAKKLQFYEDRQQLPAPKWTELALLIQQCMAYEPVQRPSFRAVIRDLNSLISSDYELLSDPTPGALAPRDGLWNGAQLYACQDPTIFEERHLKYISQLGKGNFGSVELCRYDPLAHNTGALVAVKQLQHSGPDQQRDFQREIQILKALHSDFIVKYRGVSYGPGRPELRLVMEYLPSGCLRDFLQRHRARLDASRLLLYSSQICKGMEYLGSRRCVHRDLAARNILVESEAHVKIADFGLAKLLPLDKDYYVVREPGQSPIFWYAPESLSDNIFSRQSDVWSFGVVLYELFTYCDKSCSPSAEFLRMMGCERDVPALCRLLELLEEGQRLPAPPACPAEVSCYSGWRDDICSMGWWPTVISRWDLACSPCPRPLTITATTVQLPPTLHATAASVAVPNKTC

SEQ ID NO: 6175 - protein, 2191 aa, Homo sapiens
METGLLPNHKLKTVGEAPAAPPHQQHHHHHHAHHHHHHAHHLHHHHALQQQLNQFQQQQQQQQQQQQQQQQQQHPISNNNSLGGAGGGAPQPGPDMEQPQHGGAKDSAAGGQADPPGPPLLSKPGDEDDAPPKMGEPAGGRYEHPGLGALGTQQPPVAVPGGGGGPAAVPEFNNYYGSAAPASGGPGGRAGPCFDQHGGQQSPGMGMMHSASAAAAGAPGSMDPLQNSHEGYPNSQCNHYPGYSRPGAGGGGGGGGGGGGGSGGGGGGGGAGAGGAGAGAVAAAAAAAAAAAGGGGGGGYGGSSAGYGVLSSPRQQGGGMMMGPGGGGAASLSKAAAGSAAGGFQRFAGQNQHPSGATPTLNQLLTSPSPMMRSYGGSYPEYSSPSAPPPPPSQPQSQAAAAGAAAGGQQAAAGMGLGKDMGAQYAAASPAWAAAQQRSHPAMSPGTPGPTMGRSQGSPMDPMVMKRPQLYGMGSNPHSQPQQSSPYPGGSYGPPGPQRYPIGIQGRTPGAMAGMQYPQQQDSGDATWKETFWLMPPQYGQQGVSGYCQQGQQPYYSQQPQPPHLPPQAQYLPSQSQQRYQPQQDMSQEGYGTRSQPPLAPGKPNHEDLNLIQQERPSSLPDLSGSIDDLPTGTEATLSSAVSASGSTSSQGDQSNPAQSPFSPHASPHLSSIPGGPSPSPVGSPVGSNQSRSGPISPASIPGSQMPPQPPGSQSESSSHPALSQSPMPQERGFMAGTQRNPQMAQYGPQQTGPSMSPHPSPGGQMHAGISSFQQSNSSGTYGPQMSQYGPQGNYSRPPAYSGVPSASYSGPGPGMGISANNQMHGQGPSQPCGAVPLGRMPSAGMQNRPFPGNMSSMTPSSPGMSQQGGPGMGPPMPTVNRKAQEAAAAVMQAAANSAQSRQGSFPGMNQSGLMASSSPYSQPMNNSSSLMNTQAPPYSMAPAMVNSSAASVGLADMMSPGESKLPLPLKADGKEEGTPQPESKSKKSSSSTTTGEKITKVYELGNEPERKLWVDRYLTFMEERGSPVSSLPAVGKKPLDLFRLYVCVKEIGGLAQVNKNKKWRELATNLNVGTSSSAASSLKKQYIQYLFAFECKIERGEEPPPEVFSTGDTKKQPKLQPPSPANSGSLQGPQTPQSTGSNSMAEVPGDLKPPTPASTPHGQMTPMQGGRSSTISVHDPFSDVSDSSFPKRNSMTPNAPYQQGMSMPDVMGRMPYEPNKDPFGGMRKVPGSSEPFMTQGQMPNSSMQDMYNQSPSGAMSNLGMGQRQQFPYGASYDRRHEPYGQQYPGQGPPSGQPPYGGHQPGLYPQQPNYKRHMDGMYGPPAKRHEGDMYNMQYSSQQQEMYNQYGGSYSGPDRRPIQGQYPYPYSRERMQGPGQIQTHGIPPQMMGGPLQSSSSEGPQQNMWAARNDMPYPYQNRQGPGGPTQAPPYPGMNRTDDMMVPDQRINHESQWPSHVSQRQPYMSSSASMQPITRPPQPSYQTPPSLPNHISRAPSPASFQRSLENRMSPSKSPFLPSMKMQKVMPTVPTSQVTGPPPQPPPIRREITFPPGSVEASQPVLKQRRKITSKDIVTPEAWRVMMSLKSGLLAESTWALDTINILLYDDSTVATFNLSQLSGFLELLVEYFRKCLIDIFGILMEYEVGDPSQKALDHNAARKDDSQSLADDSGKEEEDAECIDDDEEDEEDEEEDSEKTESDEKSSIALTAPDAAADPKEKPKQASKFDKLPIKIVKKNNLFVVDRSDKLGRVQEFNSGLLHWQLGGGDTTEHIQTHFESKMEIPPRRRPPPPLSSAGRKKEQEGKGDSEEQQEKSIIATIDDVLSARPGALPEDANPGPQTESSKFPFGIQQAKSHRNIKLLEDEPRSRDETPLCTIAHWQDSLAKRCICVSNIVRSLSFVPGNDAEMSKHPGLVLILGKLILLHHEHPERKRAPQTYEKEEDEDKGVACSKDEWWWDCLEVLRDNTLVTLANISGQLDLSAYTESICLPILDGLLHWMVCPSAEAQDPFPTVGPNSVLSPQRLVLETLCKLSIQDNNVDLILATPPFSRQEKFYATLVRYVGDRKNPVCREMSMALLSNLAQGDALAARAIAVQKGSIGNLISFLEDGVTMAQYQQSQHNLMHMQPPPLEPPSVDMMCRAAKALLAMARVDENRSEFLLHEGRLLDISISAVLNSLVASVICDVLFQIGQL

SEQ ID NO: 6176 - protein, 2178 aa, Homo sapiens
METGLLPNHKLKTVGEAPAAPPHQQHHHHHHAHHHHHHAHHLHHHHALQQQLNQFQQQQQQQQQQQQQQQQQQHPISNNNSLGGAGGGAPQPGPDMEQPQHGGAKDSAAGGQADPPGPPLLSKPGDEDDAPPKMGEPAGGRYEHPGLGALGTQQPPVAVPGGGGGPAAVPEFNNYYGSAAPASGGPGGRAGPCFDQHGGQQSPGMGMMHSASAAAAGAPGSMDPLQNSHEGYPNSQCNHYPGYSRPGAGGGGGGGGGGGGGSGGGGGGGGAGAGGAGAGAVAAAAAAAAAAAGGGGGGGYGGSSAGYGVLSSPRQQGGGMMMGPGGGGAASLSKAAAGSAAGGFQRFAGQNQHPSGATPTLNQLLTSPSPMMRSYGGSYPEYSSPSAPPPPPSQPQSQAAAAGAAAGGQQAAAGMGLGKDMGAQYAAASPAWAAAQQRSHPAMSPGTPGPTMGRSQGSPMDPMVMKRPQLYGMGSNPHSQPQQSSPYPGGSYGPPGPQRYPIGIQGRTPGAMAGMQYPQQQMPPQYGQQGVSGYCQQGQQPYYSQQPQPPHLPPQAQYLPSQSQQRYQPQQDMSQEGYGTRSQPPLAPGKPNHEDLNLIQQERPSSLPDLSGSIDDLPTGTEATLSSAVSASGSTSSQGDQSNPAQSPFSPHASPHLSSIPGGPSPSPVGSPVGSNQSRSGPISPASIPGSQMPPQPPGSQSESSSHPALSQSPMPQERGFMAGTQRNPQMAQYGPQQTGPSMSPHPSPGGQMHAGISSFQQSNSSGTYGPQMSQYGPQGNYSRPPAYSGVPSASYSGPGPGMGISANNQMHGQGPSQPCGAVPLGRMPSAGMQNRPFPGNMSSMTPSSPGMSQQGGPGMGPPMPTVNRKAQEAAAAVMQAAANSAQSRQGSFPGMNQSGLMASSSPYSQPMNNSSSLMNTQAPPYSMAPAMVNSSAASVGLADMMSPGESKLPLPLKADGKEEGTPQPESKSKKSSSSTTTGEKITKVYELGNEPERKLWVDRYLTFMEERGSPVSSLPAVGKKPLDLFRLYVCVKEIGGLAQVNKNKKWRELATNLNVGTSSSAASSLKKQYIQYLFAFECKIERGEEPPPEVFSTGDTKKQPKLQPPSPANSGSLQGPQTPQSTGSNSMAEVPGDLKPPTPASTPHGQMTPMQGGRSSTISVHDPFSDVSDSSFPKRNSMTPNAPYQQGMSMPDVMGRMPYEPNKDPFGGMRKVPGSSEPFMTQGQMPNSSMQDMYNQSPSGAMSNLGMGQRQQFPYGASYDRRHEPYGQQYPGQGPPSGQPPYGGHQPGLYPQQPNYKRHMDGMYGPPAKRHEGDMYNMQYSSQQQEMYNQYGGSYSGPDRRPIQGQYPYPYSRERMQGPGQIQTHGIPPQMMGGPLQSSSSEGPQQNMWAARNDMPYPYQNRQGPGGPTQAPPYPGMNRTDDMMVPDQRINHESQWPSHVSQRQPYMSSSASMQPITRPPQPSYQTPPSLPNHISRAPSPASFQRSLENRMSPSKSPFLPSMKMQKVMPTVPTSQVTGPPPQPPPIRREITFPPGSVEASQPVLKQRRKITSKDIVTPEAWRVMMSLKSGLLAESTWALDTINILLYDDSTVATFNLSQLSGFLELLVEYFRKCLIDIFGILMEYEVGDPSQKALDHNAARKDDSQSLADDSGKEEEDAECIDDDEEDEEDEEEDSEKTESDEKSSIALTAPDAAADPKEKPKQASKFDKLPIKIVKKNNLFVVDRSDKLGRVQEFNSGLLHWQLGGGDTTEHIQTHFESKMEIPPRRRPPPPLSSAGRKKEQEGKGDSEEQQEKSIIATIDDVLSARPGALPEDANPGPQTESSKFPFGIQQAKSHRNIKLLEDEPRSRDETPLCTIAHWQDSLAKRCICVSNIVRSLSFVPGNDAEMSKHPGLVLILGKLILLHHEHPERKRAPQTYEKEEDEDKGVACSKDEWWWDCLEVLRDNTLVTLANISGQLDLSAYTESICLPILDGLLHWMVCPSAEAQDPFPTVGPNSVLSPQRLVLETLCKLSIQDNNVDLILATPPFSRQEKFYATLVRYVGDRKNPVCREMSMALLSNLAQGDALAARAIAVQKGSIGNLISFLEDGVTMAQYQQSQHNLMHMQPPPLEPPSVDMMCRAAKALLAMARVDENRSEFLLHEGRLLDISISAVLNSLVASVICDVLFQIGQL

SEQ ID NO: 6177 - protein, 349 aa, Homo sapiens
SQEGYGTRSQPPLAPGKPNHEDLNLIQQERPSSLPVEVLASEDAAFGLKDLSGSIDDLPTGTEATLSSAVSASGSTSSQGDQSNPAQSPFSPHASPHLSSIPGGPSPSPVGSPVGSNQSRSGPISPASIPGSQMPPQPPGSQSESSSHPALSQSPMPQERGFMAGTQRNPQMAQYGPQQTGPSMSPHPSPGGQMHAGISSFQQSNSSGTYGPQMSQYGPQGNYSRPPAYSGVPSASYSGPGPGMGISANNQMHGQGPSQPCGAVPLGRMPSAGMQNRPFPGNMSSMTPSSPGMSQQGGPGMGPPMPTVNRKAQEAAAAVMQAAANSAQSRYATQEHAPGRYAVCLPVTT

SEQ ID NO: 6178 - protein, 415 aa, Homo sapiens
DLSGSIDDLPTGTEATLSSAVSASGSTSSQGDQSNPAQSPFSPHASPHLSSIPGGPSPSPVGSPVGSNQSRSGPISPASIPGSQMPPQPPGSQSESSSHPALSQSPMPQERGTQRNPQMAQYGPQQTGPSMSPHPSPGGQMHAGISSFQQSNSSGTYGPQMSQYGPQGNYSRPPAYSGVPSASYSGPGPGMGISANNQMHGQGPSQPCGAVPLGRMPSAGMQNRPFPGNMSSMTPSSPGMSQQGGPGMGPPMPTVNRKAQEAAAAVMQAAANSAQSRQGSFPGMNQSGLMASSSPYSQPMNNSSSLMNTQAPPYSMAPAMVNSSAASVGLADMMSPGESKLPLPLKADGKEEGTPQPESKSKDSYSSQGISQPPTPGNLPVPSPMSPSSASISSFHGDESDSISSPGWPKTPSSP

SEQ ID NO: 6179 - protein, 1485 aa, Homo sapiens
PSPGGQMHAGISSFQQSNSSGTYGPQMSQYGPQGNYSRPPAYSGVPSASYSGPGPGMGISANNQMHGQGPSQPCGAVPLGRMPSAGMQNRPFPGNMSSMTPSSPGMSQQGGPGMGPPMPTVNRKAQEAAAAVMQAAANSAQSRQGSFPGMNQSGLMASSSPYSQPMNNSSSLMNTQAPPYSMAPAMVNSSAASVGLADMMSPGESKLPLPLKADGKEEGTPQPESKSKDSYSSQGISQPPTPGNLPVPSPMSPSSASISSFHGDESDSISSPGWPKTPSSPKSSSSTTTGEKITKVYELGNEPERKLWVDRYLTFMEERGSPVSSLPAVGKKPLDLFRLYVCVKEIGGLAQVNKNKKWRELATNLNVGTSSSAASSLKKQYIQYLFAFECKIERGEEPPPEVFSTGDTKKQPKLQPPSPANSGSLQGPQTPQSTGSNSMAEVPGDLKPPTPASTPHGQMTPMQGGRSSTISVHDPFSDVSDSSFPKRNSMTPNAPYQQGMSMPDVMGRMPYEPNKDPFGGMRKVPGSSEPFMTQGQMPNSSMQDMYNQSPSGAMSNLGMGQRQQFPYGASYDRRHEPYGQQYPGQGPPSGQPPYGGHQPGLYPQQPNYKRHMDGMYGPPAKRHEGDMYNMQYSSQQQEMYNQYGGSYSGPDRRPIQGQYPYPYSRERMQGPGQIQTHGIPLQMMGGPLQSSSSEGPQQNMWAARNDMPYPYQNRQGPGGPTQAPPYPGMNRTDDMMVPDQRINHESQWPSHVSQRQPYMSSSASMQPITRPPQPSYQTPPSLPNHISRAPSPASFQRSLENRMSPSKSPFLPSMKMQKVMPTVPTSQVTGPPPQPPPIRREITFPPGSVEASQPVLKQRRKITSKDIVTPEAWRVMMSLKSGLLAESTWALDTINILLYDDSTVATFNLSQLSGFLELLVEYFRKCLIDIFGILMEYEVGDPSQKALDHNAARKDDSQSLADDSGKEEEDAECIDDDEEDEEDEEEDSEKTESDEKSSIALTAPDAAADPKEKPKQASKFDKLPIKIVKKNNLFVVDRSDKLGRVQEFNSGLLHWQLGGGDTTEHIQTHFESKMEIPPRRRPPPPLSSAGRKKEQEGKGDSEEQQEKSIIATIDDVLSARPGALPEDANPGPQTESSKFPFGIQQAKSHRNIKLLEDEPRSRDETPLCTIAHWQDSLAKRCICVSNIVRSLSFVPGNDAEMSKHPGLVLILGKLILLHHEHPERKRAPQTYEKEEDEDKGVACSKDEWWWDCLEVLRDNTLVTLANISGQLDLSAYTESICLPILDGLLHWMVCPSAEAQDPFPTVGPNSVLSPQRLVLETLCKLSIQDNNVDLILATPPFSRQEKFYATLVRYVGDRKNPVCREMSMALLSNLAQGDALAARAIAVQKGSIGNLISFLEDGVTMAQYQQSQHNLMHMQPPPLEPPSVDMMCRAAKALLAMARVDENRSEFLLHEGRLLDISISAVLNSLVASVICDVLFQIGQL

SEQ ID NO: 6180 - protein, 2231 aa, Homo sapiens
METGLLPNHKLKTVGEAPAAPPHQQHHHHHHAHHHHHHAHHLHHHHALQQQLNQFQQQQQQQQQQQQQQQQQQHPISNNNSLGGAGGGAPQPGPDMEQPQHGGAKDSAAGGQADPPGPPLLSKPGDEDDAPPKMGEPAGGRYEHPGLGALGTQQPPVAVPGGGGGPAAVPEFNNYYGSAAPASGGPGGRAGPCFDQHGGQQSPGMGMMHSASAAAAGAPGSMDPLQNSHEGYPNSQCNHYPGYSRPGAGGGGGGGGGGGGGSGGGGGGGGAGAGGAGAGAVAAAAAAAAAAAGGGGGGGYGGSSAGYGVLSSPRQQGGGMMMGPGGGGAASLSKAAAGSAAGGFQRFAGQNQHPSGATPTLNQLLTSPSPMMRSYGGSYPEYSSPSAPPPPPSQPQSQAAAAGAAAGGQQAAAGMGLGKDMGAQYAAASPAWAAAQQRSHPAMSPGTPGPTMGRSQGSPMDPMVMKRPQLYGMGSNPHSQPQQSSPYPGGSYGPPGPQRYPIGIQGRTPGAMAGMQYPQQQMPPQYGQQGVSGYCQQGQQPYYSQQPQPPHLPPQAQYLPSQSQQRYQPQQDMSQEGYGTRSQPPLAPGKPNHEDLNLIQQERPSSLPDLSGSIDDLPTGTEATLSSAVSASGSTSSQGDQSNPAQSPFSPHASPHLSSIPGGPSPSPVGSPVGSNQSRSGPISPASIPGSQMPPQPPGSQSESSSHPALSQSPMPQERGFMAGTQRNPQMAQYGPQQTGPSMSPHPSPGGQMHAGISSFQQSNSSGTYGPQMSQYGPQGNYSRPPAYSGVPSASYSGPGPGMGISANNQMHGQGPSQPCGAVPLGRMPSAGMQNRPFPGNMSSMTPSSPGMSQQGGPGMGPPMPTVNRKAQEAAAAVMQAAANSAQSRQGSFPGMNQSGLMASSSPYSQPMNNSSSLMNTQAPPYSMAPAMVNSSAASVGLADMMSPGESKLPLPLKADGKEEGTPQPESKSKDSYSSQGISQPPTPGNLPVPSPMSPSSASISSFHGDESDSISSPGWPKTPSSPKSSSSTTTGEKITKVYELGNEPERKLWVDRYLTFMEERGSPVSSLPAVGKKPLDLFRLYVCVKEIGGLAQVNKNKKWRELATNLNVGTSSSAASSLKKQYIQYLFAFECKIERGEEPPPEVFSTGDTKKQPKLQPPSPANSGSLQGPQTPQSTGSNSMAEVPGDLKPPTPASTPHGQMTPMQGGRSSTISVHDPFSDVSDSSFPKRNSMTPNAPYQQGMSMPDVMGRMPYEPNKDPFGGMRKVPGSSEPFMTQGQMPNSSMQDMYNQSPSGAMSNLGMGQRQQFPYGASYDRRHEPYGQQYPGQGPPSGQPPYGGHQPGLYPQQPNYKRHMDGMYGPPAKRHEGDMYNMQYSSQQQEMYNQYGGSYSGPDRRPIQGQYPYPYSRERMQGPGQIQTHGIPPQMMGGPLQSSSSEGPQQNMWAARNDMPYPYQNRQGPGGPTQAPPYPGMNRTDDMMVPDQRINHESQWPSHVSQRQPYMSSSASMQPITRPPQPSYQTPPSLPNHISRAPSPASFQRSLENRMSPSKSPFLPSMKMQKVMPTVPTSQVTGPPPQPPPIRREITFPPGSVEASQPVLKQRRKITSKDIVTPEAWRVMMSLKSGLLAESTWALDTINILLYDDSTVATFNLSQLSGFLELLVEYFRKCLIDIFGILMEYEVGDPSQKALDHNAARKDDSQSLADDSGKEEEDAECIDDDEEDEEDEEEDSEKTESDEKSSIALTAPDAAADPKEKPKQASKFDKLPIKIVKKNNLFVVDRSDKLGRVQEFNSGLLHWQLGGGDTTEHIQTHFESKMEIPPRRRPPPPLSSAGRKKEQEGKGDSEEQQEKSIIATIDDVLSARPGALPEDANPGPQTESSKFPFGIQQAKSHRNIKLLEDEPRSRDETPLCTIAHWQDSLAKRCICVSNIVRSLSFVPGNDAEMSKHPGLVLILGKLILLHHEHPERKRAPQTYEKEEDEDKGVACSKDEWWWDCLEVLRDNTLVTLANISGQLDLSAYTESICLPILDGLLHWMVCPSAEAQDPFPTVGPNSVLSPQRLVLETLCKLSIQDNNVDLILATPPFSRQEKFYATLVRYVGDRKNPVCREMSMALLSNLAQGDALAARAIAVQKGSIGNLISFLEDGVTMAQYQQSQHNLMHMQPPPLEPPSVDMMCRAAKALLAMARVDENRSEFLLHEGRLLDISISAVLNSLVASVICDVLFQIGQL

SEQ ID NO: 6181 - protein, 471 aa, Homo sapiens
MAEKILEKLDVLDKQAEIILARRTKINRLQSEGRKTTMAIPLTFDFQLEFEEALATSASKAISKIKEDKSCSITKSKMHVSFKCEPEPRKSNFEKSNLRPFFIQTNVKNKESESTEPVEEHLKSRSIRPYLYLKDTTEMENAGPLNVLYSQHRQACRRSLGSTDFSPMFNIQSNAHKKEKDSTLFTAQIEKKPRKPLDSVGLLEGDRNKRKKSPQMNDFNIKENKSVRNYQLSKYRSVRKKSLLPLCFEDELKNPHAKIVNVSPTKTVTSHMEQKDTNPIIFHDTEYVRMLLLTKNRFSSHPLENENIYPHKRTNFILERNCEILKSIIGNQSISLFKPQKTMPTVQRKDIQIPMSFKAGHTTVDDKLKKKTNKQTLENRSWNTLYNFSQNFSSLTKQFVGYLDKAVIHEMSAQTGKFERMFSAGKPTSIPTSSALPVKCYSKPFKYIYELNNVTPLDNLLNLSNEILNAS

SEQ ID NO: 6182 - protein, 3802 aa, Homo sapiens
MSTDSNSLAREFLTDVNRLCNAVVQRVEAREEEEEETHMATLGQYLVHGRGFLLLTKLNSIIDQALTCREELLTLLLSLLPLVWKIPVQEEKATDFNLPLSADIILTKEKNSSSQRSTQEKLHLEGSALSSQVSAKVNVFRKSRRQRKITHRYSVRDARKTQLSTSDSEANSDEKGIAMNKHRRPHLLHHFLTSFPKQDHPKAKLDRLATKEQTPPDAMALENSREIIPRQGSNTDILSEPAALSVISNMNNSPFDLCHVLLSLLEKVCKFDVTLNHNSPLAASVVPTLTEFLAGFGDCCSLSDNLESRVVSAGWTEEPVALIQRMLFRTVLHLLSVDVSTAEMMPENLRKNLTELLRAALKIRICLEKQPDPFAPRQKKTLQEVQEDFVFSKYRHRALLLPELLEGVLQILICCLQSAASNPFYFSQAMDLVQEFIQHHGFNLFETAVLQMEWLVLRDGVPPEASEHLKALINSVMKIMSTVKKVKSEQLHHSMCTRKRHRRCEYSHFMHHHRDLSGLLVSAFKNQVSKNPFEETADGDVYYPERCCCIAVCAHQCLRLLQQASLSSTCVQILSGVHNIGICCCMDPKSVIIPLLHAFKLPALKNFQQHILNILNKLILDQLGGAEISPKIKKAACNICTVDSDQLAQLEETLQGNLCDAELSSSLSSPSYRFQGILPSSGSEDLLWKWDALKAYQNFVFEEDRLHSIQIANHICNLIQKGNIVVQWKLYNYIFNPVLQRGVELAHHCQHLSVTSAQSHVCSHHNQCLPQDVLQIYVKTLPILLKSRVIRDLFLSCNGVSQIIELNCLNGIRSHSLKAFETLIISLGEQQKDASVPDIDGIDIEQKELSSVHVGTSFHHQQAYSDSPQSLSKFYAGLKEAYPKRRKTVNQDVHINTINLFLCVAFLCVSKEAESDRESANDSEDTSGYDSTASEPLSHMLPCISLESLVLPSPEHMHQAADIWSMCRWIYMLSSVFQKQFYRLGGFRVCHKLIFMIIQKLFRSHKEEQGKKEGDTSVNENQDLNRISQPKRTMKEDLLSLAIKSDPIPSELGSLKKSADSLGKLELQHISSINVEEVSATEAAPEEAKLFTSQESETSLQSIRLLEALLAICLHGARTSQQKMELELPNQNLSVESILFEMRDHLSQSKVIETQLAKPLFDALLRVALGNYSADFEHNDAMTEKSHQSAEELSSQPGDFSEEAEDSQCCSFKLLVEEEGYEADSESNPEDGETQDDGVDLKSETEGFSASSSPNDLLENLTQGEIIYPEICMLELNLLSASKAKLDVLAHVFESFLKIIRQKEKNVFLLMQQGTVKNLLGGFLSILTQDDSDFQACQRVLVDLLVSLMSSRTCSEELTLLLRIFLEKSPCTKILLLGILKIIESDTTMSPSQYLTFPLLHAPNLSNGVSSQKYPGILNSKAMGLLRRARVSRSKKEADRESFPHRLLSSWHIAPVHLPLLGQNCWPHLSEGFSVSLWFNVECIHEAESTTEKGKKIKKRNKSLILPDSSFDGTESDRPEGAEYINPGERLIEEGCIHIISLGSKALMIQVWADPHNATLIFRVCMDSNDDMKAVLLAQVESQENIFLPSKWQHLVLTYLQQPQGKRRIHGKISIWVSGQRKPDVTLDFMLPRKTSLSSDSNKTFCMIGHCLSSQEEFLQLAGKWDLGNLLLFNGAKVGSQEAFYLYACGPNHTSVMPCKYGKPVNDYSKYINKEILRCEQIRELFMTKKDVDIGLLIESLSVVYTTYCPAQYTIYEPVIRLKGQMKTQLSQRPFSSKEVQSILLEPHHLKNLQPTEYKTIQGILHEIGGTGIFVFLFARVVELSSCEETQALALRVILSLIKYNQQRVHELENCNGLSMIHQVLIKQKCIVGFYILKTLLEGCCGEDIIYMNENGEFKLDVDSNAIIQDVKLLEELLLDWKIWSKAEACVWETLLAALEVLIRADHHQQMFNIKQLLKAQVVHHFLLTCQVLQEYKEGQLTPMPREVCRSFVKIIAEVLGSPPDLELLTIIFNFLLAVHPPTNTYVCHNPTNFYFSLHIDGKIFQEKVRSIMYLRHSSSGGRSLMSPGFMVISPSGFTASPYEGENSSNIIPQQMAAHMLRSRSLPAFPTSSLLTQSQKLTGSLGCSIDRLQNIADTYVATQSKKQNSLGSSDTLKKGKEDAFISSCESAKTVCEMEAVLSAQVSVSDVPKGVLGFPVVKADHKQLGAEPRSEDDSPGDESCPRRPDYLKGLASFQRSHSTIASLGLAFPSQNGSAAVGRWPSLVDRNTDDWENFAYSLGYEPNYNRTASAHSVTEDCLVPICCGLYELLSGVLLILPDVLLEDVMDKLIQADTLLVLVNHPSPAIQQGVIKLLDAYFARASKEQKDKFLKNRGFSLLANQLYLHRGTQELLECFIEMFFGRHIGLDEEFDLEDVRNMGLFQKWSVIPILGLIETSLYDNILLHNALLLLLQILNSCSKVADMLLDNGLLYVLCNTVAALNGLEKNIPMSEYKLLACDIQQLFIAVTIHACSSSGSQYFRVIEDLIVMLGYLQNSKNKRTQNMAVALQLRVLQAAMEFIRTTANHDSENLTDSLQSPSAPHHAVVQKRKSIAGEPRKFPLAQTESLLMKMRSVANDELHVMMQRRMSQENPSQATETELAQRLQRLTVLAVNRIIYQEFNSDIIDILRTPENVTQSKTSVFQTEISEENIHHEQSSVFNPFQKEIFTYLVEGFKVSIGSSKASGSKQQWTKILWSCKETFRMQLGRLLVHILSPAHAAQERKQIFEIVHEPNHQEILRDCLSPSLQHGAKLVLYLSELIHNHQGELTEEELGTAELLMNALKLCGHKCIPPSASTKADLIKMIKEEQKKYETEEGVNKAAWQKTVNNNQQSLFQRLDSKSKDISKIAADITQAVSLSQGNERKKVIQHIRGMYKVDLSASRHWQELIQQLTHDRAVWYDPIYYPTSWQLDPTEGPNRERRRLQRCYLTIPNKYLLRDRQKSEDVVKPPLSYLFEDKTHSSFSSTVKDKAASESIRVNRRCISVAPSRETAGELLLGKCGMYFVEDNASDTVESSSLQGELEPASFSWTYEEIKEVHKRWWQLRDNAVEIFLTNGRTLLLAFDNTKVRDDVYHNILTNNLPNLLEYGNITALTNLWYTGQITNFEYLTHLNKHAGRSFNDLMQYPVFPFILADYVSETLDLNDLLIYRNLSKPIAVQYKEKEDRYVDTYKYLEEEYRKGAREDDPMPPVQPYHYGSHYSNSGTVLHFLVRMPPFTKMFLAYQDQSFDIPDRTFHSTNTTWRLSSFESMTDVKELIPEFFYLPEFLVNREGFDFGVRQNGERVNHVNLPPWARNDPRLFILIHRQALESDYVSQNICQWIDLVFGYKQKGKASVQAINVFHPATYFGMDVSAVEDPVQRRALETMIKTYGQTPRQLFHMAHVSRPGAKLNIEGELPAAVGLLVQFAFRETREQVKEITYPSPLSWIKGLKWGEYVGSPSAPVPVVCFSQPHGERFGSLQALPTRAICGLSRNFCLLMTYSKEQGVRSMNSTDIQWSAILSWGYADNILRLKSKQSEPPVNFIQSSQQYQVTSCAWVPDSCQLFTGSKCGVITAYTNRFTSSTPSEIEMETQIHLYGHTEEITSLFVCKPYSILISVSRDGTCIIWDLNRLCYVQSLAGHKSPVTAVSASETSGDIATVCDSAGGGSDLRLWTVNGDLVGHVHCREIICSVAFSNQPEGVSINVIAGGLENGIVRLWSTWDLKPVREITFPKSNKPIISLTFSCDGHHLYTANSDGTVIAWCRKDQQRLKQPMFYSFLSSYAAG

SEQ ID NO: 6183 - protein, 913 aa, Homo sapiens
MAALFLRGFVQIGNCKTGISKSKEAFIEAVERKKKDRLVLYFKSGKYSTFRLSDNIQNVVLKSYRGNQNHLHLTLQNNNGLFIEGLSSTDAEQLKIFLDRVHQNEVQPPVRPGKGGSVFSSTTQKEINKTSFHKVDEKSSSKSFEIAKGSGTGVLQRMPLLTSKLTLTCGELSENQHKKRKRMLSSSSEMNEEFLKENNSVEYKKSKADCSRCVSYNREKQLKLKELEENKKLECESSCIMNATGNPYLDDIGLLQALTEKMVLVFLLQQGYSDGYTKWDKLKLFFELFPEKICHGLPNLGNTCYMNAVLQSLLSIPSFADDLLNQSFPWGKIPLNALTMCLARLLFFKDTYNIEIKEMLLLNLKKAISAAAEIFHGNAQNDAHEFLAHCLDQLKDNMEKLNTIWKPKSEFGEDNFPKQVFADDPDTSGFSCPVITNFELELLHSIACKACGQVILKTELNNYLSINLPQRIKAHPSSIQSTFDLFFGAEELEYKCAKCEHKTSVGVHSFSRLPRILIVHLKRYSLNEFCALKKNDQEVIISKYLKVSSHCNEGTRPPLPLSEDGEITDFQLLKVIRKMTSGNISVSWPATKESKDILAPHIGSDKESEQKKGQTVFKGASRRQQQKYLGKNSKPNELESVYSGDRAFIEKEPLAHLMTYLEDTSLCQFHKAGGKPASSPGTPLSKVDFQTVPENPKRKKYVKTSKFVAFDRIINPTKDLYEDKNIRIPERFQKVSEQTQQCDGMRICEQAPQQALPQSFPKPGTQGHTKNLLRPTKLNLQKSNRNSLLALGSNKNPRNKDILDKIKSKAKETKRNDDKGDHTYRLISVVSHLGKTLKSGHYICDAYDFEKQIWFTYDDMRVLGIQEAQMQEDRRCTGYIFFYMHNEIFEEMLKREENAQLNSKEVEETLQKE

SEQ ID NO: 6184 - protein, 126 aa, Homo sapiens
MSIGVPIKVLHEAEGHIVTCETNTGEVYRGKLIEAEDNMNCQMSNITVTYRDGRVAQLEQVYIRGSKIRFLILPDMLKNAPMLKSMKNKNQGSGAGRGKAAILKAQVAARGRGRGMGRGNIFQKRR

SEQ ID NO: 6185 - protein, 163 aa, Homo sapiens
MSFNCSTRNCSSRPIGGRCIVPVAQVTTTSTTDADCLGGICLPSSFQTGSWLLDHCQETCCEPTACQPTCYRRTSCVSNPCQVTCSRQTTCISNPCSTTYSRPLTFVSSGCQPLGGISSVCQPVGGISTVCQPVGGVSTVCQPACGVSRTYQQSCVSSCRRTC

SEQ ID NO: 6186 - protein, 357 aa, Homo sapiens
MARENGESSSSWKKQAEDIKKIFEFKETLGTGAFSEVVLAEEKATGKLFAVKCIPKKALKGKESSIENEIAVLRKIKHENIVALEDIYESPNHLYLVMQLVSGGELFDRIVEKGFYTEKDASTLIRQVLDAVYYLHRMGIVHRDLKPENLLYYSQDEESKIMISDFGLSKMEGKGDVMSTACGTPGYVAPEVLAQKPYSKAVDCWSIGVIAYILLCGYPPFYDENDSKLFEQILKAEYEFDSPYWDDISDSAKDFIRNLMEKDPNKRYTCEQAARHPWIAGDTALNKNIHESVSAQIRKNFAKSKWRQAFNATAVVRHMRKLHLGSSLDSSNASVSSSLSLASQKDCAYVAKPESLS

SEQ ID NO: 6187 - protein, 385 aa, Homo sapiens
MARENGESSSSWKKQAEDIKKIFEFKETLGTGAFSEVVLAEEKATGKLFAVKCIPKKALKGKESSIENEIAVLRKIKHENIVALEDIYESPNHLYLVMQLVSGGELFDRIVEKGFYTEKDASTLIRQVLDAVYYLHRMGIVHRDLKPENLLYYSQDEESKIMISDFGLSKMEGKGDVMSTACGTPGYVAPEVLAQKPYSKAVDCWSIGVIAYILLCGYPPFYDENDSKLFEQILKAEYEFDSPYWDDISDSAKDFIRNLMEKDPNKRYTCEQAARHPWIAGDTALNKNIHESVSAQIRKNFAKSKWRQAFNATAVVRHMRKLHLGSSLDSSNASVSSSLSLASQKDCLAPSTLCSFISSSSGVSGVGAERRPRPTTVTAVHSGSK

SEQ ID NO: 6188 - protein, 265 aa, Homo sapiens
MAAIGRGRSLKNLRVRGRNDSGEENVPLDLTREPSDNLREILQNVARLQGVSNMRKLGHLNNFTKLLCDIGHSEEKLGFHYEDIIICLRLALLNEAKEVRAAGLRALRYLIQDSSILQKVLKLKVDYLIARCIDIQQSNEVERTQALRLVRKMITVNASLFPSSVTNSLIAVGNDGLQERDRMVRACIAIICELALQNPEVVALRGGLNTILKNVIDCQLSRINEALITTILHLLNHPKTRQYVRADVELEVGTLIFFSSFKILL

SEQ ID NO: 6189 - protein, 687 aa, Homo sapiens
MAEELVLERCDLELETNGRDHHTADLCREKLVVRRGQPFWLTLHFEGRNYEASVDSLTFSVVTGPAPSQEAGTKARFPLRDAVEEGDWTATVVDQQDCTLSLQLTTPANAPIGLYRLSLEASTGYQGSSFVLGHFILLFNAWCPADAVYLDSEEERQEYVLTQQGFIYQGSAKFIKNIPWNFGQFEDGILDICLILLDVNPKFLKNAGRDCSRRSSPVYVGRVVSGMVNCNDDQGVLLGRWDNNYGDGVSPMSWIGSVDILRRWKNHGCQRVKYGQCWVFAAVACTVLRCLGIPTRVVTNYNSAHDQNSNLLIEYFRNEFGEIQGDKSEMIWNFHCWVESWMTRPDLQPGYEGWQALDPTPQEKSEGTYCCGPVPVRAIKEGDLSTKYDAPFVFAEVNADVVDWIQQDDGSVHKSINRSLIVGLKISTKSVGRDEREDITHTYKYPEGSSEEREAFTRANHLNKLAEKEETGMAMRIRVGQSMNMGSDFDVFAHITNNTAEEYVCRLLLCARTVSYNGILGPECGTKYLLNLNLEPFSEKSVPLCILYEKYRDCLTESNLIKVRALLVEPVINSYLLAERDLYLENPEIKIRILGEPKQKRKLVAEVSLQNPLPVALEGCTFTVEGAGLTEEQKTVEIPDPVEAGEEVKVRMDLLPLHMGLHKLVVNFESDKLKAVKGFRNVIIGPA

SEQ ID NO: 6190 - protein, 548 aa, Homo sapiens
MAEELVLERCDLELETNGRDHHTADLCREKLVVRRGQPFWLTLHFEGRNYEASVDSLTFSVVTGPAPSQEAGTKARFPLRDAVEEGDWTATVVDQQDCTLSLQLTTPANAPIGLYRLSLEASTGYQGSSFVLGHFILLFNAWCPADAVYLDSEEERQEYVLTQQGFIYQGSAKFIKNIPWNFGQFEDGILDICLILLDVNPKFLKNAGRDCSRRSSPVYVGRVVSGMVNCNDDQGVLLGRWDNNYGDGVSPMSWIGSVDILRRWKNHGCQRVKYGQCWVFAAVACTVLRCLGIPTRVVTNYNSAHDQNSNLLIEYFRNEFGEIQGDKSEMIWNFHCWVESWMTRPDLQPGYEGWQALDPTPQEKSEGTYCCGPVPVRAIKEGDLSTKYDAPFVFAEVNADVVDWIQQDDGSVHKSINRSLIVGLKISTKSVGRDEREDITHTYKYPEGSSEEREAFTRANHLNKLAEKEETGMAMRIRVGQSMNMGSDFDVFAHITNNTAEEYVCRLLLCARTVSYNGILGPECGTKYLLNLNLEPFSGKALCSWSIC

SEQ ID NO: 6191 - protein, 1464 aa, Homo sapiens
MSGMGENTSDPSRAETRKRKECPDQLGPSPKRNTEKRNREQENKYIEELAELIFANFNDIDNFNFKPDKCAILKETVKQIRQIKEQEKAAAANIDEVQKSDVSSTGQGVIDKDALGPMMLEALDGFFFVVNLEGNVVFVSENVTQYLRYNQEELMNKSVYSILHVGDHTEFVKNLLPKSIVNGGSWSGEPPRRNSHTFNCRMLVKPLPDSEEEGHDNQEAHQKYETMQCFAVSQPKSIKEEGEDLQSCLICVARRVPMKERPVLPSSESFTTRQDLQGKITSLDTSTMRAAMKPGWEDLVRRCIQKFHAQHEGESVSYAKRHHHEVLRQGLAFSQIYRFSLSDGTLVAAQTKSKLIRSQTTNEPQLVISLHMLHREQNVCVMNPDLTGQTMGKPLNPISSNSPAHQALCSGNPGQDMTLSSNINFPINGPKEQMGMPMGRFGGSGGMNHVSGMQATTPQGSNYALKMNSPSQSSPGMNPGQPTSMLSPRHRMSPGVAGSPRIPPSQFSPAGSLHSPVGVCSSTGNSHSYTNSSLNALQALSEGHGVSLGSSLASPDLKMGNLQNSPVNMNPPPLSKMGSLDSKDCFGLYGEPSEGTTGQAESSCHPGEQKETNDPNLPPAVSSERADGQSRLHDSKGQTKLLQLLTTKSDQMEPSPLASSLSDTNKDSTGSLPGSGSTHGTSLKEKHKILHRLLQDSSSPVDLAKLTAEATGKDLSQESSSTAPGSEVTIKQEPVSPKKKENALLRYLLDKDDTKDIGLPEITPKLERLDSKTDPASNTKLIAMKTEKEEMSFEPGDQPGSELDNLEEILDDLQNSQLPQLFPDTRPGAPAGSVDKQAIINDLMQLTAENSPVTPVGAQKTALRISQSTFNNPRPGQLGRLLPNQNLPLDITLQSPTGAGPFPPIRNSSPYSVIPQPGMMGNQGMIGNQGNLGNSSTGMIGNSASRPTMPSGEWAPQSSAVRVTCAATTSAMNRPVQGGMIRNPAASIPMRPSSQPGQRQTLQSQVMNIGPSELEMNMGGPQYSQQQAPPNQTAPWPESILPIDQASFASQNRQPFGSSPDDLLCPHPAAESPSDEGALLDQLYLALRNFDGLEEIDRALGIPELVSQSQAVDPEQFSSQDSNIMLEQKAPVFPQQYASQAQMAQGSYSPMQDPNFHTMGQRPSYATLRMQPRPGLRPTGLVQNQPNQLRLQLQHRLQAQQNRQPLMNQISNVSNVNLTLRPGVPTQAPINAQMLAQRQREILNQHLRQRQMHQQQQVQQRTLMMRGQGLNMTPSMVAPSGMPATMSNPRIPQANAQQFPFPPNYGISQQPDPGFTGATTPQSPLMSPRMAHTQSPMMQQSQANPAYQAPSDINGWAQGNMGGNSMFSQQSPPHFGQQANTSMYSNNMNINVSMATNTGGMSSMNQMTGQISMTSVTSVPTSGLSSMGPEQVNDPALRGGNLFPNQLPGMDMIKQEGDTTRKYC

SEQ ID NO: 6192 - protein, 495 aa, Homo sapiens
MDPTALVEAIVEEVACPICMTFLREPMSIDCGHSFCHSCLSGLWEIPGESQNWGYTCPLCRAPVQPRNLRPNWQLANVVEKVRLLRLHPGMGLKGDLCERHGEKLKMFCKEDVLIMCEACSQSPEHEAHSVVPMEDVAWEYKWELHEALEHLKKEQEEAWKLEVGERKRTATWKAVLISILAPQIQVETRKQSIVWEFEKYQRLLEKKQPPHRQLGAEVAAALASLQREAAETMQKLELNHSELIQQSQVLWRMIAELKERSQRPVRWMLQDIQEVLNRSKSWSLQQPEPISLELKTDCRVLGLREILKTYAADVRLDPDTAYSRLIVSEDRKRVHYGDTNQKLPDNPERFYRYNIVLGSQCISSGRHYWEVEVGDRSEWGLGVCKQNVDRKEVVYLSPHYGFWVIRLRKGNEYRAGTDEYPILSLPVPPRRVGIFVDYEAHDISFYNVTDCGSHIFTFPRYPFPGRLLPYFSPCYSIGTNNTAPLAICSLDGED

SEQ ID NO: 6193 - protein, 175 aa, Homo sapiens
MPKSCAARQCCNRYSSRRKQLTFHRFPFSRPELLKEWVLNIGRGNFKPKQHTVICSEHFRPECFSAFGNRKNLKHNAVPTVFAFQDPTQQVRENTDPASERGNASSSQKEKTSPCRSQVLPEAGAGEDSPGRNMDTALEELQLPPNAEGHVKQAMLFNVENGTPASREALWLSEE

SEQ ID NO: 6194 - protein, 287 aa, Homo sapiens
MALVAPDEMEKINNPLYSRQGEVLASRKDFRMNTCVPHPRRAFMLEPEGMSPMEPAGVSPMPGTQNDTGRTEEQPMEVSVCRSPVPALGFSQEPGPSPERPMPLGGGEDEDAEEAVELPEASAPKAALEPKESRSPQQSAALPRRYMLREREGAPEPASCVKETPDLWQSLDPLNSLESKPFKKGRPYSVPPCVEEALGQKRKRKGAAKLQDFHQWYLVAYADHADSRRLRRKGPSFADMEVLYWTHVKEQLETLRKLQRREVAEQWLRPAEEDHLEDSPGRPGGSR

SEQ ID NO: 6195 - protein, 1156 aa, Homo sapiens
MFPAAPSPRTPGTGSRRGPLAGLGPGSTPRTASRKGLPLGSAVSSPVLFSPVGRRSSLSSRGTPTRMFPHHSITESVNYDVKTFGSSLPVKVMEALTLAEVDDQLTINIDEGGWACLVCKEKLIIWKIALSPITKLSVCKELQLPPSDFHWSADLVALSYSSPSGEAHSTQAVAVMVATREGSIRYWPSLAGEDTYTEAFVDSGGDKTYSFLTAVQGGSFILSSSGSQLIRLIPESSGKIHQHILPQGQGMLSGIGRKVSSLFGILSPSSDLTLSSVLWDRERSSFYSLTSSNISKWELDDSSEKHAYSWDINRALKENITDAIWGSESNYEAIKEGVNIRYLDFKQNCDGLVILAAAWHSADNPCLIYYSLITIEDNGCQMSDAVTVEVTQYNPPFQSEDLILCQLTVPNFSNQTAYLYNESAVYVCSTGTGKFSLPQEKIVFNAQGDSVLGAGACGGVPIIFSRNSGLVSITSRENVSILAEDLEGSLASSVAGPNSESMIFETTTKNETIAQEDKIKLLKAAFLQYCRKDLGHAQMVVDELFSSHSDLDSDSELDRAVTQISVDLMDDYPASDPRWAESVPEEAPGFSNTSLIILHQLEDKMKAHSFLMDFIHQVGLFGRLGSFPVRGTPMATRLLLCEHAEKLSAAIVLKNHHSRLSDLVNTAILIALNKREYEIPSNLTPADVFFREVSQVDTICECLLEHEEQVLRDAPMDSIEWAEVVINVNNILKDMLQAASHYRQNRNSLYRREESLEKEPEYVPWTATSGPGGIRTVIIRQHEIVLKVAYPQADSNLRNIVTEQLVALIDCFLDGYVSQLKSVDKSSNRERYDNLEMEYLQKRSDLLSPLLSLGQYLWAASLAEKYCDFDILVQMCEQTDNQSRLQRYMTQFADQNFSDFLFRWYLEKGKRGKLLSQPISQHGQLANFLQAHEHLSWLHEINSQELEKAHATLLGLANMETRYFAKKKTLLGLSKLAALASDFSEDMLQEKIEEMAEQERFLLHQETLPEQLLAEKQLNLSAMPVLTAPQLIGLYICEENRRANEYDFKKALDLLEYIDEEEDININDLKLEILCKALQRDNWSSSDGKDDPIEVSKDSIFVKILQKLLKDGIQLSEYLPEVKDLLQADQLGSLKSNPYFEFVLKANYEYYVQGQI

SEQ ID NO: 6196 - protein, 1376 aa, Homo sapiens
MFRAGEASKRPLPGPSPPRVRSVEVARGRAGYGFTLSGQAPCVLSCVMRGSPADFVGLRAGDQILAVNEINVKKASHEDVVKLIGKCSGVLHMVIAEGVGRFESCSSDEEGGLYEGKGWLKPKLDSKALGINRAERVVEEMQSGGIFNMIFENPSLCASNSEPLKLKQRSLSESAATRFDVGHESINNPNPNMLSKEEISKVIHDDSVFSIGLESHDDFALDASILNVAMIVGYLGSIELPSTSSNLESDSLQAIRGCMRRLRAEQKIHSLVTMKIMHDCVQLSTDKAGVVAEYPAEKLAFSAVCPDDRRFFGLVTMQTNDDGSLAQEEEGALRTSCHVFMVDPDLFNHKIHQGIARRFGFECTADPDTNGCLEFPASSLPVLQFISVLYRDMGELIEGMRARAFLDGDADAHQNNSTSSNSDSGIGNFHQEEKSNRVLVVDLGGSSSRHGPGGSAWDGVGGRGAQPWGAPWTGPFCPDPEGSPPFEAAHQTDRFWDLNKHLGPASPVEVPPASLRSSVPPSKRGTVGAGCGFNQRWLPVHVLREWQCGHTSDQDSYTDSTDGWSSINCGTLPPPMSKIPADRYRVEGSFAQPPLNAPKREWSRKAFGMQSIFGPHRNVRKTKEDKKGSKFGRGTGLTQPSQRTSARRSFGRSKRFSITRSLDDLESATVSDGELTGADLKDCVSNNSLSSNASLPSVQSCRRLRERRVASWAVSFERLLQDPVGVRYFSDFLRKEFSEENILFWQACEYFNHVPAHDKKELSYRAREIFSKFLCSKATTPVNIDSQAQLADDVLRAPHPDMFKEQQLQIFNLMKFDSYTRFLKSPLYQECILAEVEGRALPDSQQVPSSPASKHSLGSDHSSVSTPKKLSGKSKSGRSLNEELGDEDSEKKRKGAFFSWSRTRSTGRSQKKREHGDHADDALHANGGLCRRESQGSVSSAGSLDLSEACRTLAPEKDKATKHCCIHLPDGTSCVVAVKAGFSIKDILSGLCERHGINGAAADLFLVGGDKPLVLHQDSSILESRDLRLEKRTLFRLDLVPINRSVGLKAKPTKPVTEVLRPVVARYGLDLSGLLVRLSGEKEPLDLGAPISSLDGQRVVLEEKDPSRGKASADKQKGVPVKQNTAVNSSSRNHSATGEERTLGKSNSIKIKGENGKNARDPRLSKREESIAKIGKKKYQKINLDEAEEFFELISKAQSNRADDQRGLLRKEDLVLPEFLRLPPGSTELTLPTPAAVAKGFSKRSATGNGRESASQPGEQWEPVQESSDSPSTSPGSASSPPGPPGTTPPGQKSPSGPFCTPQSPVSLAQEGTAQIWKRQSQEVEAGGIQTVEDEHVAELTLMGEGDISSPNSTLLPPPSTPQEVPGPSRPGTSRF

SEQ ID NO: 6197 - protein, 1447 aa, Homo sapiens
MFRAGEASKRPLPGPSPPRVRSVEVARGRAGYGFTLSGQAPCVLSCVMRGSPADFVGLRAGDQILAVNEINVKKASHEDVVKLIGKCSGVLHMVIAEGVGRFESCSSDEEGGLYEGKGWLKPKLDSKALGINRAERVVEEMQSGGIFNMIFENPSLCASNSEPLKLKQRSLSESAATRFDVGHESINNPNPNMLSKEEISKVIHDDSVFSIGLESHDDFALDASILNVAMIVGYLGSIELPSTSSNLESDSLQAIRGCMRRLRAEQKIHSLVTMKIMHDCVQLSTDKAGVVAEYPAEKLAFSAVCPDDRRFFGLVTMQTNDDGSLAQEEEGALRTSCHVFMVDPDLFNHKIHQGIARRFGFECTADPDTNGCLEFPASSLPVLQFISVLYRDMGELIEGMRARAFLDGDADAHQNNSTSSNSDSGIGNFHQEEKSNRVLVVDLGGSSSRHGPGGSAWDGVGGRGAQPWGAPWTGPFCPDPEGSPPFEAAHQTDRFWDLNKHLGPASPVEVPPASLRSSVPPSKRGTVGAGCGFNQRWLPVHVLREWQCGHTSDQDSYTDSTDGWSSINCGTLPPPMSKIPADRYRVEGSFAQPPLNAPKREWSRKAFGMQSIFGPHRNVRKTKEDKKGSKFGRGTGLTQPSQRTSARRSFGRSKRFSITRSLDDLESATVSDGELTGADLKDCVSNNSLSSNASLPSVQSCRRLRERRVASWAVSFERLLQDPVGVRYFSDFLRKEFSEENILFWQACEYFNHVPAHDKKELSYRAREIFSKFLCSKATTPVNIDSQAQLADDVLRAPHPDMFKEQQLQIFNLMKFDSYTRFLKSPLYQECILAEVEGRALPDSQQVPSSPASKHSLGSDHSSVSTPKKLSGKSKSGRSLNEELGDEDSEKKRKGAFFSWSRTRSTGRSQKKREHGDHADDALHANGGLCRRESQGSVSSAGSLDLSEACRTLAPEKDKATKHCCIHLPDGTSCVVAVKAGFSIKDILSGLCERHGINGAAADLFLVGGDKPLVLHQDSSILESRDLRLEKRTLFRLDLVPINRSVGLKAKPTKPVTEVLRPVVARYGLDLSGLLVRLSGEKEPLDLGAPISSLDGQRVVLEEKDPSRGKASADKQKGVPVKQNTAVNSSSRNHSATGEERTLGKSNSIKIKGENGKNARDPRLSKREESIAKIGKKKYQKINLDEAEEFFELISKAQSNRADDQRGLLRKEDLVLPEFLRLPPGSTELTLPTPAAVAKGFSKRSATGNGRESASQPGEQWEPVQESSDSPSTSPGSASSPPGPPGTTPPGQKSPSGPFCTPQSPVSLAQEGTAQIWKRQSQEVEAGGIQTVEDEHVAELTLMGEGDISSPNSTLLPPPSTPQEVPGPSRPGSGTHGSRDLPVNRIIDVDLVTGSAPGRDGGIAGAQAGPGRSQASGGPPTSDLPGLGPVPGEPAKPKTSAHHATFV

SEQ ID NO: 6198 - protein, 679 aa, Homo sapiens
MFRAGEASKRPLPGPSPPRVRSVEVARGRAGYGFTLSGQAPCVLSCVMRGSPADFVGLRAGDQILAVNEINVKKASHEDVVKLIGKCSGVLHMVIAEGVGRFESCSSDEEGGLYEGKGWLKPKLDSKALGINRAERVVEEMQSGGIFNMIFENPSLCASNSEPLKLKQRSLSESAATRFDVGHESINNPNPNMLSKEEISKVIHDDSVFSIGLESHDDFALDASILNVAMIVGYLGSIELPSTSSNLESDSLQAIRGCMRRLRAEQKIHSLVTMKIMHDCVQLSTDKAGVVAEYPAEKLAFSAVCPDDRRFFGLVTMQTNDDGSLAQEEEGALRTSCHVFMVDPDLFNHKIHQGIARRFGFECTADPDTNGCLEFPASSLPVLQFISVLYRDMGELIEGMRARAFLDGDADAHQNNSTSSNSDSGIGNFHQEEKSNRVLVVDLGGSSSRHGPGGSAWDGVGGRGAQPWGAPWTGPFCPDPEGSPPFEAAHQTDRFWDLNKHLGPASPVEVPPASLRSSVPPSKRGTVGAGCGFNQRWLPVHVLREWQCGHTSDQDSYTDSTDGWSSINCGTLPPPMSKIPADRYRVEGSFAQPPLNAPKREWSRKAFGMQSIFGPHRNVRKTKEDKKGSKFGRGTGLTQPSQRTSARRSFGRSKRFSITRSLDDLEWSTCARRCGNGYP

SEQ ID NO: 6199 - protein, 540 aa, Homo sapiens
MTDTRRRVKVYTLNEDRQWDDRGTGHVSSGYVERLKGMSLLVRAESDGSLLLESKINPNTAYQKQQDTLIVWSEAENYDLALSFQEKAGCDEIWEKICQVQGKDPSVDITQDLVDESEEERFDDMSSPGLELPSCELSRLEEIAELVASSLPSPLRREKLALALENEGYIKKLLELFHVCEDLENIEGLHHLYEIIKGIFLLNRTALFEVMFSEECIMDVIGCLEYDPALSQPRKHREFLTKTAKFKEVIPISDPELKQKIHQTYRVQYIQDMVLPTPSVFEENMLSTLHSFIFFNKVEIVGMLQEDEKFLTDLFAQLTDEATDEEKRQELVNFLKEFCAFSQTLQPQNRDAFFKTLSNMGILPALEVILGMDDTQVRSAATDIFSYLVEYNPSMVREFVMQEAQQNDDDILLINLIIEHMICDTDPELGGAVQLMGLLRTLVDPENMLATANKTEKTEFLGFFYKHCMHVLTAPLLANTTEDKPSKDDFQTAQLLALVLELLTFCVEHHTYHIKNYIINKDILRRVLVLMASKHAFLAL

SEQ ID NO: 6200 - protein, 392 aa, Homo sapiens
MVRSGKNGDLHLKQIAYYKRTGEYHSTTLPSERSGIRRAAKKFVFKEKKLFYVGKDRKQNRLVIVSEEEKKKVLRECHENDSGAHHGISRTLTLVESNYYWTSVTNDAKQWVYACQHCQVAKNTVIVAPKQHLLKVENPWSLVTVDLMGPFHTSNRSHVYAIIMTDLFTKWIVILPLCDVSASEVSKAIINIFFLYGPPQKIIMDQRDEFIQQINIELYRLFGIKQIVISHTSGTVNPMESTPNTIKAFLSKHCADHPNNWDDHLSAVSFAFNVTHLEPTKNTPYFQMFSRNPYMPETSDSLHEVDGDNTSMFAKILDAIKEADKIMENKTTSLGQMENNNLDELNKSKIIVKKKPKQLNPFHLKVGHEVLRQRKIGGRMVVFSLNGLVLVS

SEQ ID NO: 6201 - protein, 634 aa, Homo sapiens
FQGLVMFQDLSIDFSQEEWECLDAAQKDLYRDVMMENYSSLVSLETHTGEKLYKCKECGKAFHHFSYLVKHQRIHTGEKPCACKEYGKAFISGSHLIQHQKMYTDERPHECQESVKAFRPSAHLIQHWRIHTGDKPYECKECGKSFTSGSTLNQHQQIHTGEKPYHCKQCGKSFTVGSTLIRHQQIHTGEKPYDWLIGHQAIHTGEKPYDCKECGKSFTAGSTLIQHQRIHTGEKPYDCKECGKSFASGSALLQHQRIHTGEKPYCCKECGKSFTFRSTRNRHQRIHTGEKPYNCKECGKSFASGSALLQHQRIHTGEKPYHCKECGKSFTFRSGLIGHQAVHTGEKPYDCKECGKSFTSRSALIQHQRIHTGEKPYHCKECGKSFTVGSTLLQHQQIHTGEKPYDCKECGKAFRLRLRLTQHQQIHTGEKPYQCQECGKAFVSVSGLTQHHRIHTVHTGEKRYSCKECGKSFTSRSTLIEHQRIHTGEKPYHCKECGKSFAFRSAIIQHRRIHTGEKPYDCKECGKAFRRRSKLTQHQRIHTGEKPYRCHECGKAFVRFSGLTKHHSIHTGEKPYECKTCGKSFRQRTHLTLHQRIHTGDRPYECKECGKSFTCGSELIRHQRTHTGEKPYDC

SEQ ID NO: 6202 - protein, 510 aa, Homo sapiens
MPGGGASAASGRLLTAAEQRGSREAAGSASRSGFGGSGGGRGGASGPGSGSGGPGGPAGRMSLTPKELSSLLSIISEEAGGGSTFEGLSTAFHHYFSKADHFRLGSVLVMLLQQPDLLPSAAQRLTALYLLWEMYRTEPLAANPFAASFAHLLNPAPPARGGQEPDRPPLSGFLPPITPPEKFFLSQLMLAPPRELFKKTPRQIALMDVGNMGQSVDISGLQLALAERQSELPTQSKASFPSILSDPDPDSSNSGFDSSVASQITEALVSGPKPPIESHFRPEFIRPPPPLHICEDELAWLNPTEPDHAIQWDKSMCVKNSTGVEIKRIMAKAFKSPLSSPQQTQLLGELEKDPKLVYHIGLTPAKLPDLVENNPLVAIEMLLKLMQSSQITEYFSVLVNMDMSLHSMEVVNRLTTAVDLPPEFIHLYISNCISTCEQIKDKYMQNRLVRLVCVFLQSLIRNKIINVQDLFIEVQAFCIEFSRIREAAGLFRLLKTLDTGETPSETKMSK

SEQ ID NO: 6203 - protein, 622 aa, Homo sapiens
MAENTEGDLNSNLLHAPYHTGDPQLDTAIGQWLRWDKNPKTKEQIENLLRNGMNKELRDRLCCRMTFGAAGLRSAMGAGFCYINDLTVIQSTQGMYKYLERCFSDFKQRGFVVGYDTRGQVTSSCSSQRLAKLTAAVLLAKDVPVYLFSRYVPTPFVPYAVQKLKAVAGVMITASHNRKEDNGYKVYWETGAQITSPHDKEILKCIEECVEPWNGSWNDNLVDTSPLKRDPLQDICRRYMEDLKKICFYRELNSKTTLKFVHTSFHGVGHDYVQLAFKVFGFKPPIPVPEQKDPDPDFSTVKCPNPEEGESVLELSLRLAEKENARVVLATDPDADRLAAAELQENGCWKVFTGNELAALFGWWMFDCWKKNKSRNADVKNVYMLATTVSSKILKAIALKEGFHFEETLPGFKWIGSRIIDLLENGKEVLFAFEESIGFLCGTSVLDKDGVSAAVVVAEMASYLETMNITLKQQLVKVYEKYGYHISKTSYFLCYEPPTIKSIFERLRNFDSPKEYPKFCGTFAILHVRDITTGYDSSQPNKKSVLPVSKNSQMITFTFQNGCVATLRTSGTEPKIKYYAEMCASPDQSDTALLEEELKKLIDALIENFLQPSKNGLIWRSV

SEQ ID NO: 6204 - protein, 622 aa, Homo sapiens
MAENTEGDLNSNLLHAPYHTGDPQLDTAIGQWLRWDKNPKTKEQIENLLRNGMNKELRDRLCCRMTFGTAGLRSAMGAGFCYINDLTVIQSTQGMYKYLERCFSDFKQRGFVVGYDTRGQVTSSCSSQRLAKLTAAVLLAKDVPVYLFSRYVPTPFVPYAVQKLKAVAGVMITASHNRKEDNGYKVYWETGAQITSPHDKEILKCIEECVEPWNGSWNDNLVDTSPLKRDPLQDICRRYMEDLKKICFYRELNSKTTLKFVHTSFHGVGHDYVQLAFKVFGFKPPIPVPEQKDPDPDFSTVKCPNPEEGESVLELSLRLAEKENARVVLATDPDADRLAAAELQENGCWKVFTGNELAALFGWWMFDCWKKNKSRNADVKNVYMLATTVSSKILKAIALKEGFHFEETLPGFKWIGSRIIDLLENGKEVLFAFEESIGFLCGTSVLDKDGVSAAVVVAEMASYLETMNITLKQQLVKVYEKYGYHISKTSYFLCYEPPTIKSIFERLRNFDSPKEYPKFCGTFAILHVRDVTTGYDSSQPNKKSVLPVSKNSQMITFTFQNGCVATLRTSGTEPKIKYYAEMCASPDQSDTALLEEELKKLIDALIENFLQPSKNGLIWRSV

SEQ ID NO: 6205 - protein, 446 aa, Homo sapiens
MREIVHIQAGQCGNQIGTKFWEVISDEHGIDPAGGYVGDSALQLERINVYYNESSSQKYVPRAALVDLEPGTMDSVRSGPFGQLFRPDNFIFGQTGAGNNWAKGHYTEGAELVDAVLDVVRKECEHCDCLQGFQLTHSLGGGTGSGMGTLLISKIREEFPDRIMNTFSVMPSPKVSDTVVEPYNATLSVHQLVENTDETYCIDNEALYDICFRTLKLTTPTYGDLNHLVSATMSGVTTSLRFPGQLNADLRKLAVNMVPFPRLHFFMPGFAPLTSRGSQQYRALTVPELTQQMFDARNMMAACDPRHGRYLTVATVFRGPMSMKEVDEQMLAIQSKNSSYFVEWIPNNVKVAVCDIPPRGLKMASTFIGNSTAIQELFKRISEQFSAMFRRKAFLHWFTGEGMDEMEFTEAESNMNDLVSEYQQYQDATANDGEEAFEDEEEEIDG

SEQ ID NO: 6206 - protein, 421 aa, Homo sapiens
MSATLILEPPGRCCWNEPVRIAVRGLAPEQRVTLRASLRDEKGALFRAHARYCADARGELDLERAPALGGSFAGLEPMGLLWALEPEKPFWRFLKRDVQIPFVVELEVLDGHDPEPGRLLCQAQHERHFPPPGVRRQSVRAGRVRATLFLPPGPGPFPGIIDIFGIGGGLLEYRASLLAGHGFATLDLQSYNFEDLPNNMDNISLEYFEEAVCYMLQHPQVKGPGIGLLGISLGADICLSMASFLKNVSATVSINGSGISGNTAINYKHSSIPPLGYDLRRIKVAFSGLVDIVDIRNALVGGYKNPSMIPIEKAQGPILLIVGQDDHNWRSELYAQTVSERLQAHGKEKPQIICYPGTGHYIEPPYFPLCPASLHRLLNKHVIWGGEPRAHSKAQEDAWKQILAFFCKHLGGTQKTAVPKL

SEQ ID NO: 6207 - protein, 1740 aa, Homo sapiens
MGRSQGSPMDPMVMKRPQLYGMGSNPHSQPQQSSPYPGGSYGPPGPQRYPIGIQGRTPGAMAGMQYPQQQDSGDATWKETFWLMPPQYGQQGVSGYCQQGQQPYYSQQPQPPHLPPQAQYLPSQSQQRYQPQQDMSQEGYGTRSQPPLAPGKPNHEDLNLIQQERPSSLPDLSGSIDDLPTGTEATLSSAASASGSTSSQGDQSNPAQSPFSPHASPHLSSIPGGPSPSPVGSPVGSNQSRSGPISPASIPGSQMPPQPPGSQSESSSHPALSQSPMPQERGFMAGTQRNPQMAQYGPQQTGPSMSPHPSPGGQMHAGISSFQQSNSSGTYGPQMSQYGPQGNYSRPPAYSGVPSASYSGPGPGMGISANNQMHGQGPSQPCGAVPLGRMPSAGMQNRPFPGNMSSMPPSSPGMSQQGGPGMGPPMPTVNRKAQEAAAAVMQAAANSAQSRQGSFPGMNQSGLMASSSPYSQPMNNSSSLMNTQAPPYSMAPAMVNSSAASVGLADMMSPGESKLPLPLKADGKEEGTPQPESKSKKSSSSTTTGEKITKVYELGNEPERKLWVDRYLTFMEERGSPVSSLPAVGKKPLDLFRLYVCVKEIGGLAQVNKNKKWRELATNLNVGTSSSAASSLKKQYIQYLFAFECKIERGEEPPPEVFSTGDTKKQPKLQPPSPANSGSLQGPQTPQSTGSNSMAEVPGDLKPPTPASTPHGQMTPMQGGRSSTISVHDPFSDVSDSSFPKRNSMTPNAPYQQGMSMPDVMGRMPYEPNKDPFGGMRKVPGSSEPFMTQGQMPNSSMQDMYNQSPSGAMSNLGMGQRQQFPYGASYDRRHEPYGQQYPGQGPPSGQPPYGGHQPGLYPQQPNYKRHMDGMYGPPAKRHEGDMYNMQYSSQQQEMYNQYGGSYSGPDRRPIQGQYPYPYSRERMQGPGQIQTHGIPPQMMGGPLQSSSSEGPQQNMWAARNDMPYPYQNRQGPGGPTQAPPYPGMNRTDDMMVPDQRINHESQWPSHVSQRQPYMSSSASMQPITRPPQPSYQTPPSLPNHISRAPSPASFQRSLENRMSPSKSPFLPSMKMQKVMPTVPTSQVTGPPPQPPPIRREITFPPGSVEASQPVLKQRRKITSKDIVTPEAWRVMMSLKSGLLAESTWALDTINILLYDDSTVATFNLSQLSGFLELLVEYFRKCLIDIFGILMEYEVGDPSQKALDHNAARKDDSQSLANDSGKEEEDAECIDDDEEDEEDEEEDSEKTESDEKSSIALTAPDAAADPKEKPKQASKFDKLPIKIVKKNNLFVVDRSDKLGRVQEFNSGLLHWQLGGGDTTEHIQTHFESKMEIPPRRRPPPPLSSAGRKKEQEGKGDSEEQQEKSIIATIDDVLSARPGALPEDANPGPQTESSKFPFGIQQAKSHRNIKLLEDEPRSRDETPLCTIAHWQDSLAKRCICVSNIVRSLSFVPGNDAEMSKHPGLVLILGKLILLHHEHPERKRAPQTYEKEEDEDKGVACSKDEWWWDCLEVLRDNTLVTLANISGQLDLSAYTESICLPILDGLLHWMVCPSAEAQDPFPTVGPNSVLSPQRLVLETLCKLSIQDNNVDLILATPPFSRQEKFYATLVRYVGDRKNPVCREMSMALLSNLAQGDALAARAIAVQKGSIGNLISFLEDGVTMAQYQQSQHNLMHMQPPPLEPPSVDMMCRAAKALLAMARVDENRSEFLLHEGRLLDISISAVLNSLVASVICDVLFQIGQL

SEQ ID NO: 6208 - protein, 196 aa, Homo sapiens
MEKRMTILYGECHNQGLGFANAATDARSSVRSAMVNPTVFDIAVDGKPLGRVSFEPFADKVPKAAENFRALSNVEKGFGYKGSCFHRIIPGFMCQGGDFTCHNGTGGKYTCGEKFDDESFVLKHTHPGILSMANAGPNTNGSQCFICTAKTEWLDGNPVVFGKVKEGMNIVEAMGHFGSENGKTSKKITIADCGQL

SEQ ID NO: 6209 - protein, 936 aa, Homo sapiens
MLRPEISSTSPSAPAVSPSSGETRSPQGPRYNFGLQETPQSRPSVQVVSASTCPGTSGAAGDRSSSSSSLPCPAPNSRPAQGSYFGNKRAYAENTVASNFTFGASSSSARDTNYPQTLKTPLSTGNPQRSGYKSWTPQVGYSASSSSAISAHSPSVIVAVVEGRGLARGEIGMASIDLKNPQIILSQFADNTTYAKVITKLKILSPLEIIMSNTACAVGNSTKLFTLITENFKNVNFTTIQRKYFNETKGLEYIEQLCIAEFSTVLMEVQSKYYCLAAVAALLKYVEFIQNSVYAPKSLKICFQGSEQTAMIDSSSAQNLELLINNQDYRNNHTLFGVLNYTKTPGGSRRLRSNILEPLVDIETINMRLDCVQELLQDEELFFGLQSVISRFLDTEQLLSVLVQIPKQDTVNAAESKITNLIYLKHTLELVDPLKIAMKNCNTPLLRAYYGSLEDKRFGIILEKIKTVINDDARYMKGCLNMRTQKCYAVRSNINEFLDIARRTYTEIVDDIAGMISQLGEKYSLPLRTSFSSARGFFIQMTTDCIALPSDQLPSEFIKISKVKNSYSFTSADLIKMNERCQESLREIYHMTYMIVCKLLSEIYEHIHCLYKLSDTVSMLDMLLSFAHACTLSDYVRPEFTDTLAIKQGWHPILEKISAEKPIANNTYVTEGSNFLIITGPNMSGKSTYLKQIALCQIMAQIGSYVPAEYSSFRIAKQIFTRISTDDDIETNSSTFMKEMKEIAYILHNANDKSLILIDELGRGTNTEEGIGICYAVCEYLLSLKAFTLFATHFLELCHIDALYPNVENMHFEVQHVKNTSRNKEAILYTYKLSKGLTEEKNYGLKAAEVSSLPPSIVLDAKEITTQITRQILQNQRSTPEMERQRAVYHLATRLVQTARNSQLDPDSLRIYLSNLKKKYKEDFPRTEQVPEKTEE

SEQ ID NO: 6210 - protein, 707 aa, Homo sapiens
MSSGSSLGSLASSRGSLNTSSRGSLNSLSSTELYYSSQSDQIDVDYQYKLDFLLQEKSGYIPSGPITTIHENEVVKSPSQPGQSGLCGVAAAATGHTPPLAEAPKSVASLSSRSSLSSLSPPGSPLVLEGTFPMSSSHDASLHQFTADFEDYVEKSLPKRRVIHLLGEKTTCVSAAVSDESVAGDSGVYEAFVKQPSEMEDVTYSEEDVAIVETAQVQIGLRYNAKSSSFMVIIAQLRNLHAFLIPHTSKVYFRVAVLPSSTDVSCLFRTKVHPPTESILFNDVFRVAISQTALQQKTLRVDLCSVSKHRREECLAGTQISLADLPFSSEFFTLWYNLLPSKQMPCKKNEENEDSVFQPNQPLVDSIDLDAVSALLARTSAELLAVEQELAQEEEEESGQEEPRGPDGDWLTMLREASHEIVAEKEAEVKLPEDSSCTEDLSSCTSVPEMNEDGNRKESNCAKDLRSQPPTRIPTLVDKETNTDEAANDNMAVRPKERSSLSSRQHPFVRSSVIVRSQTFSPGERNQYICRLNRSDSDSSTLAKKSLFVRNSTERRSLRVKRTVCQSVLRRTTQECPVRTSLDLELDLQASLTRQSRLNDELQALRDLRQKLEELKAQGETDLPPGVLEDERFQRLLKQAEKQAEQSKEEQKQGLNAEKLMRQVSKDVCRLREQSQKVPRQVQSFREKIAYFTRAKISIPSLPADDV

SEQ ID NO: 6211 - protein, 489 aa, Homo sapiens
MDDDLMLALRLQEEWNLQEAERDHAQESLSLVDASWELVDPTPDLQALFVQFNDQFFWGQLEAVEVKWSVRMTLCAGICSYEGKGGMCSIRLSEPLLKLRPRKDLVETLLHEMIHAYLFVTNNDKDREGHGPEFCKHMHRINSLTGANITVYHTFHDEVDEYRRHWWRCNGPCQHRPPYYGYVKRATNREPSAHDYWWAEHQKTCGGTYIKIKEPENYSKKGKGKAKLGKEPVLAAENKDKPNRGEAQLVIPFSGKGYVLGETSNLPSPGKLITSHAINKTQDLLNQNHSANAVRLNSKIKVKFEQNGSSKNSHLVSPAVSNSHQNVLSNYFPRVSFANQKAFRGVNGSPRISVTVGNIPKNSVSSSSQRRVSSSKISLRNSSKVTESASVMPSQDVSGSEDTFPNKRPRLEDKTVFDNFFIKKEQIKSSGNDPKYSTTTAQNSSSSSSQSKMVNCPVCQNEVLESQINEHLDWCLEGDSIKVKSEESL

SEQ ID NO: 6212 - protein, 1316 aa, Homo sapiens
MDSQELKTLINYYCQERYFHHVLLVASEGIKRYGSDPVFRFYHAYGTLMEGKTQEALREFEAIKNKQDVSLCSLLALIYAHKMSPNPDREAILESDARVKEQRKGAGEKALYHAGLFLWHIGRHDKAREYIDRMIKISDGSKQGHVLKAWLDITRGKEPYTKKALKYFEEGLQDGNDTFALLGKAQCLEMRQNYSGALETMNQIIVNFPSFLPAFVKKMKLQLALQDWDQTVETAQRLLLQDSQNVEALRMQALYYVCREGDIEKASTKLENLGNALDAMEPQNAQLFYNITLAFSRTCGRSQLILQKIQTLLERAFSLNPQQSEFATELGYQMILQGRVKEALKWYKTAMTLDETSVSALVGFIQCQLIEGQLQDADQQLEFLNEIQQSIGKSAELIYLHAVLAMKKNKRQEEVINLLNDVLDTHFSQLEGLPLGIQYFEKLNPDFLLEIVMEYLSFCPMQPASPGQPLCPLLRRCISVLETVVRTVPGLLQTVFLIAKVKYLSGDIEAAFNNLQHCLEHNPSYADAHLLLAQVYLSQEKVKLCSQSLELCLSYDFKVRDYPLYHLIKAQSQKKMGEIADAIKTLHMAMSLPGMKRIGASTKSKDRKTEVDTSHRLSIFLELIDVHRLNGEQHEATKVLQDAIHEFSGTSEEVRVTIANADLALAQGDIERALSILQNVTAEQPYFIEAREKMADIYLKHRKDKMLYITCFREIAERMANPRSFLLLGDAYMNILEPEEAIVAYEQALNQNPKDGTLASKMGKALIKTHNYSMAITYYEAALKTGQKNYLCYDLAELLLKLKWYDKAEKVLQHALAHEPVNELSALMEDGRCQVLLAKVYSKMEKLGDAITALQQARELQARVLKRVQMEQPDAVPAQKHLAAEICAEIAKHSVAQRDYEKAIKFYREALVHCETDNKIMLELARLYLAQDDPDSCLRQCALLLQSDQDNEAATMMMADLMFRKQDYEQAVFHLQQLLERKPDNYMTLSRLIDLLRRCGKLEDVPRFFSMAEKRNSRAKLEPGFQYCKGLYLWYTGEPNDALRHFNKARKDRDWGQNALYNMIEICLNPDNETVGGEVFENLDGDLGNSTEKQESVQLAVRTAEKLLKELKPQTVQGHVQLRIMENYCLMATKQKSNVEQALNTFTEIAASEKEHIPALLGMATAYMILKQTPRARNQLKRIAKMNWNAIDAEEFEKSWLLLADIYIQSAKYDMAEDLLKRCLRHNRSCCKAYEYMGYIMEKEQAYTDAALNYEMAWKYSNRTNPAVGYKLAFNYLKAKRYVDSIDICHQVLEAHPTYPKIRKDILDKARASLRP

SEQ ID NO: 6213 - protein, 1102 aa, Homo sapiens
MNHQQQQQQQKAGEQQLSEPEDMEMEAGDTDDPPRITQNPVINGNVALSDGHNTAEEDMEDDTSWRSEATFQFTVERFSRLSESVLSPPCFVRNLPWKIMVMPRFYPDRPHQKSVGFFLQCNAESDSTSWSCHAQAVLKIINYRDDEKSFSRRISHLFFHKENDWGFSNFMAWSEVTDPEKGFIDDDKVTFEVFVQADAPHGVAWDSKKHTGYVGLKNQGATCYMNSLLQTLFFTNQLRKAVYMMPTEGDDSSKSVPLALQRVFYELQHSDKPVGTKKLTKSFGWETLDSFMQHDVQELCRVLLDNVENKMKGTCVEGTIPKLFRGKMVSYIQCKEVDYRSDRREDYYDIQLSIKGKKNIFESFVDYVAVEQLDGDNKYDAGEHGLQEAEKGVKFLTLPPVLHLQLMRFMYDPQTDQNIKINDRFEFPEQLPLDEFLQKTDPKDPANYILHAVLVHSGDNHGGHYVVYLNPKGDGKWCKFDDDVVSRCTKEEAIEHNYGGHDDDLSVRHCTNAYMLVYIRESKLSEVLQAVTDHDIPQQLVERLQEEKRIEAQKRKERQEAHLYMQVQIVAEDQFCGHQGNDMYDEEKVKYTVFKVLKNSSLAEFVQSLSQTMGFPQDQIRLWPMQARSNGTKRPAMLDNEADGNKTMIELSDNENPWTIFLETVDPELAASGATLPKFDKDHDVMLFLKMYDPKTRSLNYCGHIYTPISCKIRDLLPVMCDRAGFIQDTSLILYEEVKPNLTERIQDYDVSLDKALDELMDGDIIVFQKDDPENDNSELPTAKEYFRDLYHRVDVIFCDKTIPNDPGFVVTLSNRMNYFQVAKTVAQRLNTDPMLLQFFKSQGYRDGPGNPLRHNYEGTLRDLLQFFKPRQPKKLYYQQLKMKITDFENRRSFKCIWLNSQFREEEITLYPDKHGCVRDLLEECKKAVELGEKASGKLRLLEIVSYKIIGVHQEDELLECLSPATSRTFRIEEIPLDQVDIDKENEMLVTVAHFHKEVFGTFGIPFLLRIHQGEHFREVMKRIQSLLDIQEKEFEKFKFAIVMTGRHQYINEDEYEVNLKDFEPQPGNMSHPRPWLGLDHFNKAPKRSRYTYLEKAIKIHN

SEQ ID NO: 6214 - protein, 255 aa, Homo sapiens
MALMQELYSTPASRLDSFVAQWLQPHREWKEEVLDAVRTVEEFLRQEHFQGKRGLDQDVRVLKVVKVGSFGNGTVLRSTREVELVAFLSCFHSFQEAAKHHKDVLRLIWKTMWQSQDLLDLGLEDLRMEQRVPDALVFTIQTRGTAEPITVTIVPAYRALGPSLPNSQPPPEVYVSLIKACGGPGNFCPSFSELQRNFVKHRPTKLKSLLRLVKHWYQQAHHPGSGRPHPQRGRRVQMGHRCSEGLPVPETGLLL

SEQ ID NO: 6215 - protein, 514 aa, Homo sapiens
MALMQELYSTPASRLDSFVAQWLQPHREWKEEVLDAVRTVEEFLRQEHFQGKRGLDQDVRVLKVVKVGSFGNGTVLRSTREVELVAFLSCFHSFQEAAKHHKDVLRLIWKTMWQSQDLLDLGLEDLRMEQRVPDALVFTIQTRGTAEPITVTIVPAYRALGPSLPNSQPPPEVYVSLIKACGGPGNFCPSFSELQRNFVKHRPTKLKSLLRLVKHWYQQYVKARSPRANLPPLYALELLTIYAWEMGTEEDENFMLDEGFTTVMDLLLEYEVICIYWTKYYTLHNAIIEDCVRKQLKKERPIILDPADPTLNVAEGYRWDIVAQRASQCLKQDCCYDNRENPISSWNVKRARDIHLTVEQRGYPDFNLIVNPYEPIRKVKEKIRRTRGYSGLQRLSFQVPGSERQLLSSRCSLAKYGIFSHTHIYLLETIPSEIQVFVKNPDGGSYAYAINPNSFILGLKQQIEDQQGLPKKQQQLEFQGQVLQDWLGLGIYGIQDSDTLILSKKKGEALFPAS

SEQ ID NO: 6216 - protein, 799 aa, Homo sapiens
MSERTQEQDFVIITVDDSDDNNDCSIEMVEVSETADNSTNDIADDSTYVTADNPTDDTATQPNFPGGNDGHHRPLQMSYGSGSVTQAGVQWHDHSSLQPQPLGLKQFFHLSLPSSWDDRRTPPCPVAHGDQIVSQINHPVHLRRYSYNSEEVDFPKRGRFYTPEVQSSISPPAERQETHAWASPAVTSLESAACHELQEADLSESLSYPRIVSSSSLQQYVAQGGSFPCFGMPWNFISGGAESTNAVISFANATTAVPMAVLSRRESSLANNPGVVNYSALPENENVGPGRALSSFCFHPNLEMPERPANSSKNSTETANYPTLMGNYNGQNTASLSVFIPPYFAEKIILTEMPGTTETNVENNSQTVYYPALSGNTSAPYPASSYLPITSNFESGPQMSYGTMSYSTEMKNNCDQDDASASACLTPDFALLPLNILVKVDTNTENSVNTMNRSTLLDSDSGQDSSSSSVCIPPKYGYLGDPKRNVRVLKIHLLAVQNMAKPKQAACYLVRILFSKEILISSSVDIHLKDSQSLDPNKMAALREYLATTFPTCDLHEHGKDWQDCISGINSMIYCLCSEGKSTPKTVRKNKKRTNRVASASADRNDQRGRDGGEGCSWMFQPMNNSKMRVKRNLQPNSNAIPEGMREPSTDNPEEPGEAWSYFGRPWRNIRMPCSVLTLAKTKSCASLSARYLIQKLFTKDVLVQSNVYGNLKHGLCALDPNKISALREFLQENYPICDLSENGRDWKSCVTSINSGIRSLRHDVRRAEARSQSLPAVTPPELEQESKPGDPDATDPST

SEQ ID NO: 6217 - protein, 323 aa, Homo sapiens
MYHNSSQKRHWTFSSEEQLARLRADANRKFRCKAVANGKVLPNDPVFLEPHEEMTLCKYYEKRLLEFCSVFKPAMPRSVVGTACMYFKRFYLNNSVMEYHPRIIMLTCAFLACKVDEFNVSSPQFVGNLRESPLGQEKALEQILEYELLLIQQLNFHLIVHNPYRPFEGFLIDLKTRYPILENPEILRKTADDFLNRIALTDAYLLYTPSQIALTAILSSASRAGITMESYLSESLMLKENRTCLSQLLDIMKSMRNLVKKYEPPRSEEVAVLKQKLERCHSAELALNVITKKRKGYEDDDYVSKKSKHEEEEWTDDDLVESL

SEQ ID NO: 6218 - protein, 623 aa, Homo sapiens
MNRYTTMRQLGDGTYGSVLMGKSNESGELVAIKRMKRKFYSWDECMNLREVKSLKKLNHANVIKLKEVIRENDHLYFIFEYMKENLYQLMKDRNKLFPESVIRNIMYQILQGLAFIHKHGFFHRDMKPENLLCMGPELVKIADFGLARELRSQPPYTDYVSTRWYRAPEVLLRSSVYSSPIDVWAVGSIMAELYMLRPLFPGTSEVDEIFKICQVLGTPKKSDWPEGYQLASSMNFRFPQCVPINLKTLIPNASNEAIQLMTEMLNWDPKKRPTASQALKHPYFQVGQVLGPSSNHLESKQSLNKQLQPLESKPSLVEVEPKPLPDIIDQVVGQPQPKTSQQPLQPIQPPQNLSVQQPPKQQSQEKPPQTLFPSIVKNMPTKPNGTLSHKSGRRRWGQTIFKSGDSWEELEDYDFGASHSKKPSMGVFKEKRKKDSPFRLPEPVPSGSNHSTGENKSLPAVTSLKSDSELSTAPTSKQYYLKQSRYLPGVNPKKVSLIASGKEINPHTWSNQLFPKSLGPVGAELAFKRSNAGNLGSYATYNQSGYIPSFLKKEVQSAGQRIHLAPLNATASEYTWNTKTGRGQFSGRTYNPTAKNLNIVNRAQPIPSVHGRTDWVAKYGGHR

SEQ ID NO: 6219 - protein, 666 aa, Homo sapiens
MSPTPPLFSLPEARTRFTKSTREALNNKNIKPLLSTFSQVPGSENEKKCTLDQAFRGILEEEIINHSSCENVLAIISLAIGGVTEGICTASTPFVLLGDVLDCLPLDQCDTIFTFVEKNVATWKSNTFYSAGKNYLLRMCNDLLRRLSKSQNTVFCGRIQLFLARLFPLSEKSGLNLQSQFNLENVTVFNTNEQESTLGQKHTEDREEGMDVEEGEMGDEEAPTTCSIPIDYNLYRKFWSLQDYFRNPVQCYEKISWKTFLKYSEEVLAVFKSYKLDDTQASRKKMEELKTGGEHVYFAKFLTSEKLMDLQLSDSNFRRHILLQYLILFQYLKGQVKFKSSNYVLTDEQSLWIEDTTKSVYQLLSENPPDGERFSKMVEHILNTEENWNSWKNEGCPSFVKERTSDTKPTRIIRKRTAPEDFLGKGPTKKILMGNEELTRLWNLCPDNMEACKSETRQVEHFSNEVEHMPTLEEFFEEAIEQADPENMVENEYKAVNNSNYGWRALRLLARRSPHFFQPTNQQFKSLPEYLENMVIKLAKELPPPSEEIKTGEDEDEEDNDALLKENESPDVRRDKPVTGEQIEVFANKLGEQWKILAPYLEMKDSEIRQIECDSEDMKMRAKQLLVAWQDQEGVHATPENLINALNKSGLSDLAESLTNDNETNS

SEQ ID NO: 6220 - protein, 502 aa, Homo sapiens
VCYRKLHHLQVIILDNNPLQVPPAQICLKGKVHIFKYLNIQACCRMDKKPDSLDLPSLSKRMPSQPLTDSMEDFYPNKNHGPDSGIGSDNGEKRLSTTEPSDDDTVSLHSQVSESNREQTSRNDSHIIGSKTDSQKDQEVYDFVDPNTEDVAVPEQGNAHIGSFVSFFKGKEKCSEKSRKNEELGDEKRLEKEQLLAEEEDDDLKEVTDLRKIAAQLLQQEQKNRILNHSTSVMRNKPKQTVECEKSVSADEVNSPLSPLTWQPLENQKDQIDEQPWPESHPIIWQSEERRRSKQIRKEYFKYKSMRKSSSGNENDEQDSDNANMSTQSPVSSEEYDRTDGFSHSPFGLKPRSAFSRSSRQEYGAADPGFTMRRKMEHLREEREQIRQLRNNLESRLKVILPDDIGAALMDGVVLCHLANHIRPRSVASIHVPSPAVPKLSMAKCRRNVENFLDACKKLGVSQERLCLPHHILEERGLVKVGVTVQALLELPTTKASQLSVA

SEQ ID NO: 6221 - protein, 1531 aa, Homo sapiens
MQVNTLFETSQVPDWSDPPQVQVQETVRETISCSQMPAFSEPAGEESPFTGTTTISFSNLGGVHKENASLAQHSEVKPCTCGPQQEEKQDRDGNIPDNFREDLKYEQSISEANDETMSPGVFSRHLPKDARADFREPVAVSVASPEPTDTALTLENVCDEPRDREAVCAMECFEASDQGTCFDTIDSLVGTPVDNYSPQEICSVDTELAEGQNKVSDLCSSNDKTLEVFFQTQVSETSVSTCKSSKDGNSVMSPLFISTFTLNISHTASEGATGENLAKVEKSTYPLASTVHAGQEQPSPSNSGGLDETQLLSSENNPLVQFKEGGDKSPSPSAADTTATPASYSSIVSFPWEKPTTLTANNECFQATRETVTIATEVHPAKYLAVSIPEDKHAGGTEERFPRASHEKVSQFPSQVQVDHILSGATIKSTKELLCRAPSVPGVPHHVLQLPEGEGFCSNSPLQVDNLSGDKSQTVDRADFRSYEENFQERGSETKQGVQQQSLSQQGSLSAPDFQQSLPTTSAAQEERNLVPTAPSPASSREGAGQRSGWGTRVSVVAETAGEEDSQALSNVPSLSDILLEESKEYRPGNWEAGNKLKIITLEASASEIWPPRQLTNSESKASDGGLIIPDKVWAVPDSLKADAVVPELAPSEIAALAHSPEDAESALADSRESHKGEEPTISVHWRSLSSRGFSQPRLLESSVDPVDEKELSVTDSLSAASETGGKENVNNVSQDQEEKQLKMDHTAFFKKFLTCPKILESSVDPIDEISVIEYTRAGKPEPSETTPQGAREGGQSNDGNMGHEAEIQSAILQVPCLQGTILSENRISRSQEGSMKQEAEQIQPEEAKTAIWQVLQPSEGGERIPSGCSIGQIQESSDGSLGEAEQSKKDKAELISPTSPLSSCLPIMTHSSLGVDTHNSTGQIHDVPENDIVEPRKRQYVFPVSQKRGTIENERGKPLPSSPDLTRFPCTSSPEGNVTDFLISHKMEEPKIEVLQIGETKPPSSSSSSAKTLAFISGERELEKAPKLLQDPCQKGTLGCAKKSREREKSLEARAGKSPGTLTAVTGSEEVKRKPEAPGSGHLAEGVKKKILSRVAALRLKLEEKENIRKNSAFLKKMPKLETSLSHTEEKQDPKKPSCKREGRAPVLLKKIQAEMFPEHSGNVKLSCQFAEIHEDSTICWTKDSKSIAQVQRSAGDNSTVSFAIVQASPKDQGLYYCCIKNSYGKVTAEFNLTAEVLKQLSSRQDTKGCEEIEFSQLIFKEDFLHDSYFGGRLRGQIATEELHFGEGVHRKAFRSTVMHGLMPVFKPGHACVLKVHNAIAYGTRNNDELIQRNYKLAAQECYVQNTARYYAKIYAAEAQPLEGFGEVPEIIPIFLIHRPENNIPYATVEEELIGEFVKYSIRDGKEINFLRRESEAGQKCCTFQHWVYQKTSGCLLVTDMQGVGMKLTDVGIATLAKGYKGFKGNCSMTFIDQFKALHQCNKYCKMLGLKSLQNNNQKQKQPSIGKSKVQTNSMTVKKAGPETPGEKKT

SEQ ID NO: 6222 - protein, 750 aa, Homo sapiens
AVRAEPGLEELSSGLRAHSPSATTVCEPEAQGSASGCRYAAHPHWGLGGAAAAGGSWEPQPPRPVCEPAGRGKPHPPAAPRSPLLPGSRRRPQAAQPGARARTSPPPASARNMAARPAATLAWSLLLLSSALLREGCRARFVAERDSEDDGEEPVVFPESPLQSPTVLVAVLARNAAHTLPHFLGCLERLDYPKSRMAIWAATDHNVDNTTEIFREWLKNVQRLYHYVEWRPMDEPESYPDEIGPKHWPTSRFAHVMKLRQAALRTAREKWSDYILFIDVDNFLTNPQTLNLLIAENKTIVAPMLESRGLYSNFWCGITPKAKNTTHLFALLQGFYKRTPDYVQIREWKRTGCFPVPMVHSTFLIDLRKEASDKLTFYPPHQDYTWTFDDIIVFAFSSRQAGIQMYLCNREHYGYLPIPLKPHQTLQEDIENLIHVQIEAMIDRPPMEPSQYVSVVPKYPDKMGFDEIFMINLKRRKDRRDRMLRTLYEQEIEVKIVEAVDGKALNTSQLKALNIEMLPGYRDPYSSRPLTRGEIGCFLSHYSVWKEVIDRELEKTLVIEDDVRFEHQFKKKLMKLMDNIDQAQLDWELIYIGRKRMQVKEPEKAVPNVANLVEADYSYWTLGYVISLEGAQKLVGANPFGKMLPVDEFLPVMYNKHPVAEYKEYYESRDLKAFSAEPLLIYPTHYTGQPGYLSDTETSTIWDNETVATDWDRTHAWKSRKQSRIYSNAKNTEALPPPTSLDTVPSRDEL

SEQ ID NO: 6223 - protein, 395 aa, Homo sapiens
MESKRLRLLQEEDRRKKIARMGFNASSMLRKSQLGFLNVTNYCHLAHELRLSCMERKKVQIRSMDPSALASDRFNLILADTNSDRLFTVNDVKVGGSKYGIINLQSLKTPTLKVFMHENLYFTNRKVNSVCWASLNHLDSHILLCLMGLAETPGCATLLPASLFVNSHPGIDRPGMLCSFRIPGAWSCAWSLNIQANNCFSTGLSRRVLLTNVVTGHRQSFGTNSDVLAQQFALMAPLLFNGCRSGEIFAIDLRCGNQGKGWKATRLFHDSAVTSVRILQDEQYLMASDMAGKIKLWDLRTTKCVRQYEGHVNEYAYLPLHVHEEEGILVAVGQDCYTRIWSLHDARLLRTIPSPYPASKADIPSVAFSSRLGGSRGAPGLLMAVGQDLYCYSYS

SEQ ID NO: 6224 - protein, 497 aa, Homo sapiens
MNKSRWQSRRRHGRRSHQQNPWFRLRDSEDRQVSDSRAAQPAHDSGHGDDESPSTSSGTAGTSSVPELPGFYFDPEKKRYFRLLPGHNNCNPLTKESIRQKEMESKRLRLLQEEDRRKKIARMGFNASSMLRKSQLGFLNVTNYCHLAHELRLSCMERKKVQIRSMDPSALASDRFNLILADTNSDRLFTVNDVKVGGSKYGIINLQSLKTPTLKVFMHENLYFTNRKVNSVCWASLNHLDSHILLCLMGLAETPGCATLLPASLFVNSHPGIDRPGMLCSFRIPGAWSCAWSLNIQANNCFSTGLSRRVLLTNVVTGHRQSFGTNSDVLAQQFALMAPLLFNGCRSGEIFAIDLRCGNQGKGWKATRLFHDSAVTSVRILQDEQYLMASDMAGKIKLWDLRTTKCVRQYEGHVNEYAYLPLHVHEEEGILVAVGQDCYTRIWSLHDARLLRTIPSPYPASKADIPSVAFSSRLGGSRGAPGLLMAVGQDLYCYSYS

SEQ ID NO: 6225 - protein, 202 aa, Homo sapiens
MAKAYDHLFKLLLIGDSGVGKTCLIIRFAEDNFNNTYISTIGIDFKIRTVDIEGKKIKLQVWDTAGQERFKTITTAYYRGAMGIILAYDITDEKSFENIQNWMKSIMENASAGVEHLLLGNKCDMEAKRKVQKEQADKLAREHGIRFFETSAKSSMNVDEAFSSLARDILLKSGGRRSGNGNKPPSTDLKTCDIKNTNKCSL

SEQ ID NO: 6226 - protein, 217 aa, Homo sapiens
SSNLIHHQRIHSGEKPYKCKECGKAFNRQSNLIQHQRIHSGEKPYDCKECGKAFSTQLFLIQHQRIHTGEKPYECNECAKSFSLNRTLTVHQRIHTGEKPYRCNECGKSFSQCSQVIQHKRIHTGEKPYICNDDCGKAFSQSAHLIHHQRIHTGENPYECSECGKAFNVCSSLIQHHRIHTGEKPYECSDCGKAFSQHSQFIQHQRIHTGEKPYMCN

SEQ ID NO: 6227 - protein, 653 aa, Homo sapiens
HIVVSFEDVAVPLSQEEWDCLIPAQRGLYKDVMMGTYGNLLSLGLQASKPDVISRLERGDEPPSHPENSGELELEAQERRQSSVLSENQRMNNPERWFESTGCGKTYNQNRAFNQHQRFHSGEKTYEHNECGKAFSWPSILSKHQRIHTGKKLYTCEDCGKSFSVHSYFIQHCKIHTREKPYECIKCGKAFSTHSSYVQHLKIHTGEKHHECNQCGKAFSHSSNLIHHQRIHSGEKPYKCKECGKAFNRQSNLIQHQRIHSGEKPYDCKECGKAFSTQLFLIQHQRIHTGEKPYECNECAKSFSLNRTLTVHQRIHTGEKPYRCNECGKSFSQCSQVIQHKRIHTGEKPYICNDECGKAFRRSSNLIKHHRTHTGEKPFECGECGKAFSQSAHLRKHQRVHTGEKPYECNDCGKPFSRVSNLIKHHRVHTGEKPYKCSDCGKAFSQSSSLIQHRRIHTGEKPHVCNVCGKAFSYSSVLRKHQIIHTGEKPYRCSVCGKAFSHSSALIQHQGVHTGDKPYACHECGKTFGRSSNLILHQRVHTGEKPYECTECGKTFSQSSTLIQHQRIHNGLKPHECNQCGKAFNRSSNLIHHQKVHTGEKPYTCVECGKGFSQSSHLIQHQIIHTGERPYKCSECGKAFSQRSVLIQHQRIH

SEQ ID NO: 6228 - protein, 631 aa, Homo sapiens
MIPKQDISEELESQRAKSEDHVRNIFKETEEMSKTEGKLENCWRKYAVEGVKNSFSQKSNFREITMRYVKTLSRENGQKFNAVGENCITDSNPAKHLRGSREESLHPSVSSVENLQQHEDLINLQSFQLGERAYQTDVLVKVPRQSSVLSENQRMNNPERWFESTGCGKTYNQNRAFNQHQRFHSGEKTYEHNECGKAFSWPSILSKHQRIHTGKKLYTCEDCGKSFSVHSYFIQHCKIHTREKPYECIKCGKAFSTHSSYVQHLKIHTGEKHHECNQCGKAFSHSSNLIHHQRIHSGEKPYKCKECGKAFNRQSNLIQHQRIHSGEKPYDCKECGKAFSTQLFLIQHQRIHTGEKPYECNECAKSFSLNRTLTVHQRIHTGEKPYRCNECGKSFSQCSQVIQHKRIHTGEKPYICNECGKSFGARLSLIQHQRIHTGEKPYGCSRIHNGDKPYECHKCGKAFSQGSHLIQHQRSHIGEKPYECNECGKTFGQISTLIKHERTHNGEKPYECSDCGKAFSQSAHLIHHQRIHTGENPYECSECGKAFNVCSSLIQHHRIHTGEKPYECSDCGKAFSQHSQFIQHQRIHTGEKPYMCNECEKSFSACLSLIQHKRIHTGEKPYVCAKCGKSF

SEQ ID NO: 6229 - protein, 684 aa, Homo sapiens
VVSFEDVAVPLSQEEWDCLIPAQRGLYKDVMMGTYGNLLSLGCDSRIEKEEMIPKQDISEELESQRAKSEDHVRNIFKETEEMSKTEGNKHQRIHTGKKLYTCEDCGKSFSVHSYFIQHCKIHTREKPYECIKCGKAFSTHSSYVQHLKIHTGEKHHECNQCGKAFSHSSNLIHHQRIHSGEKPYKCKECGKAFNRQSNLIQHQRIHSGEKPYDCKECGKAFSTQLFLIQHQRIHTGEKPYECNECAKSFSLNRTLTVHQRIHTGEKPYRCNECGKSFSQCSQVIQHKRIHTGEKPYICNDERPYMCNECGKAFSQNSSLKKHQKSHMSEKPYECNECGKAFRRSSNLIQHQRIHSGEKPYVCSECGKAFRRSSNLIKHHRTHTGEKPFECGECGKAFSQSAHLRKHQRVHTGEKPYECNDCGKPFSRVSNLIKHHRVHTGEKPYKCSDCGKAFSQSSSLIQHRRIHTGEKPHVCNVCGKAFSYSSVLRKHQIIHTGEKPYRCSVCGKAFSHSSALIQHQGVHTGDKPYACHECGKTFGRSSNLILHQRVHTGEKPYECTECGKTFSQSSTLIQHQRIHNGLKPHECNQCGKAFNRSSNLIHHQKVHTGEKPYTCVECGKGFSQSSHLIQHQIIHTGERPYKCSECGKAFSQRSVLIQHQRIHTGVKPYDCAACGKAFSQRSKL

SEQ ID NO: 6230 - protein, 434 aa, Homo sapiens
MKRNSLSVENKIVQLSGAAKQPKVGFYSSLNQTHTHTVLLDWGSLPHHVVLQIFQYLPLLDRACASSVCRRWNEVFHISDLWRKFEFELNQSATSSFKSTHPDLIQQIIKKHFAHLQYVSFKVDSSAESAEAACDILSQLVNCSIQTLGLISTAKPSFMNVSESHFVSALTVVFINSKSLSSIKIEDTPVDDPSLKILVANNSDTLRLPKMSSCPHVSSDGILCVADRCQGLRELALNYYILTDELFLALSSETHVNLEHLRIDVVSENPGQIKFHAVKKHSWDALIKHSPRVNVVMHFFLYEEEFETFFKEETPVTHLYFGRSVSKVVLGRVGLNCPRLIELVVCANDLQPLDNELICIAEHCTNLTALGLSKCEVSCSAFIRFVRLCERRLTQLSVMEEVLIPDEDYSLDEIHTEVSKYLGRVWFPDVMPLW

SEQ ID NO: 6231 - protein, 462 aa, Homo sapiens
EGKGPAPSARPESGPRGGCASRPRPLRPGSEQQQEERQRPGVGRGWGGGTGRREGAGAGRGPRRIKMAMSLIQACCSLALSTWLLSFCFVHLLCLDFTVAEKEEWYTAFVNITYAEPAPDPGAGAAGGGGAELHTEKTECGRYGEHSPKQDARGEVVMASSAHDRLACDPNTKFAAPTRGKNWIALIPKGNCTYRDKIRNAFLQNASAVVIFNVGSNTNETITMPHAGVEDIVAIMIPEPKGKEIVSLLERNITVTMYITIGTRNLQKYRRLGDAAKKAISKLQIRTIKKGDKETESDFDNCAVCIEGYKPNDVVRILPCRHLFHKSCVDPWLLDHRTCPMCKMNILKALGIPPNADCMDDLPTDFEGSLGGPPTNQITGASDTTVNESSVTLDPAVRTVGALQVVQDTDPIPQEGDVIFTTNSEQEPAVSSDSDISLIMAMEVGLSDVELSTDQDCEEVKS

SEQ ID NO: 6232 - protein, 420 aa, Homo sapiens
MLRSQPRALEKRESTDVRTEARGDLSCRPLDFVGTFSNRWSYGITFGATANKVMFLFSEGYQPLQIPQWAQAFELLIGGIEVGLSHFPFFACLSSEFQLVSSILGFCYSDLGDRLGRDVHGGPGISPPKGDRFAVTIIQVSQCPHGQARRRPAGATEDEVARSAKKMDEIVQEKNTAGALGLLTELQNVLELLRSTGTGMLLNVSLKQSTDEEVTSLAKSFVKSWKTLPDEPSTEKDPNEKRIEPAMTSQNSKRNASNSVRMKYREMLAAALRTGDDCIEMGADEEELGSRIEEAVDPERGNTGMKYKNRVQSKISNLTDAKNPNLRKNASCGNIPPDLLARMSAEEMASDELKEMHKNLTKEAIREHQMAKTGGTQPDSLTCGKCKKNCTSTQVQACSVGEPMATFVDCNECGNQQKFC

SEQ ID NO: 6233 - protein, 1249 aa, Homo sapiens
QMIPSNSTRLPVAYQGNQGLNQSFSEQQVDWTQQCISKGLTYPDYRPPPKLYRYSPQSFLPDSTIQKQNFIPHTSLQVKNSQLPNSVLTLPSRQTSAVPSQQYATQTDKRPPPPPYNCRYGSQPLQSTQHITKHLSMEVPQSQEMLSSEIRTSFQQQWQNPNENVSTIGNFTNLKVNTNSKQPFNGPIRSSVDGVQTLAQTNEEKIMDSCNPTSNQVLDTSVAKEKLVRDIKTLVEIKQKFSELARKIKINKDLLMAAGCIKMTNTSYSEPAQNSKLSLKQTAKIQSGPQITPVMPENAERQTPTVVESAETNKTQCMLNSDIQEVNCRRFNQVDSVLPNPVYSEKRPMPDPSHDVKVLTSKTSAVEMTQAVLNTQLSSENVTKVEQNSPAVCETISVPKSMSTEEYKSKIQNENMLLLALLSQARKTQKTVLKDANQTIQDSKPDSCEMNPNTQMTGNQLNLKNMETPSTSNVSGRVLDNSFCSGQESSTKGMPAKSDSSCSMEVLATCLSLWKKQPSDTAKEKECDKLRTNTTAVGISKPANIHVKSPCSVVGNSNSQNKISNPSQQTALSMVMHNYESSGINITKGTELQIAVVSPLVLSEVKTLSVKGITPAVLPETVYPVIKEGSVCSLQNQLAENAKATAALKVDVSGPVASTATSTKIFPLTQKEKQNESTNGNSEVTPNVNQGKHNKLESAIHSPMNDQQISQESRNSTVVSSDTLQIDNICSLVEGDTSYNSQIAKIFSSLPLKMVEPQKPSLPNQQGIGSREPEKQLDNTTENKDFGFQKDKPVQCTDVSHKICDQSKSEPPLESSFNNLETNRVILEKSSLEHATEKSTANDTCSSAAIQEDIYPQEIDASSNYTPQDPARNEIHSDKAPVLYLHDQLSELLKEFPYGIEAVNTREGSVGQQTTYQTSEDQTADKTSSDSKDPADQIQITILSSEQMKEIFPEQDDQPYVVDKLAEPQKEEPITEVVSQCDLQAPAAGQSRDSVILDSEKDDIHCCALGWLSMVYEGVPQCQCNSIKNSSSEEEKQKEQCSPLDTNSCKQGERTSDRDVTVVQFKSLVNNPKTPPDGKSHFPELQDDSRKDTPKTKHKSLPRTEQELVAGQFSSKCDKLNPLQNHKRKKLRFHEVTFHSSNKMTASYEQASQETRQKKHVTQNSRPLKTKTAFLPNKDVYKKHSSLGQSLSPEKIKLKLKSVSFKQKRKLDQGNVLDMEVKKKKHDTQDAEKNDLASKGHSPHPQRLK

SEQ ID NO: 6234 - protein, 343 aa, Homo sapiens [sequence omitted]

SEQ ID NO: 6235 - protein, 165 aa, Homo sapiens [sequence omitted]

SEQ ID NO: 6236 - protein, 165 aa, Homo sapiens
MLPKFDPNEIKVVYLRCTGGEVGATSALAPKIGPLGLSPKKVGDDIAKAMGDWKGLRITVKLTIQNRQAQIEVVPSASAMIIKALKEPPRDRKKQKNIKHSGNITFDEIVNIARQMRHQSLARELSGTTKEILGTAQSVGCNVDGRHPHDIIDDINSGAVECPAS

SEQ ID NO: 6237 - protein, 166 aa, Homo sapiens
MPPKFDPNEIKVVYLRCTGGEVGATSALAPKIGPLGLSPKKVGDDIAKATGDWKGLRITVKLTIQNRQAQIEVVPSASALIIKALKEPPRDRKKQKNIKHSGNITFDEIVNIARQMRHRSLARELSGTIKEILGTAQSVGCNVDGRHPHDIIDDINSGAVECPAVS

SEQ ID NO: 6238 - protein, 166 aa, Homo sapiens
MAPKKAKKRAGGANSNVFSMFEQTQIQEFKEAFTIMDQNRDGFIDKNDLRDTFAALGRVNVKNEEIDEMIKEAPGPINFTVFLSMFGEKLKGADPEETILNAFKVFDPEGKGVLKADYVREMLTTQAERFSKEEVDQMFAAFPPDVTGNLDYKNLVHIITHGEEKD

SEQ ID NO: 6239 - protein, 431 aa, Homo sapiens
MQKATYYDNAAAALFGGYSSYPGSNGFGFDVPPQPPFQAATHLEGDYQRSACSLQSLGNAAPHAKSKELNGSCMRPGLAPETLSAPPGSPPPSAAPTSATSNSSNGGGPSKSGPPKCGPGTNSTLTKQIFPWMKESRQTSKLKNNSPGTAEGCGGGGGGGGGGGSGGSGGGGGGGGGGDKSPPGSAASKRARTAYTSAQLVELEKEFHFNRYLCRPRRVEMANLLNLSERQIKIWFQNRRMKYKKDQKAKGLASSSGGPSPAGSPPQPMQSTAGFMNALHSMTPSYESPSPPAFGKAHQNAYALPSNYQPPLKGCGAPQKYPPTPAPEYEPHVLQANGGAYGTPTMQGSPVYVGGGGYADPLPPPAGPSLYGLNHLSHHPSGNLDYNGAPPMAPSQHHGPCEPHPTYTDLSSHHAPPPQGRIQEAPKLTHL

SEQ ID NO: 6240 - protein, 204 aa, Homo sapiens
MNRVNDPLIFIRDIKPGLKNLNVVFIVLEIGRVTKTKDGHEVRSCKVADKTGSITISVWDEIGGLIQPGDIIRLTRGYASMWKGCLTLYTGRGGELQKIGEFCMVYSEVPNFSEPNPDYRGQQNKGAQSEQKNNSMNSNMGTGTFGPVGNGVHTGPESREHQFSHAGRSNGRGLINPQLQGTASNQTVMTTISNGRDPRRAFKR

SEQ ID NO: 6241 - protein, 1501 aa, Homo sapiens
MCKMAIIPDWLRSHPHTRKFTHSRPHSSPCRVYSRNGSPNKFRSSSTTAVANPTLSSLDVKRILFQKITDRGDELQKAFQLLDTGQNLTVSKSELRRIITDFLMPLTREQFQDVLAQIPLSTSGTVPYLAFLSRFGGIDLYINGIKRGGGNEMNCCRTLRELEIQVGEKVFKNIKTVMKAFELIDVNKTGLVRPQELRRVLETFCMKLRDEEYEKFSKHYNIHKDTAVDYNVFLKNLSINNDLNLRYCMGNQEVSLENQQAKNSKKERLLGSASSEDIWRNYSLDEIERNFCLQLSKSYEKVEKALSAGDPCKGGYVSFNYLKIVLDTFVYQIPRRIFIQLMKRFGLKATTKINWKQFLTSFHEPQGLQVSSKGPLTKRNSINSRNESHKENIITKLFRHTEDHSASLKKALLIINTKPDGPITREEFRYILNCMAVKLSDSEFKELMQMLDPGDTGVVNTSMFIDLIEENCRMRKTSPCTDAKTPFLLAWDSVEEIVHDTITRNLQAFYNMLRSYDLGDTGRIGRNNFKKIMHVFCPFLTNAHFIKLCSKIQDIGSGRILYKKLLACIGIDGPPTVSPVLVPKDQLLSEHLQKDEQQQPDLSERTKLTEDKTTLTKKMTTEEVIEKFKKCIQQQDPAFKKRFLDFSKEPNGKINVHDFKKVLEDTGMPMDDDQYALLTTKIGFEKEGMSYLDFAAGFEDPPMRGPETTPPQPPTPSKSYVNSHFITAEECLKLFPRRLKESFRDPYSAFFKTDADRDGIINMHDLHRLLLHLLLNLKDDEFERFLGLLGLRLSVTLNFREFQNLCEKRPWRTDEAPQRLIRPKQKVADSELACEQAHQYLVTKAKNRWSDLSKNFLETDNEGNGILRRRDIKNALYGFDIPLTPREFEKLWARYDTEGKGHITYQEFLQKLGINYSPAVHRPCAEDYFNFMGHFTKPQQLQEEMKELQQSTEKAVAARDKLMDRHQDISKAFTKTDQSKTNYISICKMQEVLEECGCSLTEGELTHLLNSWGVSRHDNAINYLDFLRAVENSKSTGAQPKEKEESMPINFATLNPQEAVRKIQEVVESSQLALSTAFSALDKEDTGFVKATEFGQVLKDFCYKLTDNQYHYFLRKLRIHLTPYINWKYFLQNFSCFLEETADEWAEKMPKGPPPTSPKATADRDILARLHKAVTSHYHAITQEFENFDTMKTNTISREEFRAICNRRVQILTDEQFDRLWNEMPVNAKGRLKYPDFLSRFSSETAATPMATGDSAVAQRGSSVPDVSEGTRSALSLPTQELRPGSKSQSHPCTPASTTVIPGTPPLQNCDPIESRLRKRIQGCWRQLLKECKEKDVARQGDINASDFLALVEKFNLDISKEECQQLIIKYDLKSNGKFAYCDFIQSCVLLLKAKESSLMHRMKIQNAHKMKEAGAETPSFYSALLRIQPKIVHCWRPMRRTFKSYDEAGTGLLSVADFRTVLRQYSINLSEEEFFHILEYYDKTLSSKISYNDFLRAFLQ

SEQ ID NO: 6242 - protein, 1349 aa, Homo sapiens
MNCCRTLRELEIQVGEKVFKNIKTVMKAFELIDVNKTGLVRPQELRRVLETFCMKLRDEEYEKFSKHYNIHKDTAVDYNVFLKNLSINNDLNLRYCMGNQEVSLENQQAKNSKKERLLGSASSEDIWRNYSLDEIERNFCLQLSKSYEKVEKALSAGDPCKGGYVSFNYLKIVLDTFVYQIPRRIFIQLMKRFGLKATTKINWKQFLTSFHEPQGLQVSSKGPLTKRNSINSRNESHKENIITKLFRHTEDHSASLKKALLIINTKPDGPITREEFRYILNCMAVKLSDSEFKELMQMLDPGDTGVVNTSMFIDLIEENCRMRKTSPCTDAKTPFLLAWDSVEEIVHDTITRNLQAFYNMLRSYDLGDTGRIGRNNFKKIMHVFCPFLTNAHFIKLCSKIQDIGSGRILYKKLLACIGIDGPPTVSPVLVPKDQLLSEHLQKDEQQQPDLSERTKLTEDKTTLTKKMTTEEVIEKFKKCIQQQDPAFKKRFLDFSKEPNGKINVHDFKKVLEDTGMPMDDDQYALLTTKIGFEKEGMSYLDFAAGFEDPPMRGPETTPPQPPTPSKSYVNSHFITAEECLKLFPRRLKESFRDPYSAFFKTDADRDGIINMHDLHRLLLHLLLNLKDDEFERFLGLLGLRLSVTLNFREFQNLCEKRPWRTDEAPQRLIRPKQKVADSELACEQAHQYLVTKAKNRWSDLSKNFLETDNEGNGILRRRDIKNALYGFDIPLTPREFEKLWARYDTEGKGHITYQEFLQKLGINYSPAVHRPCAEDYFNFMGHFTKPQQLQEEMKELQQSTEKAVAARDKLMDRHQDISKAFTKTDQSKTNYISICKMQEVLEECGCSLTEGELTHLLNSWGVSRHDNAINYLDFLRAVENSKSTGAQPKEKEESMPINFATLNPQEAVRKIQEVVESSQLALSTAFSALDKEDTGFVKATEFGQVLKDFCYKLTDNQYHYFLRKLRIHLTPYINWKYFLQNFSCFLEETADEWAEKMPKGPPPTSPKATADRDILARLHKAVTSHYHAITQEFENFDTMKTNTISREEFRAICNRRVQILTDEQFDRLWNEMPVNAKGRLKYPDFLSRFSSETAATPMATGDSAVAQRGSSVPDVSEGTRSALSLPTQELRPGSKSQSHPCTPASTTVIPGTPPLQNCDPIESRLRKRIQGCWRQLLKECKEKDVARQGDINASDFLALVEKFNLDISKEECQQLIIKYDLKSNGKFAYCDFIQSCVLLLKAKESSLMHRMKIQNAHKMKEAGAETPSFYSALLRIQPKIVHCWRPMRRTFKSYDEAGTGLLSVADFRTVLRQYSINLSEEEFFHILEYYDKTLSSKISYNDFLRAFLQ

SEQ ID NO: 6243 - protein, 225 aa, Homo sapiens
RRRILTHENLHIQDPILHRVECIQGMVPQISSDLLQIPLSTSGTVPYLAFLSRFGGIDLYINGIKRGGGNEMNCCRTLRELEIQVGEKVFKNIKTVMKAFELIDVNKTGLVRPQELRRVLETFCMKLRDEEYEKFSKHYNIHKDTAVDYNVFLKNLSINNDLNLRYCMGNQEVSLENQQAKNSKKERLLGSASSEDIWRNYSLDEIERNFCLQVRCFPKPQLPTE

SEQ ID NO: 6244 - protein, 866 aa, Homo sapiens [sequence omitted]

SEQ ID NO: 6245 - protein, 613 aa, Homo sapiens
YLIEPEKIQEMFPLLNMNKVLAGLYNPGDGHIDPYSLTMALAAGARKCGALLKYPAPVTSLKARSDGTWDVETPQGSMRANRIVNAAGFWAREVGKMIGLEHPLIPVQHQYVVTSTISEVKALKRELPVLRDLEGSYYLRQERDGLLFGPYESQEKMKVQDSWVTNGVPPGFGKELFESDLDRIMEHIKAAMEMVPVLKKADIINVVNGPITYSPDILPMVGPHQGVRNYWVAIGFGYGIIHAGGVGKYLSDWILHGEPPFDLIELDPNRYGKWTTTQYTEAKARESYGFNNIVGYPKEERFAGRPTQRVSGLYQRLESKCSMGFHAGWEQPHWFYKPGQDTQYRPSFRRTNWFEPVGSEYKQVMQRVAVTDLSPFGKFNIKGQDSIRLLDHLFANVIPKVGFTNISHMLTPKGRVYAELTVSHQSPGEFLLITGSGSELHDLRWIEEEAVKGGYDVEIKNITDELGVLGVAGPQARKVLQKLTSEDLSDDVFKFLQTKSLKVSNIPVTAIRISYTGELGWELYHRREDSVALYDAIMNAGQEEGIDNFGTYAMNALRLEKAFRAWGLEMNCDTNPLEAGLEYFVKLNKDQNSCFAHFKEENGWVSRWAIRPY

SEQ ID NO: 6246 - protein, 444 aa, Homo sapiens
MREIVLTQIGQCGNQIGAKFWEVISDEHAIDSAGTYHGDSHLQLERINVYYNEASGGRYVPRAVLVDLEPGTMDSVRSGPFGQVFRPDNFIFGQCGAGNNWAKGHYTEGAELMESVMDVVRKEAESCDCLQGFQLTHSLGGGTGSGMGTLLLSKIREEYPDRIINTFSILPSPKVSDTVVEPYNATLSVHQLIENADETFCIDNEALYDICSKTLKLPTPTYGDLNHLVSATMSGVTTCLRFPGQLNADLRKLAVNMVPFPRLHFFMPGFAPLTSRGSQQYRALTVAELTQQMFDAKNMMAACDPRHGRYLTAAAIFRGRMPMREVDEQMFNIQDKNSSYFADWLPNNVKTAVCDIPPRGLKMSATFIGNNTAIQELFKRVSEQFTAMFRRKAFLHWYTGEGMDEMEFTEAESNMNDLVSEYQQYQDATAEEEEDEEYAEEEVA

SEQ ID NO: 6247 - protein, 454 aa, Homo sapiens
IAITITEARQLVGENIDPVVTIEIGDEKKQSTVKEGTNSPFYNEYFVFDFIGPQVHLFDKIIKISVSIALVVIVVERWETFWALGTLWDNSAYLAGNRFRRASVSCVLIGSFKVDLGTVYNQPGHQFCNKWALLTDPGDIRTGTKGYLKCDISVMGKGDVLKTSPKTSDTEEPIEKNLLIPNGFPLERPWARFYVRLYKAEGLPKMNSSIMANVTKAFVGDSKDLVDPFVEVSFAGQMGRTTVQKNCADPVWHEQVIFKEMFPPLCRRVKIQVWDEGSMNDVALATHFIDLKKISNEQDGDKGFLPTFGPAWINLYGSPRNHSLMDDYQEMNEGFGEGVSFRGRILVEIAVEILSGRAQESKFSKALKELKLPSKDKDSKSSKGKDKADKTEDGKSQQASNKTNSTEVEVESFDVPPEVEKNEEFLLFGAFFEATMIDRKIGDKPISFEVSIGK

SEQ ID NO: 6248 - protein, 439 aa, Homo sapiens
MWLDHRAVSQVNRINETKHSVLQYVGGVMSVEMQAPKLLWLKENLREICWDKAGHFFDLPDFLSWKATGVTARSLCSLVCKWTYSAEKGWDDSFWKMIGLEDFVADNYSKIGNQVLPPGASLGNGLTPEAARDLGLLPGIAVAASLIDAHAGGLGVIGADVRGHGLICEGQPVTSRLAVICGTSSCHMGISKDPIFVPGVWGPYFSAMVPGFWLNEGGQSVTGKLIDHMVQGHAAFPELQVKATARCQSIYAYLNSHLDLIKKAQPVGFLTVDLHVWPDFHGNRSPLADLTLKGMVTGLKLSQDLDDLAILYLATVQAIALGTRFIIEAMEAAGHSISTLFLCGGLSKNPLFVQMHADITGMPVVLSQEVESVLVGAAVLGACASGDFASVQEAMAKMSKVGKVVFPRLQDKKYYDKKYQVFLKLVEHQKEYLAIMNDD

SEQ ID NO: 6249 - protein, 246 aa, Homo sapiens
MWLDHRAVSQVNRINETKHSVLQYVGGVMSVEMQAPKLLWLKENLREICWDKAGHFFDLPDFLSWKATGVTARSLCSLVCKWTYSAEKGWDDSFWKMIGLEDFVADNYSKIGNQVLPPGASLGNGLTPEAARDLGLLPGIAVAASLIDAHAGGLGVIGADVRGHGLICEGQPVTSRLAVICGTSSCHMGISKDPIFVPGVWGPYFSAMVPGFWLNEGGQSVTGKLIDHMVQGHAAFPELQVKATAR

SEQ ID NO: 6250 - protein, 1593 aa, Homo sapiens
MAAAAVVVPAEWIKNWEKSGRGEFLHLCRILSENKSHDSSTYRDFQQALYELSYHVIKGNLKHEQASNVLSDISEFREDMPSILADVFCILDIETNCLEEKSKRDYFTQLVLACLYLVSDTVLKERLDPETLESLGLIKQSQQFNQKSVKIKTKLFYKQQKFNLLREENEGYAKLIAELGQDLSGSITSDLILENIKSLIGCFNLDPNRVLDVILEVFECRPEHDDFFISLLESYMSMCEPQTLCHILGFKFKFYQEPNGETPSSLYRVAAVLLQFNLIDLDDLYVHLLPADNCIMDEHKREIAEAKQIVRKLTMVVLSSEKMDEREKEKEKEEEKVEKPPDNQKLGLLEALLKIGDWQHAQNIMDQMPPYYAASHKLIALAICKLIHITIEPLYRRVGVPKGAKGSPVNALQNKRAPKQAESFEDLRRDVFNMFCYLGPHLSHDPILFAKVVRIGKSFMKEFQSDGSKQEDKEKTEVILSCLLSITDQVLLPSLSLMDCNACMSEELWGMFKTFPYQHRYRLYGQWKNETYNSHPLLVKVKAQTIDRAKYIMKRLTKENVKPSGRQIGKLSHSNPTILFDYILSQIQKYDNLITPVVDSLKYLTSLNYDVLAYCIIEALANPEKERMKHDDTTISSWLQSLASFCGAVFRKYPIDLAGLLQYVANQLKAGKSFDLLILKEVVQKMAGIEITEEMTMEQLEAMTGGEQLKAEGGYFGQIRNTKKSSQRLKDALLDHDLALPLCLLMAQQRNGVIFQEGGEKHLKLVGKLYDQCHDTLVQFGGFLASNLSTEDYIKRVPSIDVLCNEFHTPHDAAFFLSRPMYAHHISSKYDELKKSEKGSKQQHKVHKYITSCEMVMAPVHEAVVSLHVSKVWDDISPQFYATFWSLTMYDLAVPHTSYEREVNKLKVQMKAIDDNQEMPPNKKKKEKERCTALQDKLLEEEKKQMEHVQRVLQRLKLEKDNWLLAKSTKNETITKFLQLCIFPRCIFSAIDAVYCARFVELVHQQKTPNFSTLLCYDRVFSDIIYTVASCTENEASRYGRFLCCMLETVTRWHSDRATYEKECGNYPGFLTILRATGFDGGNKADQLDYENFRHVVHKWHYKLTKASVHCLETGEYTHIRNILIVLTKILPWYPKVLNLGQALERRVHKICQEEKEKRPDLYALAMGYSGQLKSRKSYMIPENEFHHKDPPPRNAVASVQNGPGGGPSSSSIGSASKSDESSTEETDKSRERSQCGVKAVNKASSTTPKGNSSNGNSGSNSNKAVKENDKEKGKEKEKEKKEKTPATTPEARVLGKDGKEKPKEERPNKDEKARETKERTPKSDKEKEKFKKEEKAKDEKFKTTVPNAESKSTQEREREKEPSRERDIAKEMKSKENVKGGEKTPVSGSLKSPVPRSDIPEPEREQKRRKIDTHPSPSHSSTVKDSLIELKESSAKLYINHTPPPLSKSKEREMDKKDLDKSRERSREREKKDEKDRKERKRDHSNNDREVPPDLTKRRKEENGTMGVSKHKSESPCESPYPNEKDKEKNKSKSSGKEKGSDSFKSEKMDKISSGGKKESRHDKEKIEKKEKRDSSGGKEEKKHHKSSDKHR

SEQ ID NO: 6251 - protein, 1314 aa, Homo sapiens
MFVSDTVLKERLDPETLESLGLIKQSQQFNQKSVKIKTKLFYKQQKFNLLREENEGYAKLIAELGQDLSGSITSDLILENIKSLIGCFNLDPNRVLDVILEVFECRPEHDDFFISLLESYMSMCEPQTLCHILGFKFKFYQEPNGETPSSLYRVAAVLLQFNLIDLDDLYVHLLPADNCIMDEHKREIAEAKQIVRKLTMVVLSSEKMDEREKEKEKEEEKVEKPPDNQKLGLLEALLKIGDWQHAQNIMDQMPPYYAASHKLIALAICKLIHITIEPLYRRVGVPKGAKGSPVNALQNKRAPKQAESFEDLRRDVFNMFCYLGPHLSHDPILFAKVVRIGKSFMKEFQSDGSKQEDKEKTEVILSCLLSITDQVLLPSLSLMDCNACMSEELWGMFKTFPYQHRYRLYGQWKNETYNSHPLLVKVKAQTIDRAKYIMKRLTKENVKPSGRQIGKLSHSNPTILFDYILSQIQKYDNLITPVVDSLKYLTSLNYDVLAYCIIEALANPEKERMKHDDTTISSWLQSLASFCGAVFRKYPIDLAGLLQYVANQLKAGKSFDLLILKEVVQKMAGIEITEEMTMEQLEAMTGGEQLKAEGGYFGQIRNTKKSSQRLKDALLDHDLALPLCLLMAQQRNGVIFQEGGEKHLKLVGKLYDQCHDTLVQFGGFLASNLSTEDYIKRVPSIDVLCNEFHTPHDAAFFLSRPMYAHHISSKYDELKKSEKGSKQQHKVHKYITSCEMVMAPVHEAVVSLHVSKVWDDISPQFYATFWSLTMYDLAVPHTSYEREVNKLKVQMKAIDDNQEMPPNKKKKEKERCTALQDKLLEEEKKQMEHVQRVLQRLKLEKDNWLLAKSTKNETITKFLQLCIFPRCIFSAIDAVYCARFVELVHQQKTPNFSTLLCYDRVFSDIIYTVASCTENEASRYGRFLCCMLETVTRWHSDRATYEKECGNYPGFLTILRATGFDGGNKADQLDYENFRHVVHKWHYKLTKASVHCLETGEYTHIRNILIVLTKILPWYPKVLNLGQALERRVHKICQEEKEKRPDLYALAMGYSGQLKSRKSYMIPENEFHHKDPPPRNAVASVQNGPGGGPSSSSIGSASKSDESSTEETDKSRERSQCGVKAVNKASSTTPKGNSSNGNSGSNSNKAVKENDKEKGKEKEKEKKEKTPATTPEARVLGKDGKEKPKEERPNKDEKARETKERTPKSDKEKEKFKKEEKAKDEKFKTTVPNAESKSTQEREREKEPSRERDIAKEMKSKENVKGGEKTPVSGSLKSPVPRSDIPEPEREQKRRKIDTHPSPSHSSTVKVSIA

SEQ ID NO: 6252 - protein, 855 aa, Homo sapiens
MSFVRVNRCGPRVGVRKTPKVKKKKTSVKQEWDNTVTDLTVHRATPEDLVRRHEIHKSKNRALVHWELQEKALKRKWRKQKPETLNLEKRRLSIMKEILSDQYQMQDVLEKSDHLIAAAKELFPRRRTGFPNVTVAPDSSQGPIVVNQDPITQSIFNESVIEPQALNDVDGEEEGTVNSQSGESENENELDNSLNSQSNTNTDRFLQQLTEENFELISKLWTDIQQKIATQSQITPPGTPSSALSSGEQRAALNATNAVKRLQTRLQPEESTETLDSSYVVGHVLNSRKQKQLLNKVKRKPNLHALSKPKKNISSGSTTSADLPNRTNSNLDVLKHMIHEVEHEMEEYERWTGREVKGLQSSQGLTGFTLSLVSSLCRLVRYLKESEIQLRKEVETRQQLEQVLGDHRELIDALTAEILRLREENAATQARLQQYMVTTDEQLISLTHAIKNCPVINNRQEIQASESGATGRRVMDSPERPVVNANVSVPLMFREEVAEFPQEELPVKLSQVPDPPDNMNLAKNFPAHIFEPAVLLTPPRQKSNLKFSPLQDVLRRTVQTRPAPRLPPTVEIIEKEQNWEEKTLPIDTDIQNSSEENRLFTQRWRVSHMGEDLENKTQAPFVNLSQPLCNSHSNTQQSRSPTFSEELPVLGDGQQLRTNESLIQRKDIMTRIADLTLQNSAIKAHMNNIIEPRGEQGDGLRELNKQESASDMTSTFPVAQSLTPGSMEERIAELNRQSMEARGKLLQLIEQQKLVGLNLSPPMSPVQLPLRAWTEGAKRTIEVSIPGAEAPESSKCSTVSPVSGINTRRSSGATGNSCSPLNATSGSGRFTPLNPRAKIEKQNEEGWFALSTHVS

SEQ ID NO: 6253 - protein, 669 aa, Homo sapiens
MACEIMPLQSSQEDERPLSPFYLSAHVPQVSNVSATGELLERTIRSAVEQHLFDVNNSGGQSSEDSESGTLSASSATSARQRRRQSKEQDEVRHGRDKGLINKENTPSGFNHLDDCILNTQEVEKVHKNTFGCAGERSKPKRQKSSTKLSELHDNQDGLVNMESLNSTRSHERTGPDDFEWMSDERKGNEKDGGHTQHFESPTMKIQEHPSLSDTKQQRNQDAGDQEESFVSEVPQSDLTALCDEKNWEEPIPAFSSWQRENSDSDEAHLSPQAGRLIRQLLDEDSDPMLSPRFYAYGQSRQYLDDTEVPPSPPNSHSFMRRRSSSLGSYDDEQEDLTPAQLTRRIQSLKKKIRKFEDRFEEEKKYRPSHSDKAANPEVLKWTNDLAKFRRQLKESKLKISEEDLTPRMRQRSNTLPKSFGSQLEKEDEKKQELVDKAIKPSVEATLESIQRKLQEKRAESSRPEDIKDMTKDQIANEKVALQKALLYYESIHGRPVTKNERQVMKPLYDRYRLVKQILSRANTIPIIEEEEGSEDDSNVKPDFMVTLKTDFSARCFLDQFEDDADGFISPMDDKIPSKCSQDTGLSNLHAASIPELLEHLQEMREEKKRIRKKLRDFEDNFFRQNGRNVQKEDRTPMAEEYSEYKHIKAKLRLLEVLISKRDTDSKSM

SEQ ID NO: 6254 - protein, 697 aa, Homo sapiens
MACEIMPLQSSQEDERPLSPFYLSAHVPQVSNVSATGELLERTIRSAVEQHLFDVNNSGGQSSEDSESGTLSASSATSARQRRRQSKEQDEVRHGRDKGLINKENTPSGFNHLDDCILNTQEVEKVHKNTFGCAGERSKPKRQKSSTKLSELHDNQDGLVNMESLNSTRSHERTGPDDFEWMSDERKGNEKDGGHTQHFESPTMKIQEHPSLSDTKQQRNQDAGDQEESFVSEVPQSDLTALCDEKNWEEPIPAFSSWQRENSDSDEAHLSPQAGRLIRQLLDEDSDPMLSPRFYAYGQSRQYLDDTEVPPSPPNSHSFMRRRSSSLGSYDDEQEDLTPAQLTRRIQSLKKKIRKFEDRFEEEKKYRPSHSDKAANPEVLKWTNDLAKFRRQLKESKLKISEEDLTPRMRQRSNTLPKSFGSQLEKEDEKKQELVDKAIKPSVEATLESIQRKLQEKRAESSRPEDIKDMTKDQIANEKVALQKALLYYESIHGRPVTKNERQVMKPLYDRYRLVKQILSRANTIPIIGSPSSKRRSPLLQPIIEGETASFFKEIKEEEEGSEDDSNVKPDFMVTLKTDFSARCFLDQFEDDADGFISPMDDKIPSKCSQDTGLSNLHAASIPELLEHLQEMREEKKRIRKKLRDFEDNFFRQNGRNVQKEDRTPMAEEYSEYKHIKAKLRLLEVLISKRDTDSKSM

SEQ ID NO: 6255 - protein, 309 aa, Homo sapiens
NIEIRQKIHTGEKCYKCNDCGKIFSHMSSIVYHHKFHSGEKPYKCEECDEAFSFKSNLERHRRIHTGEKPYRCNRCGKTFSHTSSLTCHHRLHTGEKPYKCEECDETFRYKSNLERHRRIHNGEKPYKCNEYGKTFSQKSCLTRHHRLHTGNKSYKCNECGKTFSKELTHAIIDVILERNLRSAMSVAKPFIGSQRLFTIKQSMAEGNFTNVMIVTTSSVMLQLLQIIGESIIKRDLTSVINVTNFSDIVHTLQFTGELMLERNLTNVKNVIKLSDSNQTLKVIGEFILERNLTSVMSVVRCSVKIRPL

SEQ ID NO: 6256 - protein, 969 aa, Homo sapiens
MAEDDPYLGRPEQMFHLDPSLTHTIFNPEVFQPQMALPTADGPYLQILEQPKQRGFRFRYVCEGPSHGGLPGASSEKNKKSYPQVKICNYVGPAKVIVQLVTNGKNIHLHAHSLVGKHCEDGICTVTAGPKDMVVGFANLGILHVTKKKVFETLEARMTEACIRGYNPGLLVHPDLAYLQAEGGGDRQLGDREKELIRQAALQQTKEMDLSVVRLMFTAFLPDSTGSFTRRLEPVVSDAIYDSKAPNASNLKIVRMDRTAGCVTGGEEIYLLCDKVQKDDIQIRFYEEEENGGVWEGFGDFSPTDVHRQFAIVFKTPKYKDINITKPASVFVQLRRKSDLETSEPKPFLYYPEIKDKEEVQRKRQKLMPNFSDSFGGGSGAGAGGGGMFGSGGGGGGTGSTGPGYSFPHYGFPTYGGITFHPGTTKSNAGMKHGTMDTESKKDPEGCDKSDDKNTVNLFGKVIETTEQDQEPSEATVGNGEVTLTYATGTKEESAGVQDNLFLEKAMQLAKRHANALFDYAVTGDVKMLLAVQRHLTAVQDENGDSVLHLAIIHLHSQLVRDLLEVTSGLISDDIINMRNDLYQTPLHLAVITKQEDVVEDLLRAGADLSLLDRLGNSVLHLAAKEGHDKVLSILLKHKKAALLLDHPNGDGLNAIHLAMMSNSLPCLLLLVAAGADVNAQEQKSGRTALHLAVEHDNISLAGCLLLEGDAHVDSTTYDGTTPLHIAAGRGSTRLAALLKAAGADPLVENFEPLYDLDDSWENAGEDEGVVPGTTPLDMATSWQVFDILNGKPYEPEFTSDDLLAQGDMKQLAEDVKLQLYKLLEIPDPDKNWATLAQKLGLGILNNAFRLSPAPSKTLMDNYEVSGGTVRELVEALRQMGYTEAIEVIQAASSPVKTTSQAHSLPLSPASTRQQIDELRDSDSVCDSGVETSFRKLSFTESLTSGASLLTLNKMPHDYGQEGPLEGKI

SEQ ID NO: 6257 - protein, 393 aa, Homo sapiens
MKRTRDEVDATLQIAKLNAAELLPAVHCLGFGPGASGAAAGDFCLLELEPTLCQQLEDGHSLVIRGDKDEQAVLCSKDKTYDLKIADTSNMLLFIPGCKTPDQLKKEDSHCNIIHTEIFGFSNNYWELRRRRPKLKKLKKLLMENPYEGPDSQKEKDSNSSKYTTEDLLDQIQASEEEIMTQLQVLNACKIGGYWRILEFDYEMKLLNHVTQLVDSESWSFGKVPLNTCLQELGPLEPEEMIEHCLKCYGKKYVDEGEVYFELDADKICRAAARMLLQNAVKFNLAEFQEVWQQSVPEGMVTSLDQLKGLALVDRHSRPEIIFLLKVDDLPEDNQERFNSLFSLREKWTEEDIAPYIQDLCGEKQTIGALLTKYSHSSMQNGVKVYNSRRPIS

SEQ ID NO: 6258 - protein, 285 aa, Homo sapiens
MSIRVTQKSYKLSTSGPRAFSSHSYSSGPSACISSLSFSQVGSSSFRGGLGGGYGGASGMGGITAVMVNQNLLSPLVLEVDPNIQAVCTQEKEPIKTLNNKFASFIDKVRFLEQQNKMPETKWSLLQQQKTARSNMDKFESYINNLRQQLEILGQEKLKLEAELGNMQGLVSGMQNMSIHTKTTSGYAGGLSSAYGGLTSPSLSYGLGSSFGSGAGSSSFSRTSSSRAVVVKKIETRDRKLVSESSDSCPSEQLRQPLPACPFCAAPEPGREATMQGSTGNRRPT

SEQ ID NO: 6259 - protein, 339 aa, Homo sapiens
MDETVAEFIKRTILKIPMNELTTILKAWDFLSENQLQTVNFRQRKESVVQHLIHLCEEKRASISDAALLDIIYMQFHQHQKVWDVFQMSKGPGEDVDLFDMKQFKNSFKKILQRALKNVTVSFRETEENAVWIRIAWGTQYTKPNQYKPTYVVYYSQTPYAFTSSSMLRRNTPLLGQALTIASKHHQIVKMDLRSRYLDSLKAIVFKQYNQTFETHNSTTPLQERSLGLDINMDSRIIHENIVEKERVQRITQETFGDYPQPQLEFAQYKLETKFKSGLNGSILAEREEPLRCLIKFSSPHLLEALKSLAPAGIADAPLSPLLTCIPNKRMNYFKIRDK

SEQ ID NO: 6260 - protein, 1406 aa, Homo sapiens
MDMVENADSLQAQERKDILMKYDKGHRAGLPEDKGPEPVGINSSIDRFGILHETELPPVTAREAKKIRREMTRTSKWMEMLGEWETYKHSSKLIDRVYKGIPMNIRGPVWSVLLNIQEIKLKNPGRYQIMKERGKRSSEHIHHIDLDVRTTLRNHVFFRDRYGAKQRELFYILLAYSEYNPEVGYCRDLSHITALFLLYLPEEDAFWALVQLLASERHSLPGFHSPNGGTVQGLQDQQEHVVPKSQPKTMWHQDKEGLCGQCASLGCLLRNLIDGISLGLTLRLWDVYLVEGEQVLMPITSIALKVQQKRLMKTSRCGLWARLRNQFFDTWAMNDDTVLKHLRASTKKLTRKQGDLPPPAKREQGSLAPRPVPASRGGKTLCKGYRQAPPGPPAQFQRPICSASPPWASRFSTPCPGGAVREDTYPVGTQGVPSLALAQGGPQGSWRFLEWKSMPRLPTDLDIGGPWFPHYDFEWSCWVRAISQEDQLATCWQAEHCGEVHNKDMSWPEEMSFTANSSKIDRQKVPTEKGATGLSNLGNTCFMNSSIQCVSNTQPLTQYFISGRHLYELNRTNPIGMKGHMAKCYGDLVQELWSGTQKSVAPLKLRRTIAKYAPKFDGFQQQDSQELLAFLLDGLHEDLNRVHEKPYVELKDSDGRPDWEVAAEAWDNHLRRNRSIIVDLFHGQLRSQVKCKTCGHISVRFDPFNFLSLPLPMDSYMDLEITVIKLDGTTPVRYGLRLNMDEKYTGLKKQLRDLCGLNSEQILLAEVHDSNIKNFPQDNQKVQLSVSGFLCAFEIPVPSSPISASSPTQIDFSSSPSTNGMFTLTTNGDLPKPIFIPNGMPNTVVPCGTEKNFTNGMVNGHMPSLPDSPFTGYIIAVHRKMMRTELYFLSPQENRPSLFGMPLIVPCTVHTRKKDLYDAVWIQVSWLARPLPPQEASIHAQDRDNCMGYQYPFTLRVVQKDGNSCAWCPQYRFCRGCKIDCGEDRAFIGNAYIAVDWHPTALHLRYQTSQERVVDKHESVEQSRRAQAEPINLDSCLRAFTSEEELGESEMYYCSKCKTHCLATKKLDLWRLPPFLIIHLKRFQFVNDQWIKSQKIVRFLRESFDPSAFLVPRDPALCQHKPLTPQGDELSKPRILAREVKKVDAQSSAGKEDMLLSKSPSSLSANISSSPKGSPSSSRKSGTSCPSSKNSSPNSSPRTLGRSKGRLRLPQIGSKNKPSSSKKNLDASKENGAGQICELADALSRGHMRGGSQPELVTPQDHEVALANGFLYEHEACGNGCGDGYSNGQLGNHSEEDSTDDQREDTHIKPIYNLYAISCHSGILSGGHYITYAKNPNCKWYCYNDSSCEELHPDEIDTDSAYILFYEQQGIDYAQFLPKIDGKKMADTSSTDEDSESDYEKYSMLQ

SEQ ID NO: 6261 - protein, 262 aa, Homo sapiens
MAVTAQAARRKERVLCLFDVDGTLTPARQKIDPEVAAFLQKLRSRVQIGVVGGSDYCKIAEQLGDGDEVIEKFDYVFAENGTVQYKHGRLLSKQTIQNHLGEELLQDLINFCLSYMALLRLPKKRGTFIEFRNGMLNISPIGRSCTLEERIEFSELDKKEKIREKFVEALKTEFAGKGLRFSRGGMISFDVFPEGWDKRYCLDSLDQDSFDTIHFFGNETSPGGNDFEIFADPRTVGHSVVSPQDTVQRCREIFFPETAHEA

SEQ ID NO: 6262 - protein, 1388 aa, Homo sapiens
MASQLQEKCIAFIVDNFSKIIQSENFALLLQSQAMSSTADLLDTILKAIEENITTENSCSLLMALDTLLNSDSTKEMGFTCKIQALRDKLWIFLVQSFYAVRHTESWKLMSTDDQQKIQAAAFDKGDDRRLGKKPIFSSSQQRKQVSDSGDIKIKSWRGNNKKECWSYLSTNKKMKSDGLGASGHSSSTNRNSINKTLKQDDVKEKDGTKIASKITKELKTGGKNVSGKPKTVTKSKTENGDKARLENMSPRQVVERSATAAAAATGQKNLLNGKGVRNQEGQISGARPKVLTGNLNVQAKAKPLKKATGKDSPCLSIAGPSSRSTDSSMEFSISTECLDEPKENGSTEEEKPSGHKLSFCDSPGQMMKNSVDSVKNSTVAIKSRPVSRVTNGTSNKKSIHEQDTNVNNSVLKKVSGKGCSEPVPQAILKKRGTSNGCTAAQQRTKSTPSNLTKTQGSQGESPNSVKSSVSSRQSDENVAKLDHNTTTEKQAPKRKMVKQVHTALPKVNAKIVAMPKNLNQSKKGETLNNKDSKQKMPPGQVISKTQPSSQRPLKHETSTVQKSMFHDVRDNNNKDSVSEQKPHKPLINLASEISDAEALQSSCRPDPQKPLNDQEKEKLALECQNISKLDKSLKHELESKQICLDKSETKFPNHKETDDCDAANICCHSVGSDNVNSKFYSTTALKYMVSNPNENSLNSNPVCDLDSTSAGQIHLISDRENQVGRKDTNKQSSIKCVEDVSLCNPERTNGTLNSAQEDKKSKVPVEGLTIPSKLSDESAMDEDKHATADSDVSSKCFSGQLSEKNSPKNMETSESPESHETPETPFVGHWNLSTGVLHQRESPESDTGSATTSSDDIKPRSEDYDAGGSQDDDGSNDRGISKCGTMLCHDFLGRSSSDTSTPEELKIYDSNLRIEVKMKKQSNNDLFQVNSTSDDEIPRKRPEIWSRSAIVHSRERENIPRGSVQFAQEIDQVSSSADETEDERSEAENVAENFSISNPAPQQFQGIINLAFEDATENECREFSATKKFKRSVLLSVDECEELGSDEGEVHTPFQASVDSFSPSDVFDGISHEHHGRTCYSRFSRESEDNILECKQNKGNSVCKNESTVLDLSSIDSSRKNKQSVSATEKKNTIDVLSSRSRQLLREDKKVNNGSNVENDIQQRSKFLDSDVKSQERPCHLDLHQREPNSDIPKNSSTKSLDSFRSQVLPQEGPVKESHSTTTEKANIALSAGDIDDCDTLAQTRMYDHRPSKTLSPIYEMDVIEAFEQKVESETHVTDMDFEDDQHFAKQDWTLLKQLLSEQDSNLDVTNSVPEDLSLAQYLINQTLLLARDSSKPQGITHIDTLNRWSELTSPLDSSASITMASFSSEDCSPQGEWTILELETQH

SEQ ID NO: 6263 - protein, 701 aa, Homo sapiens
MEEDTDYRIRFSSLCFFNDHVGFHGTIKSSPSDFIVIEIDEQGQLVNKTIDEPIFKISEIQLEPNNFPKKPKLDLQNLSLEDGRNQEVHTLIKYTDGDQNHQSGSEKEDTIVDGTSKCEEKADVLSSFLDEKTHELLNNFACDVREKWLSKTELIGLPPEFSIGRILDKNQRASLHSAIRQKFPFLVTVGKNSEIVVKPNLEYKELCHLVSEEEAFDFFKYLDAKKENSKFTFKPDTNKDHRKAVHHFVNKKFGNLVETKSFSKMNCSAGNPNVVVTVRFREKAHKRGKRPLSECQEGKVIYTAFTLRKENLEMFEAIGFLAIKLGVIPSDFSYAGLKDKKAITYQAMVVRKVTPERLKNIEKEIEKKRMNVFNIRSVDDSLRLGQLKGNHFDIVIRNLKKQINDSANLRERIMEAIENVKKKGFVNYYGPQRFGKGRKVHTDQIGLALLKNEMMKAIKLFLTPEDLDDPVNRAKKYFLQTEDAKGTLSLMPEFKVRERALLEALHRFGMTEEGCIQAWFSLPHSMRIFYVHAYTSKIWNEAVSYRLETYGARVVQGDLVCLDEDIDDENFPNSKIHLVTEEEGSANMYAIHQVVLPVLGYNIQYPKNKVGQWYHDILSRDGLQTCRFKVPTLKLNIPGCYRQILKHPCNLSYQLMEDHDIDVKTKGSHIDETALSLLISFDLDASCYATVCLKEIMKHDV

SEQ ID NO: 6264 - protein, 643 aa, Homo sapiens
MDDIADRMRMDAGEVTLVNHNSVFKTHLLPQTGFPEDQLSLSDQQILSSRQGHLDRSFTCSTRSAAYNPSYYSDNPSSDSFLGSGDLRTFGQSANGQWRNSTPSSSSSLQKSRNSRSLYLETRKTSSGLSNSFAGKSNHHCHVSAYEKSFPIKPVPSPSWSGSCRRSLLSPKKTQRRHVSTAEETVQEEEREIYRQLLQMVTGKQFTIAKPTTHFPLHLSRCLSSSKNTLKDSLFKNGNSCASQIIGSDTSSSGSASILTNQEQLSHSVYSLSSYTPDVAFGSKDSGTLHHPHHHHSVPHQPDNLAASNTQSEGSDSVILLKVKDSQTPTPSSTFFQAELWIKELTSVYDSRARERLRQIEEQKALALQLQNQRLQEREHSVHDSVELHLRVPLEKEIPVTVVQETQKKGHKLTDSEDEFPEITEEMEKEIKNVFRNGNQDEVLSEAFRLTITRKDIQTLNHLNWLNDEIINFYMNMLMERSKEKGLPSVHAFNTFFFTKLKTAGYQAVKRWTKKVDVFSVDILLVPIHLGVHWCLAVVDFRKKNITYYDSMGGINNEACRILLQYLKQESIDKKRKEFDTNGWQLFSKKSQIPQQMNGSDCGMFACKYADCITKDRPINFTQQHMPYFRKRMVWEILHRKLL

SEQ ID NO: 6265 - protein, 646 aa, Homo sapiens
MSTAPSLSALRSSKHSGGGGGGGGGGGADPAWTSALSGNSSGPGPGSSPAGSTKPFVHAVPPSDPLRQANRLPIKVLKMLTARTGHILHPEYLQPLPSTPVSPIELDAKKSPLALLAQTCSQIGKPDPSPSSKLSSVASNGGGAGGAGGGAAGDKDTKSGPLKLSDIGVEDKSSFKPYSKPGSDKKEPGGGGGGGGGGGGGGGGVSSEKSGFRVPSATCQPFTPRTGSPSSSASACSPGGMLSSAGGAPEGKDDKKDTDVGGGGKGTGGASAEGGPTGLAHGRISCGGGINVDVNQHPDGGPGGKALGSDCGGSSGSSSGSGPSAPTSSSVLGSGLVAPVSPYKPGQTVFPLPPAGMTYPGSLAGAYAGYPPQFLPHGVALDPTKPGSLVGAQLAAAAAGSLGCSKPAGSSPLAGASPPSVMTASLCRDPYCLSYHCASHLAGAAAASASCAHDPAAAAAALKSGYPLVYPTHPLHGVHSSLTAAAAAGATPPSLAGHPLYPYGFMLPNDPLPHICNWVSANGPCDKRFATSEELLSHLRTHTAFPGTDKLLSGYPSSSSLASAAAAAMACHMHIPTSGAPGSPGTLALRSPHHALGLSSRYHPYSKSPLPTPGAPVPVPAATGPYYSPYALYGQRLTTASALGYQ

SEQ ID NO: 6266 - protein, 283 aa, Homo sapiens
MSTAPSLSALRSSKHSGGGGGGGGGGGADPAWTSALSGNSSGPGPGSSPAGSTKPFVHAVPPSDPLRQANRLPIKVLKMLTARTGHILHPEYLQPLPSTPVSPIELDAKKSPLALLAQTCSQIGKPDPSPSLAGHPLYPYGFMLPNDPLPHICNWVSANGPCDKRFATSEELLSHLRTHTAFPGTDKLLSGYPSSSSLASAAAAAMACHMHIPTSGAPGSPGTLALRSPHHALGLSSRYHPYSKSPLPTPGAPVPVPAATGPYYSPYALYGQRLTTASALGYQ

SEQ ID NO: 6267 - protein, 1188 aa, Homo sapiens
MSLLNPVLLPPKVKAYLSQGERFIKWDDETTVASPVILRVDPKGYYLYWTYQSKEMEFLDITSIRDTRFGKFAKMPKSQKLRDVFNMDFPDNSFLLKTLTVVSGPDMVDLTFHNFVSYKENVGKAWAEDVLALVKHPLTANASRSTFLDKILVKLKMQLNSEGKIPVKNFFQMFPADRKRVEAALSACHLPKGKNDAINPEDFPEPVYKSFLMSLCPRPEIDEIFTSYHAKAKPYMTKEHLTKFINQKQRDSRLNSLLFPPARPDQVQGLIDKYEPSGINAQRGQLSPEGMVWFLCGPENSVLAQDKLLLHHDMTQPLNHYFINSSHNTYLTAGQFSGLSSAEMYRQVLLSGCRCVELDCWKGKPPDEEPIITHGFTMTTDIFFKEAIEAIAESAFKTSPYPIILSFENHVDSPRQQAKMAEYCRTIFGDMLLTEPLEKFPLKPGVPLPSPEDLRGKILIKNKKNQFSGPTSSSKDTGGEAEGSSPPSAPAVWAGEEGTELEEEEVEEEEEEESGNLDEEEIKKMQSDEGTAGLEVTAYEEMSSLVNYIQPTKFVSFEFSAQKNRSYVISSFTELKAYDLLSKASVQFVDYNKRQMSRIYPKGTRMDSSNYMPQMFWNAGCQMVALNFQTMDLPMQQNMAVFEFNGQSGYLLKHEFMRRPDKQFNPFSVDRIDVVVATTLSITARPWGTQVISGQFLSERSVRTYVEVELFGLPGDPKRRYRTKLSPSTNSINPVWKEEPFVFEKILMPELASLRVAVMEEGNKFLGHRIIPINALNSGYHHLCLHSESNMPLTMPALFIFLEMKDYIPGAWADLTVALANPIKFFSAHDTKSVKLKEAMGGLPEKPFPLASPVASQVNGALAPTSNGSPAARAGAREEAMKEAAEPRTASLEELRELKGVVKLQRRHEKELRELERRGARRWEELLQRGAAQLAELGPPGVGGVGACKLGPGKGSRKKRSLPREESAGAAPGEGPEGVDGRVRELKDRLELELLRQGEEQYECVLKRKEQHVAEQISKMMELAREKQAAELKALKETSENDTKEMKKKLETKRLERIQGMTKVTTDKMAQERLKREINNSHIQEVVQVIKQMTENLERHQEKLEEKQAACLEQIREMEKQFQKEALAEYEARMKGLEAEVKESVRACLRTCFPSEAKDKPERACECPPELCEQDPLIAKADAQESRL

SEQ ID NO: 6268 - protein, 1302 aa, Homo sapiens
MACSILEGCRREVRRETWKPGPGSERCQRGRSCGAREEEVEPGTARPPPAASAMDASLEKNKGVIPEGLGSRPTVLVVDELEEEEVEEGDEGGQAEPEEEGQPGVLLSHVLIMGQDGLEVQRVPQVLQVGLALGIRQHGQVDMVVLVADAMQCIAVLQHVGVGLELEVVLCELQPPEAEHHALQDAWGTHLHQPLAATLLEGQPPQVRELQDLLDGGQQPRPQVLGVHGGVPAEAVIFIVERRLHLVSLPVAQGGAEQRGWRAGEHVIERQVHGEARRPVGVSDLHFHSWAEELSPEELVVLKQLRRWHLQELQHFLPCQVLQRLELLGCFAFGHLGDNGARDVHHPQHRLIQLRLGSHLEAVHQLLGGHHHQLQATHAAQQPLPQQQHRLSSFSQRAQRAQLHEGHKVRRHGGLPLPGSHPQPIGSHVQGQEAVGHQGRHSRAQRYRLAALPQAAPGAGGRLQAGRRLGGARLTPGPGKQIADPTLAEMGKNLKEAVKMLEDSQRRTEEENGKKLISGDIPGPLQGSGQDMVSILQLVQNLMHGDEDEEPQSPRIQNIGEQGHMALLGHSLGAYISTLDKEKLRKLTTRILSDTTLWLCRIFRYENGCAYFHEEEREGLAKICRLAIHSRYEDFVVDGFNVLYNKKPVIYLSAAARPGLGQYLCNQLGLPFPCLCRVPCNTVFGSQHQMDVAFLEKLIKDDIERGRLPLLLVANAGTAAVGHTDKIGRLKELCEQYGIWLHVEGVNLATLALGYVSSSVLAAAKCDSMTMTPGPWLGLPAVPAVTLYKHDDPALTLVAGLTSNKPTDKLRALPLWLSLQYLGLDGFVERIKHACQLVEDELSSPVVVFRFFQELPGSDPVFKAVPVPNMTPSGVGRERHSCDALNRWLGEQLKQLVPASGLTVMDLEAEGTCLRFSPLMTAAGTRGEDVDQLVACIESKLPVLCCTLQLREEFKQEVEATAGLLYVDDPNWSGIGVVRYEHANDDKSSLKSDPEGENIHAGLLKKLNELESDLTFKIGPEYKSMKSCLYVGMASDNVDAAELVETIAATAREIEENSRLLENMTEVVRKGIQEAQVELQKASEERLLEEGVLRQIPVVGSVLNWFSPVQALQKGRTFNLTAGNDDSIVMKAKDNLISNLPSLSLQQKGTHFLWLQYVSLLGLAPWVCLRHTAGGCWRYWPCSLESTEPIYVYKAQGAGVTLPPTPSGSRTKQRLPGQKPFKRSLRGSDALSETSSVSHIEDLEKVERLSSGPEQITLEASSTEGHPGAPSPQHTDQTEAFQKGVPHPEDDHSQVEGPESLR

SEQ ID NO: 6269 - protein, 122 aa, Homo sapiens
MEMCTKGLGAQTGVLRMKGVNLSCVRTCMVVAEERPRIALTQSFSKLFKDLGLPARAVSTTFGCRVNVAICLQVRCLGPAVLESWLLAAWRPSFPVVNVPFCSRLIYFSFSGPLISHFHVTF

SEQ ID NO: 6270 - protein, 1571 aa, Homo sapiens
MADRGCPLEAAPLPAEVRESLAELELELSEGDITQKGYEKKRAKLLARYIPLIQGIDPSLQAENRIPGPSQTTAAAPKQQKSRPTASRDERFRSDVHTEAVQAALAKYKERKMPMPSKRRSVLVHSSVETYTPPDTSSASEDEGSLRRPGRLTSTPLQSHSSVEPWLDRVIQGSSTSSSASSTSSHPGGRPTTAPSAAATPGAAATTALAGLEAHTHIDLHSAPPDVTTGLVEHSYFERPQVASVRSVPRGCSGSMLETADGVPVNSRVSSKIQQLLNTLKRPKRPPLKEFFVDDFEELLEVQQPDPNQPKPEGSETSVLRGEPLTAGVPRPPSLLATLQRWGTTQPKSPCLTALDTTGKAVYTLTYGKLWSRSLKLAYTLLNKLTSKNEPLLKPGDRVALVFPNSDPVMFMVAFYGCLLAELVPVPIEVPLTRKDAGSQQVGFLLGSCGVFLALTTDACQKGLPKAQTGEVAAFKGWPPLSWLVIDGKHLAKPPKDWHPLAQDTGTGTAYIEYKTSKEGSTVGVTVSHASLLAQCRALTQACGYSEAETLTNVLDFKRDAGLWHGVLTSVMNRMHVVSVPYALMKANPLSWIQKVCFYKARAALVKSRDMHWSLLAQRGQRDVSLSSLRMLIVADGANPWSISSCDAFLNVFQSRGLRPEVICPCASSPEALTVAIRRPPDLGGPPPRKAVLSMNGLSYGVIRVDTEEKLSVLTVQDVGQVMPGANVCVVKLEGTPYLCKTDEVGEICVSSSATGTAYYGLLGITKNVFEAVPVTTGGAPIFDRPFTRTGLLGFIGPDNLVFIVGKLDGLMVTGVRRHNADDVVATALAVEPMKFVYRGRIAVFSVTVLHDDRIVLVAEQRPDASEEDSFQWMSRVLQAIDSIHQVGVYCLALVPANTLPKAPLGGIHISETKQRFLEGTLHPCNVLMCPHTCVTNLPKPRQKQPEVGPASMIVGNLVAGKRIAQASGRELAHLEDSDQARKFLFLADVLQWRAHTTPDHPLFLLLNAKGTVTSTATCVQLHKRAERVAAALMEKGRLSVGDHVALVYPPGVDLIAAFYGCLYCGCVPVTVRPPHPQNLGTTLPTVKMIVEVSKSACVLTTQAVTRLLRSKEAAAAVDIRTWPTILDTDDIPKKKIASVFRPPSPDVLAYLDFSVSTTGILAGVKMSHAATSALCRSIKLQCELYPSRQIAICLDPYCGLGFALWCLCSVYSGHQSVLVPPLELESNVSLWLSAVSQYKARVTFCSYSVMEMCTKGLGAQTGVLRMKGVNLSCVRTCMVVAEERPRIALTQSFSKLFKDLGLPARAVSTTFGCRVNVAICLQGTAGPDPTTVYVDMRALRHDRVRLVERGSPHSLPLMESGKILPGVKVIIAHTETKGPLGDSHLGEIWVSSPHNATGYYTVYGEEALHADHFSARLSFGDTQTIWARTGYLGFLRRTELTDASGGRHDALYVVGSLDETLELRGMRYHPIDIETSVIRAHRSIAECAVFTWTNLLVVVVELDGLEQDALDLVALVTNVVLEEHYLVVGVVVIVDPGVIPINSRGEKQRMHLRDGFLADQLDPIYVAYNM

SEQ ID NO: 6271 - protein, 347 aa, Homo sapiens
MNIFLSSIQRLIHAHYSSRLPASSWVLLIGSTGQLAKGKRMLSEYLSPNLSLRAPIDLASPPQLKPTPLSHQATLFIEYSVSRIWESFMPSSSSTALLPVGLCYLCIFPALFPHLRTQSLYYPSHLVSWSIAKGSLLKVTVLLKLLQYKRTQALAFAAPPGFLIIFDDCLFTAGQQGFADTATTGRLILPAMVNPTVFFDITVDGEPLGSVSFELFAEKFPKTEENFHLLSTGEKGFGYKSSCFHRIIPGFMCRGDDFTCHNSTGGKSVYGEKFVDENFVLKHTDPGILSRANAGPSTNGSQFFTCTAKTEWFGKVKERMIIVEAMGRFAGNGKTSKKIAVADCGLL

SEQ ID NO: 6272 - protein, 276 aa, Homo sapiens
FNNESSLRELSGTPNLLNTSDSEQAQKPVSPPGEASTSGQHSRLKLELRRKETEGKMYSLRERKGHAYKEISEPQDDDYLYCEMCQNFFIDSCAAHGPPTFVKDSAVDKGHPNRSALSLPPGLRIGPSGIPQAGLGVWNEASDLPLGLHFGPYEGRITEDEEAANSGYSWLITKGRNCYEYVDGKDKSSANWMRYVNCARDDEEQNLVAFQYHRQIFYRTCRVIRPGCCELLVWYGDEYGQELGIKWGSKWKKELMAGRGRHHYYSFKRTGKKELS

SEQ ID NO: 6273 - protein, 689 aa, Homo sapiens
MCQNFFIDSCAAHGPPTFVKDSAVDKGHPNRSALSLPPGLRIGPSGIPQAGLGVWNEASDLPLGLHFGPYEGRITEDEEAANNGYSWLVRRACHFTKGRNCYEYVDGKDKSWANWMRYVNCARDDEEQNLVAFQYHRQIFYRTCRVIRPGCELLVWYGDEYGQELGIKWGSKWKKEEPKPEIHPCPSCCLAFSSQKFLSQHVERNHSSQNFPGPSARKLLQPENPCPGDQNQEQQYPDPHSRNDKTKGQEIKERSKLLNKRTWQREISRAFSSPPKGQMGSCRVGKRIMEEESRTGQKVNPGNTGKLFVGVGISRIAKVKYGECGQGFSVKSDVITHQRTHTGEKLYVCRECGRGFSWKSHLLIHQRIHTGEKPYVCRECGRGFSWQSVLLTHQRTHTGEKPYVCRECGRGFSRQSVLLTHQRRHTGEKPYVCRECGRGFSRQSVLLTHQRRHTGEKPYVCRECGRGFSWQSVLLTHQRTHTGEKPYVCRECGRGFSWQSVLLTHQRTHTGEKPYVCRECGRGFSNKSHLLRHQRTHTGEKPYVCRECGRGFRDKSHLLRHQRTHTGEKPYVCRECGRGFRDKSNLLSHQRTHTGEKPYVCRECGRGFSNKSHLLRHQRTHTGEKPYVCRECGRGFRNKSHLLRHQRTHTGEKPYVCRECGRGFSDRSSLCYHQRTHTGEKPYVCREDE

SEQ ID NO: 6274 - protein, 171 aa, Homo sapiens
MCQNFFIDSCAAHGPPTFVKDSAVDKGHPNRSALSLPPGLRIGPSGIPQAGLGVWNEASDLPLGLHFGPYEGRITEDEEAANSGYSWLITKGRNCYEYVDGKDKSSANWMRTKARDPSMSLMLSGLFKSKISQSTCGTQSLLSELPRTICKKTSPTRESLPRGSESGAAIF

SEQ ID NO: 6275 - protein, 407 aa, Homo sapiens
MCQNFFIDSCAAHGPPTFVKDSAVDKGHPNRSALSLPPGLRIGPSGIPQAGLGVWNEASDLPLGLHFGPYEGRITEDEEAANSGYSWLITKGRNCYEYVDGKDKSSANWMRYVNCARDDEEQNLVAFQYHRQIFYRTCRVIRPGCELLVWYGDEYGQELGIKWGSKWKKELMAGREPKPEIHPCPSCCLAFSSQKFLSQHVERNHSSQNFPGPSARKLLQPENPCPGDQNQERQYSDPRCCNDKTKGQEIKERSKLLNKRTWQREISRAFSSPPKGQMGSSRVGERMMEEESRTGQKVNPGNTGKLFVGVGISRIAKVKYGECGQGFSDKSDVITHQRTHTGGKPYVCRECGEGFSRKSDLLSHQRTHTGEKPYVCRECERGFSRKSVLLIHQRTHRGEAPVCRKDE

SEQ ID NO: 6276 - protein, 456 aa, Homo sapiens
MGKKKTHINIIITGHVDSFKSITTCHPVYKCGGIDQRTIKKCEDKTAEMGKGSFRYAWVLDKLKAEFEHGITTDISTWESETTKYYYVTIIDAPGHREFTKNMITETYQIDCAILTVAAGADESELGISKNEQTHEHIPLASTLIVKQPTVHVNKTDSTESPYSQKRYEKIIKEISTHIKKTGYGPATVAFVPISFLNGDNMLESSANIPWLKRWKDTCKDGDTSETMLLKALNCILPSIHSVDKLLCLPLPDVYKGDIGIVPLGLVETAILKPSMWSTFAPVNTTTEVESVEMHQKALSEALPKDNVGFDVKNVSVKDTRHGNVAGDSKNDSPMEAADCTAHMIILSQPGQIGSGYPPILDCHTAYVACKFAIEKIDCHSGKKLEGDPKFLKSSDAAIVQMVAGVESFSDHLPLGHFTVHNMRQTVAVGVFKAVDKRAARVGKVSKSAWKVQEAK

SEQ ID NO: 6277 - protein, 196 aa, Homo sapiens
MLFRVLTSKVTKGTMIMPKRVAATCVPKDRAIKNFFIQNTVEAAASVFNAYVLPELYVKLHYCVSCAIHSRKPARTEHLHFYLDLQMLAPKLMNKTPQPGCRKGCRCDPQGVNATATADRLWLGWRLEQEKEEQEKEGAGGWKRLQAAAAATWSNQAVRQLPAPGPFHLFPFGRRSRVQIRHSAPETDTLNSTSSS

SEQ ID NO: 6278 - protein, 755 aa, Homo sapiens
MKKQRKILWRKGIHLAFSEKWNTGFGGFKKFYFHQHLCILKAKLGRPVTWNRQLRHFQGRKKALQIQKTWIKDEHLCAKTKFNVATQNVSTLSSKVKRKDAKHFISSSKTLLRLQAEKLLSSAKNSDHEYCREKNLLKAVTDFPSNSALGQANGHRPRTDPQPSDFPMKFNGESQSPGESGTIVVTLNNHKRKGFCYGCCQGPEHHRNGGPLIPKKFQLNQHRRIKLSPLMMYEKLSMIRFRYRILRSQHFRTKSKVCKLRKAQRSWVQKVTGDHQETRRENGEGGSCSPFPSPEPKDPSCRHQPYFPDMDSSAVVKGTNSHVPDCHTKGSSFLGKELSLDEAFPDQQNGSATNAWDQSSCSSPKWECTELIHDIPLPEHRSNTMFISETEREIMTLGQENQTSSVSDDRVKLSVSGADTSVSSVDGPVSQKAVQNENSYQMEEDGSLKQSILSSELLDHPYCKSPLEAPLVCSGLKLENQVGGGKNSQKASPVDDEQLSVCLSGFLDEVMKKYGSLVPLSEKEVLGRLKDVFNEDFSNRKPFINREITNYRARHQKCNFRIFYNKHMLDMDDLATLDGQNWLNDQVINMYGELIMDAVPDKVHFFNSFFHRQLVTKGYNGVKRWTKKVDLFKKSLLLIPIHLEVHWSLITVTLSNRIISFYDSQGIHFKFCVENIRKYLLTEAREKNRPEFLQGWQTAVTKCIPQQKNDSDCGVFVLQYCKCLALEQPFQFSQEDMPRVRKRIYKELCECRLMD

SEQ ID NO: 6279 - protein, 386 aa, Homo sapiens
MNPQIRNPMERMYRDTFYDNFENEPILYGRSYTWLCYEVKIKRGRSNLLWDTGVFRGPVLPKRQSNHRQEVYFRFENHAEMCFLSWFCGNRLPANRRFQITWFVSWNPCLPCVVKVTKFLAEHPNVTLTISAARLYYYRDRDWRWVLLRLHKAGARVKIMDYEDFAYCWENFVCNEGQPFMPWYKFDDNYASLHRTLKEILRNPMEAMYPHIFYFHFKNLLKACGRNESWLCFTMEVTKHHSAVFRKRGVFRNQVDPETHCHAERCFLSWFCDDILSPNTNYEVTWYTSWSPCPECAGEVAEFLARHSNVNLTIFTARLCYFWDTDYQEGLCSLSQEGASVKIMGYKDFVSCWKNFVYSDDEPFKPWKGLQTNFRLLKRRLREILQ

SEQ ID NO: 6280 - protein, 1675 aa, Homo sapiens
MAQILPIRFQEHLQLQNLGINPANIGFSTLTMESDKFICIREKVGEQAQVVIIDMNDPSNPIRRPISADSAIMNPASKVIALKAGKTLQIFNIEMKSKMKAHTMTDDVTFWKWISLNTVALVTDNAVYHWSMEGESQPVKMFDRHSSLAGCQIINYRTDAKQKWLLLTGISAQQNRVVGAMQLYSVDRKVSQPIEGHAASFAQFKMEGNAEESTLFCFAVRGQAGGKLHIIEVGTPPTGNQPFPKKAVDVFFPPEAQNDFPVAMQISEKHDVVFLITKYGYIHLYDLETGTCIYMNRISGETIFVTAPHEATAGIIGVNRKGQVLSVCVEEENIIPYITNVLQNPDLALRMAVRNNLAGAEELFARKFNALFAQGNYSEAAKVAANAPKGILRTPDTIRRFQSVPAQPGQTSPLLQYFGILLDQGQLNKYESLELCRPVLQQGRKQLLEKWLKEDKLECSEELGDLVKSVDPTLALSVYLRANVPNKVIQCFAETGQVQKIVLYAKKVGYTPDWIFLLRNVMRISPDQGQQFAQMLVQDEEPLADITQIVDVFMEYNLIQQCTAFLLDALKNNRPSEGPLQTRLLEMNLMHAPQVADAILGNQMFTHYDRAHIAQLCEKAGLLQRALEHFTDLYDIKRAVVHTHLLNPEWLVNYFGSLSVEDSLECLRAMLSANIRQNLQICVQVASKYHEQLSTQSLIELFESFKSFEGLFYFLGSIVNFSQDPDVHFKYIQAACKTGQIKEVERICRESNCYDPERVKNFLKEAKLTDQLPLIIVCDRFDFVHDLVLYLYRNNLQKYIEIYVQKVNPSRLPVVIGGLLDVDCSEDVIKNLILVVRGQFSTDELVAEVEKRNRLKLLLPWLEARIHEGCEEPATHNALAKIYIDSNNNPERFLRENPYYDSRVVGKYCEKRDPHLACVAYERGQCDLELINVCNENSLFKSLSRYLVRRKDPELWGSVLLESNPYRRPLIDQVVQTALSETQDPEEVSVTVKAFMTADLPNELIELLEKIVLDNSVFSEHRNLQNLLILTAIKADRTRVMEYINRLDNYDAPDIANIAISNELFEEAFAIFRKFDVNTSAVQVLIEHIGNLDRAYEFAERCNEPAVWSQLAKAQLQKGMVKEAIDSYIKADDPSSYMEVVQAANTSGNWEELVKYLQMARKKARESYVETELIFALAKTNRLAELEEFINGPNNAHIQQVGDRCYDEKMYDAAKLLYNNVSNFGRLASTLVHLGEYQAAVDGARKANSTRTWKEVCFACVDGKEFRLAQMCGLHIVVHADELEELINYYQDRGYFEELITMLEAALGLERAHMGMFTELAILYSKFKPQKMREHLELFWSRVNIPKVLRAAEQAHLWAELVFLYDKYEEYDNAIITMMNHPTDAWKEGQFKDIITKVANVELYYRAIQFYLEFKPLLLNDLLMVLSPRLDHTRAVNYFSKVKQLPLVKPYLRSVQNHNNKSVNESLNNLFITEEDYQALRTSIDAYDNFDNISLAQRLEKHELIEFRRIAAYLFKGNNRWKQSVELCKKDSLYKDAMQYASESKDTELAEELLQWFLQEEKRECFGACLFTCYDLLRPDVVLETAWRHNIMDFAMPYFIQVMKEYLTKVDKLDASESLRKEEEQATETQPIVYGQPQLMLTAGPSVAVPPQAPFGYGYTAPPYGQPQPGFGYSM

SEQ ID NO: 6281 - protein, 1116 aa, Homo sapiens
MAADLNLEWISLPRSWTYGITRGGRVFFINEEAKSTTWLHPVTGEAVVTGHRRQSTDLPTGWEEAYTFEGARYYINHNERKVTCKHPVTGQPSQDNCIFVVNEQTVATMTSEEKKERPISMINEASNYNVTSDYAVHPMSPVGRTSRASKKVHNFGKRSNSIKRNPNAPVVRRGWLYKQDSTGMKLWKKRWFVLSDLCLFYYRDEKEEGILGSILLPSFQIALLTSEDHINRKYAFKAAHPNMRTYYFCTDTGKEMELWMKAMLDAALVQTEPVKRVDKITSENAPTKETNNIPNHRVLIKPEIQNNQKNKEMSKIEEKKALEAEKYGFQKDGQDRPLTKINSVKLNSLPSEYESGSACPAQTVHYRPINLSSSENKIVNVSLADLRGGNRPNTGPLYTEADRVIQRTNSMQQLEQWIKIQKGRGHEEETRGVISYQTLPRNMPSHRAQIMARYPEGYRTLPRNSKTRPESICSVTPSTHDKTLGPGAEEKRRSMRDDTMWQLYEWQQRQFYNKQSTLPRHSTLSSPKTMVNISDQTMHSIPTSPSHGSIAAYQGYSPQRTYRSEVSSPIQRGDVTIDRRHRAHHPKHVYVPDRRSVPAGLTLQSVSPQSLQGKTLSQDEGRGTLYKYRPEEVDIDAKLSRLCEQDKVVHALEEKLQQLHKEKYTLEQALLSASQEIEMHADNPAAIQTVVLQRDDLQNGLLSTCRELSRATAELERAWREYDKLEYDVTVTRNQMQEQLDHLGEVQTESAGIQRAQIQKELWRIQDVMEGLSKHKQQRGTTEIGMIGSKPFSTVKYKNEGPDYRLYKSEPELTTVAEVDESNGEEKSEPVSEIETSVVKGSHFPVGVVPPRAKSPTPESSTIASYVTLRKTKKMMDLRTERPRSAVEQLCLAESTRPRMTVEEQMERIRRHQQACLREKKKGLNVIGASDQSPLQSPSNLRDNPFRTTQTRRRDDKELDTAIRENDVKPDHETPATEIVQLKETEPQNVDFSKELKKTENISYEMLFEPEPNGVNSVEMMDKERNKDKMPEDVTFSPQDETQTANHKPEEHPEENTKNSVDEQEETVISYESTPEVSRGNQTMAVKSLSPSPESSASPVPSTQPQLTEGSHFMCV

SEQ ID NO: 6282 - protein, 1175 aa, Homo sapiens
DMAADLNLEWISLPRSWTYGITRGGRVFFINEEAKSTTWLHPVTGEAVVTGHRRQSTDLPTGWEEAYTFEGARYYINHNERKVTCKHPVTGQPSQDNCIFVVNEQTVATMTSEEKKERPISMINEASNYNVTSDYAVHPMSPVGRTSRASKKVHNFGKRSNSIKRNPNAPVVRRGWLYKQDSTGMKLWKKRWFVLSDLCLFYYRDEKEEGILGSILLPSFQIALLTSEDHINRKYAFKAAHPNMRTYYFCTDTGKEMELWMKAMLDAALVQTEPVKRVDKITSENAPTKETNNIPNHRVLIKPEIQNNQKNKEMSKIEEKKALEAEKYGFQKDGQDRPLTKINSVKLNSLPSEYESGSACPAQTVHYRPINLSSSENKIVNVSLADLRGGNRPNTGPLYTEADRVIQRTNSMQQLEQWIKIQKGRGHEEETRGVISYQTLPRNMPSHRAQIMARYPEGYRTLPRNSKTRPESICSVTPSTHDKTLGPGAEEKRRSMRDDTMWQLYEWQQRQFYNKQSTLPRHSTLSSPKTMVNISDQTMHSIPTSPSHGSIAAYQGYSPQRTYRSEVSSPIQRGDVTIDRRHRAHHPKHVYVPDRRSVPAGLTLQSVSPQSLQGKTPEELTLLLIKLRRQQAELSSIREHTLAQLMQLKLEAHSPKNEILSHHLQRNTIYLDHQLSQDEGRGTLYKYRPEEVDIDAKLSRLCEQDKVVHALEEKLQQLHKEKYTLEQALLSASQEIEMHADNPAAIQTVVLQRDDLQNGLLSTCRELSRATAELERAWREYDKLEYDVTVTRNQMQEQLDHLGEVQTESAGIQRAQIQKELWRIQDVMEGLSKHKQQRGTTEIGMIGSKPFSTVKYKNEGPDYRLYKSEPELTTVAEVDESNGEEKSEPVSEIETSVVKGSHFPVGVVPPRAKSPTPESSTIASYVTLRKTKKMMDLRTERPRSAVEQLCLAESTRPRMTVEEQMERIRRHQQACLREKKKGLNVIGASDQSPLQSPSNLRDNPFRTTQTRRRDDKELDTAIRENDVKPDHETPATEIVQLKETEPQNVDFSKELKKTENISYEMLFEPEPNGVNSVEMMDKERNKDKMPEDVTFSPQDETQTANHKPEEHPEENTKNSVDEQEETVISYESTPEVSRGNQTMAVKSLSPSPESSASPVPSTQPQLTEGSHFMCV

SEQ ID NO: 6283 - protein, 1062 aa, Homo sapiens
MVSSAQMGFNLQALLEQLSQDELSKFKYLITTFSLAHELQKIPHKEVDKADGKQLVEILTTHCDSYWVEMASLQVFEKMHRMDLSERAKDEVREAALKSFNKRKPLSLGITRKERPPLDVDEMLERFKTEAQAFTETKGNVICLGKEVFKGKKPDKDNRCRYILKTKFREMWKSWPGDSKEVQVMAERYKMLIPFSNPRVLPGPFSYTVVLYGPAGLGKTTLAQKLMLDWAEDNLIHKFKYAFYLSCRELSRLGPCSFAELVFRDWPELQDDIPHILAQARKILFVIDGFDELGAAPGALIEDICGDWEKKKPVPVLLGSLLNRVMLPKAALLVTTRPRALRDLRILAEEPIYIRVEGFLEEDRRAYFLRHFGDEDQAMRAFELMRSNAALFQLGSAPAVCWIVCTTLKLQMEKGEDPVPTCLTRTGLFLRFLCSRFPQGAQLRGALRTLSLLAAQGLWAQTSVLHREDLERLGVQESDLRLFLDGDILRQDRVSKGCYSFIHLSFQQFLTALFYTLEKEEEEDRDGHTWDIGDVQKLLSGVERLRNPDLIQAGYYSFGLANEKRAKELEATFGCRMSPDIKQELLRCDISCKGGHSTVTDLQELLGCLYESQEEELVKEVMAQFKEISLHLNAVDVVPSSFCVKHCRNLQKMSLQVIKENLPENVTASESDAEVERSQDDQHMLPFWTDLCSIFGSNKDLMGLAINDSFLSASLVRILCEQIASDTCHLQRVVFKNISPADAHRNLCLALRGHKTVTYLTLQGNDQDDMFPALCEVLRHPECNLRYLGLVSCSATTQQWADLSLALEVNQSLTCVNLSDNELLDEGAKLLYTTLRHPKCFLQRLSLENCHLTEANCKDLAAVLVVSRELTHLCLAKNPIGNTGVKFLCEGLRYPECKLQTLVLWNCDITSDGCCDLTKLLQEKSSLLCLDLGLNHIGVKGMKFLCEALRKPLCNLRCLWLWGCSIPPFSCEDLCSALSCNQSLVTLDLGQNPLGSSGVKMLFETLTCSSGTLRTLRLKIDDFNDELNKLLEEIEEKNPQLIIDTEKHHPWAERPSSHDFMI

SEQ ID NO: 6284 - protein, 1040 aa, Homo sapiens
MVSSAQMGFNLQALLEQLSQDELSKFKYLITTFSLAHELQKIPHKEVDKADGKQLVEILTTHCDSYWVEMASLQVFEKMHRMDLSERAKDEVREAALKSFNKRKPLSLGITRKERPPLDVDEMLERFKTEAQDKDNRCRYILKTKFREMWKSWPGDSKEVQVMAERYKMLIPFSNPRVLPGPFSYTVVLYGPAGLGKTTLAQKLMLDWAEDNLIHKFKYAFYLSCRELSRLGPCSFAELVFRDWPELQDDIPHILAQARKILFVIDGFDELGAAPGALIEDICGDWEKKKPVPVLLGSLLNRVMLPKAALLVTTRPRALRDLRILAEEPIYIRVEGFLEEDRRAYFLRHFGDEDQAMRAFELMRSNAALFQLGSAPAVCWIVCTTLKLQMEKGEDPVPTCLTRTGLFLRFLCSRFPQGAQLRGALRTLSLLAAQGLWAQTSVLHREDLERLGVQESDLRLFLDGDILRQDRVSKGCYSFIHLSFQQFLTALFYTLEKEEEEDRDGHTWDIGDVQKLLSGVERLRNPDLIQAGYYSFGLANEKRAKELEATFGCRMSPDIKQELLRCDISCKGGHSTVTDLQELLGCLYESQEEELVKEVMAQFKEISLHLNAVDVVPSSFCVKHCRNLQKMSLQVIKENLPENVTASESDAEVERSQDDQHMLPFWTDLCSIFGSNKDLMGLAINDSFLSASLVRILCEQIASDTCHLQRVVFKNISPADAHRNLCLALRGHKTVTYLTLQGNDQDDMFPALCEVLRHPECNLRYLGLVSCSATTQQWADLSLALEVNQSLTCVNLSDNELLDEGAKLLYTTLRHPKCFLQRLSLENCHLTEANCKDLAAVLVVSRELTHLCLAKNPIGNTGVKFLCEGLRYPECKLQTLVLWNCDITSDGCCDLTKLLQEKSSLLCLDLGLNHIGVKGMKFLCEALRKPLCNLRCLWLWGCSIPPFSCEDLCSALSCNQSLVTLDLGQNPLGSSGVKMLFETLTCSSGTLRTLRLKIDDFNDELNKLLEEIEEKNPQLIIDTEKHHPWAERPSSHDFMI

SEQ ID NO: 6285 - protein, 79 aa, Homo sapiens
RLLPDSSSGCPRASFQPARPHRARHPHWREFDLMFHKALYLRRRGMVCLQSVCRSDCSGKENKGDNNCNHNDPLYENSS

SEQ ID NO: 6286 - protein, 803 aa, Homo sapiens
MGIQGLLQFIKEASEPIHVRKYKGQVVAVDTYCWLHKGAIACAEKLAKGEPTDRYVGFCMKFVNMLLSHGIKPILVFDGCTLPSKKEVERSRRERRQANLLKGKQLLREGKVSEARECFTRSINITHAMAHKVIKAARSQGVDCLVAPYEADAQLAYLNKAGIVQAIITEDSDLLAFGCKKVILKMDQFGNGLEIDQARLGMCRQLGDVFTEEKFRYMCILSGCDYLSSLRGIGLAKACKVLRLANNPDIVKVIKKIGHYLKMNITVPEDYINGFIRANNTFLYQLVFDPIKRKLIPLNAYEDDVDPETLSYAGQYVDDSIALQIALGNKDINTFEQIDDYNPDTAMPAHSRSRSWDDKTCQKSANVSSIWHRNYSPRPESGTVSDAPQLKENPSTVGVERVISTKGLNLPRKSSIVKRPRSAELSEDDLLSQYSLSFTKKTKKNSSEGNKSLSFSEVFVPDLVNGPTNKKSVSTPPRTRNKFATFLQRKNEESGAVVVPGTRSRFFCSSDSTDCVSNKVSIQPLDETAVTDKENNLHESEYGDQEGKRLVDTDVARNSSDDIPNNHIPGDHIPDKATVFTDEESYSFESSKFTRTISPPTLGTLRSCFSWSGGLGDFSRTPSPSPSTALQQFRRKSDSPTSLPENNMSDVSQLKSEESSDDESHPLREGACSSQSQESGEFSLQSSNASKLSQCSSKDSDSEESDCNIKLLDSQSDQTSKLCLSHFSKKDTPLRNKVPGLYKSSSADSLSTTKIKPLGPARASGLSKKPASIQKRKHHNAENKPGLQIKLNELWKNFGFKKF

SEQ ID NO: 6287 - protein, 846 aa, Homo sapiens
MGIQGLLQFIKEASEPIHVRKYKGQVVAVDTYCWLHKGAIACAEKLAKGEPTDRYVGFCMKFVNMLLSHGIKPILVFDGCTLPSKKEVERSRRERRQANLLKGKQLLREGKVSEARECFTRSINITHAMAHKVIKAARSQGVDCLVAPYEADAQLAYLNKAGIVQAIITEDSDLLAFGCKKVILKMDQFGNGLEIDQARLGMCRQLGDVFTEEKFRYMCILSGCDYLSSLRGIGLAKACKVLRLANNPDIVKVIKKIGHYLKMNITVPEDYINGFIRANNTFLYQLVFDPIKRKLIPLNAYEDDVDPETLSYAGQYVDDSIALQIALGNKDINTFEQIDDYNPDTAMPAHSRSHSWDDKTCQKSANVSSIWHRNYSPRPESGTVSDAPQLKENPSTVGVERVISTKGLNLPRKSSIVKRPRSAELSEDDLLSQYSLSFTKKTKKNSSEGNKSLSFSEVFVPDLVNGPTNKKSVSTPPRTRNKFATFLQRKNEESGAVVVPGTRSRFFCSSDSTDCVSNKVSIQPLDETAVTDKENNLHESEYGDQEGKRLVDTDVARNSSDDIPNNHIPGDHIPDKATVFTDEESYSFESSKFTRTISPPTLGTLRSCFSWSGGLGDFSRTPSPSPSTALQQFRRKSDSPTSLPENNMSDVSQLKSEESSDDESHPLREGACSSQSQESGEFSLQSSNASKLSQCSSKDSDSEESDCNIKLLDSQSDQTSKLCLSHFSKKDTPLRNKVPGLYKSSSADSLSTTKIKPLGPARASGLSKKPASIQKRKHHNAENKPGLQIKLNELWKNFGFKKDSEKLPPCKKPLSPVRDNIQLTPEAEEDIFNKPECGRVQRAIFQ

SEQ ID NO: 6288 - protein, 1972 aa, Homo sapiens
MAQKGQLSDDEKFLFVDKNFINSPVAQADWAAKRLVWVPSEKQGFEAASIKEEKGDEVVVELVENGKKVTVGKDDIQKMNPPKFSKVEDMAELTCLNEASVLHNLRERYFSGLIYTYSGLFCVVVNPYKHLPIYSEKIVDMYKGKKRHEMPPHIYAIADTAYRSMLQDREDQSILCTGESGAGKTENTKKVIQYLAVVASSHKGKKDTSITGELEKQLLQANPILEAFGNAKTVKNDNSSRFGKFIRINFDVTGYIVGANIETYLLEKSRAIRQARDERTFHIFYYMIAGAKEKMRSDLLLEGFNNYTFLSNGFVPIPAAQDDEMFQETVEAMAIMGFSEEEQLSILKVVSSVLQLGNIVFKKERNTDQASMPDNTAAQKVCHLMGINVTDFTRSILTPRIKVGRDVVQKAQTKEQADFAVEALAKATYERLFRWILTRVNKALDKTHRQGASFLGILDIAGFEIFEVNSFEQLCINYTNEKLQQLFNHTMFILEQEEYQREGIEWNFIDFGLDLQPCIELIERPNNPPGVLALLDEECWFPKATDKSFVEKLCTEQGSHPKFQKPKQLKDKTEFSIIHYAGKVDYNASAWLTKNMDPLNDNVTSLLNASSDKFVADLWKDVDRIVGLDQMAKMTESSLPSASKTKKGMFRTVGQLYKEQLGKLMTTLRNTTPNFVRCIIPNHEKRSGKLDAFLVLEQLRCNGVLEGIRICRQGFPNRIVFQEFRQRYEILAANAIPKGFMDGKQACILMIKALELDPNLYRIGQSKIFFRTGVLAHLEEERDLKITDVIMAFQAMCRGYLARKAFAKRQQQLTAMKVIQRNCAAYLKLRNWQWWRLFTKVKPLLQVTRQEEEMQAKEDELQKTKERQQKAENELKELEQKHSQLTEEKNLLQEQLQAETELYAEAEEMRVRLAAKKQELEEILHEMEARLEEEEDRGQQLQAERKKMAQQMLDLEEQLEEEEAARQKLQLEKVTAEAKIKKLEDEILVMDDQNNKLSKERKLLEERISDLTTNLAEEEEKAKNLTKLKNKHESMISELEVRLKKEEKSRQELEKLKRKLEGDASDFHEQIADLQAQIAELKMQLAKKEEELQAALARLDDEIAQKNNALKKIRELEGHISDLQEDLDSERAARNKAEKQKRDLGEELEALKTELEDTLDSTATQQELRAKREQEVTVLKKALDEETRSHEAQVQEMRQKHAQAVEELTEQLEQFKRAKANLDKNKQTLEKENADLAGELRVLGQAKQEVEHKKKKLEAQVQELQSKCSDGERARAELNDKVHKLQNEVESVTGMLNEAEGKAIKLAKDVASLSSQLQDTQELLQEETRQKLNVSTKLRQLEEERNSLQDQLDEEMEAKQNLERHISTLNIQLSDSKKKLQDFASTVEALEEGKKRFQKEIENLTQQYEEKAAAYDKLEKTKNRLQQELDDLVVDLDNQRQLVSNLEKKQRKFDQLLAEEKNISSKYADERDRAEAEAREKETKALSLARALEEALEAKEELERTNKMLKAEMEDLVSSKDDVGKNVHELEKSKRALETQMEEMKTQLEELEDELQATEDAKLRLEVNMQALKGQFERDLQARDEQNEEKRRQLQRQLHEYETELEDERKQRALAAAAKKKLEGDLKDLELQADSAIKGREEAIKQLRKLQAQMKDFQRELEDARASRDEIFATAKENEKKAKSLEADLMQLQEDLAAAERARKQADLEKEELAEELASSLSGRNALQDEKRRLEARIAQLEEELEEEQGNMEAMSDRVRKATQQAEQLSNELATERSTAQKNESARQQLERQNKELRSKLHEMEGAVKSKFKSTIAALEAKIAQLEEQVEQEAREKQAATKSLKQKDKKLKEILLQVEDERKMAEQYKEQAEKGNARVKQLKRQLEEAEEESQRINANRRKLQRELDEATESNEAMGREVNALKSKLRRGNETSFVPSRRSGGRRVIENADGSEEETDTRDADFNGTKASE

SEQ ID NO: 6289 - protein, 1938 aa, Homo sapiens
MAQKGQLSDDEKFLFVDKNFINSPVAQADWAAKRLVWVPSEKQGFEAASIKEEKGDEVVVELVENGKKVTVGKDDIQKMNPPKFSKVEDMAELTCLNEASVLHNLRERYFSGLIYTYSGLFCVVVNPYKHLPIYSEKIVDMYKGKKRHEMPPHIYAIADTAYRSMLQDREDQSILCTGESGAGKTENTKKVIQYLAVVASSHKGKKDTSITGELEKQLLQANPILEAFGNAKTVKNDNSSRFGKFIRINFDVTGYIVGANIETYLLEKSRAIRQARDERTFHIFYYMIAGAKEKMRSDLLLEGFNNYTFLSNGFVPIPAAQDDEMFQETVEAMAIMGFSEEEQLSILKVVSSVLQLGNIVFKKERNTDQASMPDNTAAQKVCHLMGINVTDFTRSILTPRIKVGRDVVQKAQTKEQADFAVEALAKATYERLFRWILTRVNKALDKTHRQGASFLGILDIAGFEIFEVNSFEQLCINYTNEKLQQLFNHTMFILEQEEYQREGIEWNFIDFGLDLQPCIELIERPNNPPGVLALLDEECWFPKATDKSFVEKLCTEQGSHPKFQKPKQLKDKTEFSIIHYAGKVDYNASAWLTKNMDPLNDNVTSLLNASSDKFVADLWKDVDRIVGLDQMAKMTESSLPSASKTKKGMFRTVGQLYKEQLGKLMTTLRNTTPNFVRCIIPNHEKRSGKLDAFLVLEQLRCNGVLEGIRICRQGFPNRIVFQEFRQRYEILAANAIPKGFMDGKQACILMIKALELDPNLYRIGQSKIFFRTGVLAHLEEERDLKITDVIMAFQAMCRGYLARKAFAKRQQQLTAMKVIQRNCAAYLKLRNWQWWRLFTKVKPLLQVTRQEEEMQAKEDELQKTKERQQKAENELKELEQKHSQLTEEKNLLQEQLQAETELYAEAEEMRVRLAAKKQELEEILHEMEARLEEEEDRGQQLQAERKKMAQQMLDLEEQLEEEEAARQKLQLEKVTAEAKIKKLEDEILVMDDQNNKLSKERKLLEERISDLTTNLAEEEEKAKNLTKLKNKHESMISELEVRLKKEEKSRQELEKLKRKLEGDASDFHEQIADLQAQIAELKMQLAKKEEELQAALARLDDEIAQKNNALKKIRELEGHISDLQEDLDSERAARNKAEKQKRDLGEELEALKTELEDTLDSTATQQELRAKREQEVTVLKKALDEETRSHEAQVQEMRQKHAQAVEELTEQLEQFKRAKANLDKNKQTLEKENADLAGELRVLGQAKQEVEHKKKKLEAQVQELQSKCSDGERARAELNDKVHKLQNEVESVTGMLNEAEGKAIKLAKDVASLSSQLQDTQELLQEETRQKLNVSTKLRQLEEERNSLQDQLDEEMEAKQNLERHISTLNIQLSDSKKKLQDFASTVEALEEGKKRFQKEIENLTQQYEEKAAAYDKLEKTKNRLQQELDDLVVDLDNQRQLVSNLEKKQRKFDQLLAEEKNISSKYADERDRAEAEAREKETKALSLARALEEALEAKEELERTNKMLKAEMEDLVSSKDDVGKNVHELEKSKRALETQMEEMKTQLEELEDELQATEDAKLRLEVNMQALKGQFERDLQARDEQNEEKRRQLQRQLHEYETELEDERKQRALAAAAKKKLEGDLKDLELQADSAIKGREEAIKQLRKLQAQMKDFQRELEDARASRDEIFATAKENEKKAKSLEADLMQLQEDLAAAERARKQADLEKEELAEELASSLSGRNALQDEKRRLEARIAQLEEELEEEQGNMEAMSDRVRKATQQAEQLSNELATERSTAQKNESARQQLERQNKELRSKLHEMEGAVKSKFKSTIAALEAKIAQLEEQVEQEAREKQAATKSLKQKDKKLKEILLQVEDERKMAEQYKEQAEKGNARVKQLKRQLEEAEEESQRINANRRKLQRELDEATESNEAMGREVNALKSKLRGPPPQETSQ

SEQ ID NO: 6290 - protein, 244 aa, Homo sapiens [sequence omitted]

SEQ ID NO: 6291 - protein, 691 aa, Homo sapiens
MEKIYSRGELHHFIDGFNEEKSNWMRYVNPAHSPREQNLAACQNGMNIYFYTIKPIPANQELLVWYCRDFAERLHYPYPGELTMMNLTQTQSSLKQPSTEKNELCPKNVPKREYSVKEILKLDSNPSKGKDLYRSNISPLTSEKDLDDFRRRGSPEMPFYPRVVYPIRAPLPEDFLKASLAYGIERPTYITRSPIPSSTTPSPSARSSPDQSLKSSSPHSSPGNTVSPVGPGSQEHRDSYAYLNASYGTEGLGSYPGYAPLPHLPPAFIPSYNAHYPKFLLPPYGMNCNGLSAVSSMNGINNFGLFPRLCPVYSNLLGGGSLPHPMLNPTSLPSSLPSDGARRLLQPEHPREVLVPAPHSAFSFTGAAASMKDKACSPTSGSPTAGTAATAEHVVQPKATSAAMAAPSSDEAMNLIKNKRNMTGYKTLPYPLKKQNGKIKYECNVCAKTFGQLSNLKVHLRVHSGERPFKCQTCNKGFTQLAHLQKHYLVHTGEKPHECQVCHKRFSSTSNLKTHLRLHSGEKPYQCKVCPAKFTQFVHLKLHKRLHTRERPHKCSQCHKNYIHLCSLKVHLKGNCAAAPAPGLPLEDLTRINEEIEKFDISDNADRLEDVEDDISVISVVEKEILAVVRKEKEETGLKVSLQRNMGNGLLSSGCSLYESSDLPLMKLPPSNPLPLVPVKVKQETVEPMDP

SEQ ID NO: 6292 - protein, 789 aa, Homo sapiens
MKMDMEDADMTLWTEAEFEEKCTYIVNDHPWDSGADGGTSVQAEASLPRNLLFKYATNSEEVIGVMSKEYIPKGTRFGPLIGEIYTNDTVPKNANRKYFWRIYSRGELHHFIDGFNEEKSNWMRYVNPAHSPREQNLAACQNGMNIYFYTIKPIPANQELLVWYCRDFAERLHYPYPGELTMMNLTQTQSSLKQPSTEKNELCPKNVPKREYSVKEILKLDSNPSKGKDLYRSNISPLTSEKDLDDFRRRGSPEMPFYPRVVYPIRAPLPEDFLKASLAYGIERPTYITRSPIPSSTTPSPSARSSPDQSLKSSSPHSSPGNTVSPVGPGSQEHRDSYAYLNASYGTEGLGSYPGYAPLPHLPPAFIPSYNAHYPKFLLPPYGMNCNGLSAVSSMNGINNFGLFPRLCPVYSNLLGGGSLPHPMLNPTSLPSSLPSDGARRLLQPEHPREVLVPAPHSAFSFTGAAASMKDKACSPTSGSPTAGTAATAEHVVQPKATSAAMAAPSSDEAMNLIKNKRNMTGYKTLPYPLKKQNGKIKYECNVCAKTFGQLSNLKVHLRVHSGERPFKCQTCNKGFTQLAHLQKHYLVHTGEKPHECQVCHKRFSSTSNLKTHLRLHSGEKPYQCKVCPAKFTQFVHLKLHKRLHTRERPHKCSQCHKNYIHLCSLKVHLKGNCAAAPAPGLPLEDLTRINEEIEKFDISDNADRLEDVEDDISVISVVEKEILAVVRKEKEETGLKVSLQRNMGNGLLSSGCSLYESSDLPLMKLPPSNPLPLVPVKVKQETVEPMDP

SEQ ID NO: 6293 - protein, 741 aa, Homo sapiens [sequence omitted]

SEQ ID NO: 6294 - protein, 709 aa, Homo sapiens
MESPTKEIEEFESNSLKYLQPEQIEKIWLRLRGLRKYKKTSQRLRSLVKQLERGEASVVDLKKNLEYAATVLESVYIDETRRLLDTEDELSDIQSDAVPSEVRDWLASTFTRQMGMMLRRSDEKPRFKSIVHAVQAGIFVERMYRRTSNMVGLSYPPAVIEALKDVDKWSFDVFSLNEASGDHALKFIFYELLTRYDLISRFKIPISALVSFVEALEVGYSKHKNPYHNLMHAADVTQTVHYLLYKTGVANWLTELEIFAIIFSAAIHDYEHTGTTNNFHIQTRSDPAILYNDRSVLENHHLSAAYRLLQDDEEMNILINLSKDDWREFRTLVIEMVMATDMSCHFQQIKAMKTALQQPEAIEKPKALSLMLHTADISHPAKAWDLHHRWTMSLLEEFFRQGDREAELGLPFSPLCDRKSTMVAQSQVGFIDFIVEPTFTVLTDMTEKIVSPLIDETSQTGGTGQRRSSLNSISSSDAKRSGVKTSGSEGSAPINNSVISVDYKSFKATWTEVVHINRERWRAKVPKEEKAKKEAEEKARLAAEEQQKEMEAKSQAEEGASGKAEKKTSGETKNQVNGTRANKSDNPRGKNSKAEKSSGEQQQNGDFKDGKNKTDKKDHSNIGNDSKKTDGTKQRSHGSPAPSTSSTCRLTLPVIKPPLRHFKRPAYASSSYAPSVSKKTDEHPARYKMLDQRIKMKKIQNISHNWNRK

SEQ ID NO: 6295 - protein, 760 aa, Homo sapiens
MKLNVDGLLVYFPYDYIYPEQFSYMRELKRTLDAKGHGVLEMPSGTGKTVSLLALIMAYQRAYPLEVTKLIYCSRTVPEIEKVIEELRKLLNFYEKQEGEKLPFLGLALSSRKNLCIHPEVTPLRFGKDVDGKCHSLTASYVRAQYQHDTSLPHCRFYEEFDAHGREVPLPAGIYNLDDLKALGRRQGWCPYFLARYSILHANVVVYSYHYLLDPKIADLVSKELARKAVVVFDEAHNIDNVCIDSMSVNLTRRTLDRCQGNLETLQKTVLRIKETDEQRLRDEYRRLVEGLREASAARETDAHLANPVLPDEVLQEAVPGSIRTAEHFLGFLRRLLEYVKWRLRVQHVVQESPPAFLSGLAQRVCIQRKPLRFCAERLRSLLHTLEITDLADFSPLTLLANFATLVSTYAKGFTIIIEPFDDRTPTIANPILHFSCMDASLAIKPVFERFQSVIITSGTLSPLDIYPKILDFHPVTMATFTMTLARVCLCPMIIGRGNDQVAISSKFETREDIAVIRNYGNLLLEMSAVVPDGIVAFFTSYQYMESTVASWYEQGILENIQRNKLLFIETQDGAETSVALEKYQEACENGRGAILLSVARGKVSEGIDFVHHYGRAVIMFGVPYVYTQSRILKARLEYLRDQFQIRENDFLTFDAMRHAAQCVGRAIRGKTDYGLMVFADKRFARGDKRGKLPRWIQEHLTDANLNLTVDEGVQVAKYFLRQMAQPFHREDQLGLSLLSLEQLESEETLKRIEQIAQQL

SEQ ID NO: 6296 - protein, 1255 aa, Homo sapiens
ARVAANAPPPASHPRRPPRPGTNGWSRRGSCRASWSRDCSGVRSRRVALGMAMDQVNALCEQLVKAVTVMMDPNSTQRYRLEALKFCEEFKEKCPICVPCGLRLAEKTQVAIVRHFGLQILEHVVKFRWNGMSRLEKVYLKNSVMELIANGTLNILEEENHIKDALSRIVVEMIKREWPQHWPDMLIELDTLSKQGETQTELVMFILLRLAEDVVTFQTLPPQRRRDIQQTLTQNMERIFSFLLNTLQENVNKYQQVKTDTSQESKAQANCRVGVAALNTLAGYIDWVSMSHITAENCKLLEILCLLLNEQELQLGAAECLLIAVSRKGKLEDRKPLMVLFGDVAMHYILSAAQTADGGGLVEKHYVFLKRLCQVLCALGNQLCALLGADSDVETPSNFGKYLESFLAFTTHPSQFLRSSTQMTWGALFRHEILSRDPLLLAIIPKYLRASMTNLVKMGFPSKTDSPSCEYSRFDFDSDEDFNAFFNSSRAQQGEVMRLACRLDPKTSFQMAGEWLKYQLSTFLDAGSVNSCSAVGTGEGSLCSVFSPSFVQWEAMTLFLESVITQMFRTLNREEIPVNDGIELLQMVLNFDTKDPLILSCVLTNVSALFPFVTYRPEFLPQVFSKLFSSVTFETVEESKAPRTRAVRNVRRHACSSIIKMCRDYPQLVLPNFDMLYNHVKQLLSNELLLTQMEKCALMEALVLISNQFKNYERQKVFLEELMAPVASIWLSQDMHRVLSDVDAFIAYVGTDQKSCDPGLEDPCGLNRARMSFCVYSILGVVKRTCWPTDLEEAKAGGFVVGYTSSGNPIFRNPCTEQILKLLDNLLALIRTHNTLYAPEMLAKMAEPFTKALDMLDAEKSAILGLPQPLLELNDSPVFKTVLERMQRFFSTLYENCFHILGKAGPSMQQDFYTVEDLATQLLSSAFVNLNNIPDYRLRPMLPRVFVKPLVLFCPPEHYEALVSPILGPLFTYLHMRLSQKWQVINQRSLLCGEDEAADENPESQEMLEEQLVRMLTREVMDLITVCCVSKKGADHSSAPPADGDDEEMMATEVTPSAMAELTDLGKCLMKHEDVCTALLITAFNSLAWKDTLSCQRTTSQLCWPLLKQVLSGTLLADAVTWLFTSVLKGLQMHGQHDGCMASLVHLAFQIYEALRPRYLEIRAVMEQIPEIQKDSLDQFDCKLLNPSLQKVADKRRKDQFKRLIAGCIGKPLGEQFRKEVHIKNLPSLFKKTKPMLETEVLDNDGGGLATIFEP

SEQ ID NO: 6297 - protein, 913 aa, Homo sapiens
MQAEAADWFSSMVRGGRPGRPRRGCRAGENRGFPGPPAPQPARPPSPPPAALSLCPPQPFQKHVYYPLASGPEGPDVAVAAAAAGAASMACAPPSAASGPLPFFQFRPRLESVDWRRLSAIDVDKVAGAVDVLTLQENIMNITFCKLEDEKCPHCQSGVDPVLLKLIRLAQFTIEYLLHSQEFLTSQLHTLEERLRLSHCDGEQSKKLLTKQAGEIKTLKEECKRRKKMISTQQLMIEAKANYYQCHFCDKAFMNQAFLQSHIQRRHTEENSHFEYQKNAQIEKLRSEIVVLKEELQLTRSELEAAHHASAVRFSKEYEMQKTKEEDFLKLFDRWKEEEKEKLVDEMEKVKEMFMKEFKELTSKNSALEYQLSEIQKSNMQIKSNIGTLKDAHEFKEDRSPYPQDFHNVMQLLDSQESKWTARVQAIHQEHKKEKGRLLSHIEKLRTSMIDDLNASNVFYKKRIEELGQRLQEQNELIITQRQQIKDFTCNPLNSISEPKGNPLAWQAFESQPAAPAVPMNAPALHTLETKSSLPMVHEQAFSSHILEPIEELSEEEKGRENEQKLNNNKMHLRKALKSNSSLTKGLRTMVEQNLMEKLETLGINADIRGISSDQLHRVLKSVESERHKQEREIPNFHQIREFLEHQVSCKIEEKALLSSDQCSVSQMDTLSTGEVPKMIQLPSKNRQLIRQKAVSTDRTSVPKIKKNVMEDPFPRKSSTITTPPFSSEEEQEDDDLIRAYASPGPLPVPPPQNKGSFGKNTVKSDADGTEGSEIEDTDDSPKPAGVAVKTPTEKVEKMFPHRKNVNKPVGGTNVPEMFIKKEELQELKCADVEDEDWDISSLEEEISLGKKSGKEQKEPPPAKNEPHFAHVLNAWGAFNPKGPKGEGLQENESSTLKSSLVTVTDWSDTSDV

SEQ ID NO: 6298 - protein, 848 aa, Homo sapiens
MQAEAADWFSSMPFQKHVYYPLASGPEGPDVAVAAAAAGAASMACAPPSAASGPLPFFQFRPRLESVDWRRLSAIDVDKVAGAVDVLTLQENIMNITFCKLEDEKCPHCQSGVDPVLLKLIRLAQFTIEYLLHSQEFLTSQLHTLEERLRLSHCDGEQSKKLLTKQAGEIKTLKEECKRRKKMISTQQLMIEAKANYYQCHFCDKAFMNQAFLQSHIQRRHTEENSHFEYQKNAQIEKLRSEIVVLKEELQLTRSELEAAHHASAVRFSKEYEMQKTKEEDFLKLFDRWKEEEKEKLVDEMEKVKEMFMKEFKELTSKNSALEYQLSEIQKSNMQIKSNIGTLKDAHEFKEDRSPYPQDFHNVMQLLDSQESKWTARVQAIHQEHKKEKGRLLSHIEKLRTSMIDDLNASNVFYKKRIEELGQRLQEQNELIITQRQQIKDFTCNPLNSISEPKVNAPALHTLETKSSLPMVHEQAFSSHILEPIEELSEEEKGRENEQKLNNNKMHLRKALKSNSSLTKGLRTMVEQNLMEKLETLGINADIRGISSDQLHRVLKSVESERHKQEREIPNFHQIREFLEHQVSCKIEEKALLSSDQCSVSQMDTLSTGEVPKMIQLPSKNRQLIRQKAVSTDRTSVPKIKKNVMEDPFPRKSSTITTPPFSSEEEQEDDDLIRAYASPGPLPVPPPQNKGSFGKNTVKSDADGTEGSEIEDTDDSPKPAGVAVKTPTEKVEKMFPHRKNVNKPVGGTNVPEMFIKKEELQELKCADVEDEDWDISSLEEEISLGKKSGKEQKEPPPAKNEPHFAHVLNAWGAFNPKGPKGEGLQENESSTLKSSLVTVTDWSDTSDV

SEQ ID NO: 6299 - protein, 3526 aa, Homo sapiens [sequence omitted]

SEQ ID NO: 6300 - protein, 936 aa, Homo sapiens
MALTQGPLTFRDVAIEFSQEEWKSLDPVQKALYWDVMLENYRNLVFLGILPKCMTKELPPIGNSNTGEKCQTVTLERHECYDVENFYLREIQKNLQDLEFQWKDGEINYKEVPMTYKNNLNGKRGQHSQEDVENKCIENQLTLSFQSRLTELQKFQTEGKIYECNQSEKTVNNSSLVSPLQRILPSVQTNISKKYENEFLQLSLPTQLEKTHIREKPYMCKGCGKAFRVSSSLINHQMVHTTEKPYKCNECGKAFHRGSLLTIHQIVHTRGKPYQCGVCGKIFRQNSDLVNHRRSHTGEKPYKCNECGKSFSQSYNLAIHQRIHTGEKPYKCNECGKTFKQGSCLTTHQIIHTGEKPYQCDICGKVFRQNSNLVNHQRIHTGEKPYKCNICGKSFSQSSNLATHQTVHSGNKPYKCDECGKTFKRSSSLTTHQIIHTGEKPYTCDVCDKVFSQRSQLARHQRSHTGEKPYKCNECGKVFSQTSHLVGHRRIHTGEKPYKCDKCGKAFKQGSLLTRHKIIHTREKRYQCGECGKVFSENSCLVRHLRIHTGEQPYKCNVCGKVFNYSGNLSIHKRIHTGEKPFQCNECGTVFRNYSCLARHLRIHTGQKPYKCNVCGKVFNDSGNLSNHKRIHTGEKPFQCNECGKVFSYYSCLARHRKIHTGEKPYKCNDCGKAYTQRSSLTKHLIIHTGEKPYNCNEFGGAFIQSSKLARYHRNPTGEKPHKCSHCGRTFSHITGLTYHQRRHTGEMPYKCIECGQVFNSTSNLARHRRIHTGEKPYKCNECGKVFRHQSTLARHRSIHTGEKPYVCNECGKAFRVRSILVNHQKMHTGDKPYKCNECGKAFIERSKLVYHQRNHTGEKPYKCIECGKAFGRFSCLNKHQMIHSGEKPYKCNECGKSFISRSGLTKHQTKHTAESLKTKFNVEKPLDVLLTSGFK

SEQ ID NO: 6301 - protein, 220 aa, Homo sapiens
  VARIANT 18: Xaa = Any Amino Acid
TSWRRGEVTPRRGSGGGXETIGAKQGRTQLSSGFVNSTMEEAGLCGLREKADMLCNSESHDILQHQDSNCSATSNKHLLEDEEGRDFITKNRSWVSPVHCTQESRRELPEQEVAPPSGQQALQLQQEQRKSLRKRSFIIDASPKHSFRLQRRSWQLSVRNMLILEIHLFYRRVCFELYDLKQNSFFGDYGNILNRETLLDFVKQIMEKIQNFLKNHGKFL

SEQ ID NO: 6302 - protein, 3130 aa, Homo sapiens
MFSVRIVTADYYMASPLQGLDTCQSPLTQAPVKKVPVVRVFGATPAGQKTCLHLHGIFPYLYVPYDGYGQQPESYLSQMAFSIDRALNVALGNPSSTAQHVFKVSLVSGMPFYGYHEKERHFMKIYLYNPTMVKRICELLQSGAIMNKFYQPHEAHIPYLLQLFIDYNLYGMNLINLAAVKFRKARRKSNTLHATGSCKNHLSGNSLADTLFRWEQDEIPSSLILEGVEPQSTCELEVDAVAADILNRLDIEAQIGGNPGLQAIWEDEKQRRRNRNETSQMSQPESQDHRFVPATESEKKFQKRLQEILKQNDFSVTLSGSVDYSDGSQEFSAELTLHSEVLSPEMLQCTPANMVEVHKDKESSKGHTRHKVEEALINEEAILNLMENSQTFQPLTQRLSESPVFMDSSPDEALVHLLAGLESDGYRGERNRMPSPCRSFGNNKYPQNSDDEENEPQIEKEEMELSLVMSQRWDSNIEEHCAKKRSLCRNTHRSSTEDDDSSSGEEMEWSDNSLLLASLSIPQLDGTADENSDNPLNNENSRTHSSVIATSKLSVKPSIFHKDAATLEPSSSAKITFQCKHTSALSSHVLNKEDLIEDLSQTNKNTEKGLDNSVTSFTNESTYSMKYPGSLSSTVHSENSHKENSKKEILPVSSCESSIFDYEEDIPSVTRQVPSRKYTNIRKIEKDSPFIHMHRHPNENTLGKNSFNFSDLNHSKNKVSSEGNEKGNSTALSSLFPSSFTENCELLSCSGENRTMVHSLNSTADESGLNKLKIRYEEFQEHKTEKPSLSQQAAHYMFFPSVVLSNCLTRPQKLSPVTYKLQPGNKPSRLKLNKRKLAGHQETSTKSSETGSTKDNFIQNNPCNSNPEKDNALASDLTKTTRGAFENKTPTDGFIDCHFGDGTLETEQSFGLYGNKYTLRAKRKVNYETEDSESSFVTHNSKISLPHPMEIGESLDGTLKSRKRRKMSKKLPPVIIKYIIINRFRGRKNMLVKLGKIDSKEKQVILTEEKMELYKKLAPLKDFWPKVPDSPATKYPIYPLTPKKSHRRKSKHKSAKKKTGKQQRTNNENIKRTLSFRKKRSHAILSPPSPSYNAETEDCDLNYSDVMSKLGFLSERSTSPINSSPPRCWSPTDPRAEEIMAAAEKEAMLFKGPNVYKKTVNSRIGKTSRARAQIKKSKAKLANPSIVTKKRNKRNQTNKLVDDGKKKPRAKQKTNEKGTSRKHITLKDEKIKSQSGAEVKFVLKHQNVSEFASSSGGSQLLFKQKDMPLMGSAVDHPLSASLPTGINAQQKLSGCFSSFLESKKSVDLQTFPSSRDDLHPSVVCNSIGPGVSKINVQRPHNQSAMFTLKESTLIQKNIFDLSNHLSQVAQNTQISSGMSSKIEDNANNIQRNYLSSIGKLSEYRNSLESKLDQAYTPNFLHCKDSQQQIVCIAEQSKHSETCSPGNTASEESQMPNNCFVTSLRSPIKQIAWEQKQRGFILDMSNFKPERVKPRSLSEAISQTKALSQCKNRNVSTPSAFGEGQSGLAVLKELLQKRQQKAQNANTTQDPLSNKHQPNKNISGSLEHNKANKRTRSVTSPRKPRTPRSTKQKEKIPKLLKVDSLNLQNSSQLDNSVSDDSPIFFSDPGFESCYSLEDSLSPEHNYNFDINTIGQTGFCSFYSGSQFVPADQNLPQKFLSDAVQDLFPGQAIEKNEFLSHDNQKCDEDKHHTTDSASWIRSGTLSPEIFEKSTIDSNENRRHNQWKNSFHPLTTRSNSIMDSFCVQQAEDCLSEKSRLNRSSVSKEVFLSLPQPNNSDWIQGHTRKEMGQSLDSANTSFTAILSSPDGELVDVACEDLELYVSRNNDMLTPTPDSSPRSTSSPSQSKNGSFTPRTANILKPLMSPPSREEIMATLLDHDLSETIYQEPFCSNPSDVPEKPREIGGRLLMVETRLANDLAEFEGDFSLEGLRLWKTAFSAMTQNPRPGSPLRSGQGVVNKGSSNSPKMVEDKKIVIMPCKCAPSRQLVQVWLQAKEEYERSKKLPKTKPTGVVKSAENFSSSVNPDDKPVVPPKMDVSPCILPTTAHTKEDVDNSQIALQAPTTGCSQTASESQMLPPVASASDPEKDEDDDDNYYISYSSPDSPVIPPWQQPISPDSKALNGDDRPSSPVEELPSLAFENFLKPIKDGIQKSPCSEPQEPLVISPINTRARTGKCESLCFHSTPIIQRKLLERLPEAPGLSPLSTEPKTQKLSNKKGSNTDTLRRVLLTQAKNQFAAVNTPQKETSQIDGPSLNNTYGFKVSIQNLQEAKALHEIQNLTLISVELHARTRRDLEPDPEFDPICALFYCISSDTPLPDTEKTELTGVIVIDKDKTVFSQDIRYQTPLLIRSGITGLEVTYAADEKALFHEIANIIKRYDPDILLGYEIQMHSWGYLLQRAAALSIDLCRMISRVPDDKIENRFAAERDEYGSYTMSEINIVGRITLNLWRIMRNEVALTNYTFENVSFHVLHQRFPLFTFRVLSDWFDNKTDLYRWKMVDHYVSRVRGNLQMLEQLDLIGKTSEMARLFGIQFLHVLTRGSQYRVESMMLRIAKPMNYIPVTPSVQQRSQMRAPQCVPLIMEPESRFYSNSVLVLDFQSLYPSIVIAYNYCFSTCLGHVENLGKYDEFKFGCTSLRVPPDLLYQVRHDITVSPNGVAFVKPSVRKGVLPRMLEEILKTRFMVKQSMKAYKQDRALSRMLDARQLGLKLIANVTFGYTSANFSGRMPCIEVGDSIVHKARETLERAIKLVNDTKKWGARVVYGDTDSMFVLLKGATKEQSFKIGQEIAEAVTATNPKPVKLKFEKVYLPCVLQTKKRYVGYMYETLDQKDPVFDAKGIETVRRDSCPAVSKILERSLKLLFETRDISLIKQYVQRQCMKLLEGKASIQDFIFAKEYRGSFSYKPGACVPALELTRKMLTYDRRSEPQVGERVPYVIIYGTPGVPLIQLVRRPVEVLQDPTLRLNATYYITKQILPPLARIFSLIGIDVFSWYHELPRIHKATSSSRSEPEGRKGTISQYFTTLHCPVCDDLTQHGICSKCRSQPQHVAVILNQEIRELERQQEQLVKICKNCTGCFDRHIPCVSLNCPVLFKLSRVNRELSKAPYLRQLLDQF

SEQ ID NO: 6303 - protein, 762 aa, Homo sapiens
MEKLEVLEEWQSHIEGWEGSNITDTCTEMLMCGVLLKISSGNIQERVFFLFDNLLVYCKRKHRRLKNSKASTDGHRYLFRGRINTEVMEVENVDDGTADFHSSGHIVVNGWKIHNTAKNKWFVCMAKTPEEKHEWFEAILKERERRKGLKLGMEQDTWVMISEQGEKLYKMMCRQGNLIKDRKRKLTTFPKCFLGSEFVSWLLEIGEIHRPEEGVHLGQALLENGIIHHVTDKHQFKPEQMLYRFRYDDGTFYPRNEMQDVISKGVRLYCRLHSLFTPVIRDKDYHLRTYKSVVMANKLIDWLIAQGDCRTREEAMIFGVGLCDNGFMHHVLEKSEFKDEPLLFRFFSDEEMEGSNMKHRLMKHDLKVVENVIAKSLLIKSNEGSYGFGLEDKNKVPIIKLVEKGSNAEMAGMEVGKKIFAINGDLVFMRPFNEVDCFLKSCLNSRKPLRVLVSTKPRETVKIPDSADGLGFQIRGFGPSVVHAVGRGTVAAAAGLHPGQCIIKVNGINVSKETHASVIAHVTACRKYRRPTKQDSIQWVYNSIESAQEDLQKSHSKPPGDEAGDAFDCKVEEVIDKFNTMAIIDGKKEHVSLTVDNVHLEYGVVYEYDSTAGIKCNVVEKMIEPKGFFSLTAKILEALAKSDEHFVQNCTSLNSLNEVIPTDLQSKFSALCSERIEHLCQRISSYKKVQASERFYNFTARHAVWEHSFDLHSVSSTFPVPVTMEFLLLPPPLLGISQDGRQHCIPEDLPSQEMLLAERAPV

SEQ ID NO: 6304 - protein, 1038 aa, Homo sapiens
MEGSNMKHRLMKHDLKVVENVIAKSLLIKSNEGSYGFGLEDKNKVPIIKLVEKGSNAEMAGMEVGKKIFAINGDLVFMRPFNEVDCFLKSCLNSRKPLRVLVSTKPRETVKIPDSADGLGFQIRGFGPSVVHAVGRGTVAAAAGLHPGQCIIKVNGINVSKETHASVIAHVTACRKYRRPTKQDSIQWVYNSIESAQEDLQKSHSKPPGDEAGDAFDCKVEEVIDKFNTMAIIDGKKEHVSLTVDNVHLEYGVVYEYDSTAGIKCNVVEKMIEPKGFFSLTAKILEALAKSDEHFVQNCTSLNSLNEVIPTDLQSKFSALCSERIEHLCQRISSYKKFSRVLKNRAWPTFKQAKSKISPLHSSDFCPTNCHVNVMEVSYPKTSTSLGSAFGVQLDSRKHNSHDKENKSSEQGKLSPMVYIQHTITTMAAPSGLSLGQQDGHGLRYLLKEEDLETQDIYQKLLGKLQTALKEVEMCVCQIDDLLSSITYSPKLERKTSEGIIPTDSDNEKGERNSKRVCFNVAGDEQEDSGHDTISNRDSYSDCNSNRNSIASFTSICSSQCSSYFHSDEMDSGDELPLSVRISHDKQDKIHSCLEHLFSQVDSITNLLKGQAVVRAFDQTKYLTPGRGLQEFQQEMEPKLSCPKRLRLHIKQDPWNLPSSVRTLAQNIRKFVEEVKCRLLLALLEYSDSETQLRRDMVFCQTLVATVCAFSEQLMAALNQMFDNSKENEMETWEASRRWLDQIANAGVLFHFQSLLSPNLTDEQAMLEDTLVALFDLEKVSFYFKPSEEEPLVANVPLTYQAEGSRQALKVYFYIDSYHFEQLPQRLKNGGGFKIHPVLFAQALESMEGYYYRDNVSVEEFQAQINAASLEKVKQYNQKLRAFYLDKSNSPPNSTSKAAYVDKLMRPLNALDELYRLVASFIRSKRTAACANTACSASGVGLLSVSSELCNRLGACHIIMCSSGVHRCTLSVTLEQAIILARSHGLPPRYIMQATDVMRKQGARVQNTAKNLGVRDRTPQSAPRLYKLCEPPPPAGEE

SEQ ID NO: 6305 - protein, 527 aa, Homo sapiens
MSLQMVTVSNNIALIQPGFSLMNFDGQVFFFGQKGWPKRSCPTGVFHLDVKHNHVKLKPTIFSKDSCYLPPLRYPATCTFKGSLESEKHQYIIHGGKTPNNEVSDKIYVMSIVCKNNKKVTFRCTEKDLVGDVPEARYGHSINVVYSRGKSMGVLFGGRSYMPSTHRTTEKWNSVADCLPCVFLVDFEFGCATSYILPELQDGLSFHVSIAKNDTIYILGGHSLANNIRPANLYRIRVDLPLGSPAVNCTVLPGGISVSSAILTQTNNDEFVIVGGYQLENQKRMICNIISLEDNKIEIREMETPDWTPDIKHSKIWFGSNMGNGTVFLGIPGDNKQVVSEGFYFYMLKCAEDDTNEEQTTFTNSQTSTEDPGDSTPFEDSEEFCFSAEANSFDGDDEFDTYNEDDEEDESETGYWITCCPTCDVDINTWVPFYSTELNKPAMIYCSHGDGHWVHAQCMDLAERTLIHLSAGSNKYYCNEHVEIARALHTPQRVLPLKKPPMKSLRKKGSGKILTPAKKSFLRRLFD

SEQ ID NO: 6306 - protein, 71 aa, Homo sapiens
MKIVHVNVMGVGGWGAVFLDMWHVTQESKRPIISKMPAWIFPCHPLDEQTYHMALNAATFPKNATWIGPLW

SEQ ID NO: 6307 - protein, 79 aa, Homo sapiens [sequence omitted]

SEQ ID NO: 6308 - protein, 391 aa, Homo sapiens
AAGAPRLLGPGAVRGPAGVGRVAAGAMEGVLYKWTNYLSGWQPRWFLLCGGILSYYDSPEDAWKGCKGSIQMAVCEIQVHSVDNTRMDLIIPGEQYFYLKARSVAERQRWLVALGSAKACLTDSRTQKEKEFAENTENLKTKMSELRLYCDLLVQQVDKTKEVTTTGVSNSEEGIDVGTLLKSTCNTFLKTLEECMQIANAAFTSELLYRTPPGSPQLAMLKSSKMKHPIIPIHNSLERQMELSTCENGSLNMEINGEEEILMKNKNSLYLKSAEIDCSISSEENTDDNITVQGEIRKEDGMENLKNHDNNLTQSGSDSSCSPECLWEEGKEVIPTFFSTMNTSFSDIELLEDSGIPTEAFLASCYAVVPVLDKLGPTVFAPVKDGSCWKY

SEQ ID NO: 6309 - protein, 440 aa, Homo sapiens
MEGVLYKWTNYLSGWQPRWFLLCGGILSYYDSPEDAWKGCKGSIQMAVCEIQVHSVDNTRMDLIIPGEQYFYLKARSVAERQRWLVALGSAKACLTDSRTQKEKEFAENTENLKTKMSELRLYCDLLVQQVDKTKEVTTTGVSNSEEGIDVGTLLKSTCNTFLKTLEECMQIANAAFTSELLYRTPPGSPQLAMLKSSKMKHPIIPIHNSLERQMELSTCENGSLNMEINGEEEILMKNKNSLYLKSAEIDCSISSEENTDDNITVQGEIRKEDGMENLKNHDNNLTQSGSDSSCSPECLWEEGKEVIPTFFSTMNTSFSDIELLEDSGIPTEAFLASCYAVVPVLDKLGPTVFAPVKMDLVGNIKKVNQKYITNKEEFTTLQKIVLHEVEADVAQVRNSATEALLWLKRGLKFLKGFLTEVKNGEKDIQTALRNPTENT

SEQ ID NO: 6310 - protein, 507 aa, Homo sapiens
MEGVLYKWTNYLSGWQPRWFLLCGGILSYYDSPEDAWKGCKGSIQMAVCEIQVHSVDNTRMDLIIPGEQYFYLKARSVAERQRWLVALGSAKACLTDSRTQKEKEFAENTENLKTKMSELRLYCDLLVQQVDKTKEVTTTGVSNSEEGIDVGTLLKSTCNTFLKTLEECMQIANAAFTSELLYRTPPGSPQLAMLKSSKMKHPIIPIHNSLERQMELSTCENGSLNMEINGEEEILMKNKNSLYLKSAEIDCSISSEENTDDNITVQGEIRKEDGMENLKNHDNNLSQSGSDSSCSPECLWEEGKEVIPTFFSTMNTSFSDIELLEDSGIPTEAFLASCCAVVPVLDKLGPTVFAPVKMDLVENIKKVNQKYITNKEEFTTLQKIVLHEVEADVAQVRNSATEALLWLKRGLKFLKGFLTEVKNGEKDIQTALNNAYGKTLRQHHGWVVRGVFALALRATPSYEDFVAALTVKEGDHRKEAFSIGMQRDLSLYLPAMKKQMAILDAL

SEQ ID NO: 6311 - protein, 767 aa, Homo sapiens
VDQIRAIMDKKANIRNMSVIAHVDHGKSTLTDSLVCKAGIIASARAGETRFTDTRKDEQERCITIKSTAISLFYELSENDLNFIKQSKDGAGFLINLIDSPGHVDFSSEVTAALRVTDGALVVVDCVSGVCVQTETVLRQAIAERIKPVLMMNKMDRALLELQLEPEELYQTFQRIVENVNVIISTYGEGESGPMGNIMIDPVLGTVGFGSGLHGWAFTLKQFAEMYVAKFAAKGEGQCLMHRSLPPQAVMRRWLPAGDALLQMITIHLPSPVTAQKYRCELLYEGPPDDEAAMGIKSCDPKGPLMMYISKMVPTSDKGRFYAFGRVFSGLVSTGLKVRIMGPNYTPGKKEDLYLKPIQRTILMMGRYVEPIEDVPCGNIVGLVGVDQFLVKTGTITTFEHAHNMRVMKFSVSPVVRVAVEAKNPADLPKLVEGLKRLAKSDPMVQCIIEESGEHIIAGAGELHLEICLKDLEEDHACIPIKKSDPVVSYRETVSEESNVLCLSKSPNKHNRLYMKARPFPDGLAEDIDKGEVSARQELKQRARYLAEKYEWDVAEARKIWCFGPDGTGPNILTDITKGVQYLNEIKDSVVAGFQWATKEGALCEENMRGVRFDVHDVTLHADAIHRGGGQIIPTARRCLYASVLTAQPRLMEPIYLVEIQCPEQVVGGIYGVLNRKRGHVFEESQVAGTPMFVVKAYLPVNESFGFTADLRSNTGGQAFPQCVFDHWQILPGDPFDNSSRPSQVVAETRKRKGLKEGIPALDNFLD

SEQ ID NO: 6312 - protein, 882 aa, Homo sapiens
SSPPSSARLASFGSTWENPPPSATMVNFTVDQIRAIMDKKANIRNMSVIAHVDHGKSTLTDSLVCKAGIIASARAGETRFTDTRKDEQERCITIKSTAISLFYELSENDLNFIKQSKDGAGFLINLIDSPGHVDFSSEVTAALRVTDGALVVVDCVSGVCVQTETVLRQAIAERIKPVLMMNKMDRALLELQLEPEELYQTFQRIVENVNVIISTYGEGESGPMGNIMIDPVLGTVGFGSGLHGWAFTLKQFAEMYVAKFAAKGEGQLGPAERAKKVEDMMKKLWGDRYFDPANGKFSKSATSPEGKKLPRTFCQLILDPIFKVFDAIMNFKKEETAKLIEKLDIKLDSEDKDKEGKPLLKAVMRRWLPAGDALLQMITIHLPSPVTAQKYRCELLYEGPPDDEAAMGIKSCDPKGPLMMYISKMVPTSDKGRFYAFGRVFSGLVSTGLKVRIMGPNYTPGKKEDLYLKPIQRTILMMGRYVEPIEDVPCGNIVGLVGVDQFLVKTGTITTFEHAHNMRVMKFSVSPVVRVAVEAKNPADLPKLVEGLKRLAKSDPMVQCIIEESGEHIIAGAGELHLEICLKDLEEDHACIPIKKSDPVVSYRETVSEESNVLCLSKSPNKHNRLYMKARPFPDGLAEDIDKGEVSARQELKQRARYLAEKYEWDVAEARKIWCFGPDGTGPNILTDITKGVQYLNEIKDSVVAGFQWATKEGALCEENMRGVRFDVHDVTLHADAIHRGGGQIIPTARRCLYASVLTAQPRLMEPIYLVEIQCPEQVVGGIYGVLNRKRGHVFEESQVAGTPMFVVKAYLPVNESFGFTADLRSNTGGQAFPQCVFDHWQILPGDPFDNSSRPSQVVAETRKRKGLKEGIPALDNFLDKL

SEQ ID NO: 6313 - protein, 870 aa, Homo sapiens
MASASSSRAGVALPFEKSQLTLKVVSAKPKVHNRQPRINSYVEVAVDGLPSETKKTGKRIGSSELLWNEIIILNVTAQSHLDLKVWSCHTLRNELLGTASVNLSNVLKNNGGKMENMQLTLNLQTENKGSVVSGGELTIFLDGPTVDLGNVPNGSALTDGSQLPSRDSSGTAVAPENRHQPPSTNCFGGRSRTHRHSGASARTTPATGEQSPGARSRHRQPVKNSGHSGLANGTVNDEPTTATDPEEPSVVGVTSPPAAPLSVTPNPNTTSLPAPATPAEGEEPSTSGTQQLPAAAQAPDALPAGWEQRELPNGRVYYVDHNTKTTTWERPLPPGWEKRTDPRGRFYYVDHNTRTTTWQRPTAEYVRNYEQWQSQRNQLQGAMQHFSQRFLYQSSSASTDHDPLGPLPPGWEKRQDNGRVYYVNHNTRTTQWEDPRTQGMIQEPALPPGWEMKYTSEGVRYFVDHNTRTTTFKDPRPGFESGTKQGSPGAYDRSFRWKYHQFRFLCHSNALPSHVKISVSRQTLFEDSFQQIMNMKPYDLRRRLYIIMRGEEGLDYGGIAREWFFLLSHEVLNPMYCLFEYAGKNNYCLQINPASSINPDHLTYFRFIGRFIAMALYHGKFIDTGFTLPFYKRMLNKRPTLKDLESIDPEFYNSIVWIKENNLEECGLELYFIQDMEILGKVTTHELKEGGESIRVTEENKEEYIMLLTDWRFTRGVEEQTKAFLDGFNEVAPLEWLRYFDEKELELMLCGMQEIDMSDWQKSTIYRHYTKNSKQIQWFWQVVKEMDNEKRIRLLQFVTGTCRLPVGGFAELIGSNGPQKFCIDKVGKETWLPRSHTCFNRLDLPPYKSYEQLREKLLYAIEETEGFGQE

SEQ ID NO: 6314 - protein, 593 aa, Homo sapiens
MAPPVAERGLKSVVWQKIKATVFDDCKKEGEWKIMLLDEFTTKLLASCCKMTDLLEEGITVVENIYKNREPVRQMKALYFITPTSKSVDCFLHDFASKSENKYKAAYIYFTDFCPDNLFNKIKASCSKSIRRCKEINISFIPHESQVYTLDVPDAFYYCYSPDPGNAKGKDAIMETMADQIVTVCATLDENPGVRYKSKPLDNASKLAQLVEKKLEDYYKIDEKSLIKGKTHSQLLIIDRGFDPVSTVLHELTFQAMAYDLLPIENDTYKQYKTDGKEKEAILEEEDDLWVRIRHRHIAVVLEEIPKLMKEISSTKKATEGKTSLSALTQLMKKMPHFRKQITKQVVHLNLAEDCMNKFKLNIEKLCKTEQDLALGTDAEGQKVKDSMRVLLPVLLNKNHDNCDKIRAILLYIFSINGTTEENLDRLIQNVKIENESDMIRNWSYLGVPIVPQSQQGKPLRKDRSAEETFQLSRWTPFIKDIMEDAIDNRLDSKEWPYCSQCPAVWNGSGAVSARQKPRANYLEDRKNGSKLIVFVIGGITYSEVRCAYEVSQAHKSCEVIIGSTHVLTPKKLLDDIKMLNKPKDKVSLIKDE

SEQ ID NO: 6315 - protein, 1861 aa, Homo sapiens
MMDLVLEEDVTVPGTLSGCSGLVPSVPDDLDGINPNAGLGNGVLPNVSEETVSPTRARNMKDFENQITELKKENFNLKLRIYFLEERMQQEFHGPTEHIYKTNIELKVEVESLKRELQEREQLLIKASKAVESLAEAGGSEIQRVKEDARKKVQQVEDLLTKRILLLEKDVTAAQAELEKAFAGTETEKALRLRLESKLSEMKKMHEGDLAMALVLDEKDRLIEELKLSLKSKEALIQCLKEEKSQMACPDENVSSGELRGLCAAPREEKERETEAAQMEHQKERNSFEERIQALEEDLREKEREIATEKKNSLKRDKAIQGLTMALKSKEKKVEELNSEIEKLSAAFAKAREALQKAQTQEFQGSEDYETALSGKEALSAALRSQNLTKSTENHRLRRSIKKITQELSDLQQERERLEKDLEEAHREKSKGDCTIRDLRNEVEKLRNEVNEREKAMENRYKSLLSESNKKLHNQEQVIKHLTESTNQKDVLLQKFNEKDLEVIQQNCYLMAAEDLELRSEGLITEKCSSQQPPGSKTIFSKEKKQSSDYEELIQVLKKEQDIYTHLVKSLQESDSINNLQAELNKIFALRKQLEQDVLSYQNLRKTLEEQISEIRRREEESFSLYSDQTFYLSICLEENNRFQVEHFSQEELKKKVSDLIQLVKELYTDNQHLKKTIFDLSCMGFQGNGFPDRLASTEQTEIMKDLSKGGCKNGYLRHTESKISDCDGAHAPGCLEEGAFINLLAPLFNEKATLLLESRPDLLKVVRELLLGQLFLTEQEVSGEHLDGKTEKTPKQKGELVHFVQTNSFSKPHDELKLSCEAQLVKAGEVPKVGLKDASVQTVATEGDLLRFKHEATREAWEEKPINTALSAEHRPENLHGVPGWQAALLSLPGITNREAKKSRLPILIKPSRSLGNMYRLPATQEVVTQLQSQILELQGELKEFKTCNKQLHQKLILAEAVMEGRPTPDKTLLNAQPPVGAAYQDSPGEQKGIKTTSSVWRDKEMDSDQQRSYEIDSEICPPDDLASLPSCKENPEDVLSPTSVATYLSSKSQPSAKVSVMGTDQSESINTSNETEYLKQKIHDLETELEGYQNFIFQLQKHSQCSEAIITVLCGTEGAQDGLSKPKNGSDGEEMTFSSLHQVRYVKHVKILGPLAPEMIDSRVLENLKQQLEEQEYKLQKEQNLNMQLFSEIHNLQNKFRDLSPPRYDSLVQSQARELSLQRQQIKDGHGICVISRQHMNTMIKAFEELLQASDVDYCVAEGFQEQLNQCAELLEKLEKLFLNGKSVGVEMNTQNELMERIEEDNLTYQHLLPESPEPSASHALSDYETSEKSFFSRDQKQDNETEKTSVMVNSFSQDLLMEHIQEIRTLRKRLEESIKTNEKLRKQLERQGSEFVQGSTSIFASGSELHSSLTSEIHFLRKQNQALNAMLIKGSRDKQKENDKLRESLSRKTVSLEHLQREYASVKEENERLQKEGSEKERHNQQLIQEVRCSGQELSRVQEELKLRQQLLSQNDKLLQSLRVELKAYEKLDEEHRRLREASGEGWKGQDPFRDLHSLLMEIQALRLQLERSIETSSTLQSRLKEQLARGAEKAQEGALTLAVQAVSIPEVPLQPDKHDGDKYPMESDNSFDLFDSSQAVTPKSVSETPPLSGNDTDSLSCDSGSSATSTPCVSRLVTGHHLWASKNGRHVLGLIEDYEALLKQISQGQRLLAEMDIQTQEAPSSTSQELGTKGPHPAPLSKFVSSVSTAKLTLEEAYRRLKLLWRVSLPEDGQCPLHCEQIGEMKAEVTKLHKKLFEQEKKLQNTMKLLQLSKRQEKVIFDQLVVTHKILRKARGNLELRPGGAHPGTCSPSRPGS

SEQ ID NO: 6316 - protein, 1893 aa, Homo sapiens [sequence omitted]

SEQ ID NO: 6317 - protein, 1893 aa, Homo sapiens
MMDLVLEEDVTVPGTLSGCSGLVPSVPDDLDGINPNAGLGNGVLPNVSEETVSPTRARNMKDFENQITELKKENFNLKLRIYFLEERMQQEFHGPTEHIYKTNIELKVEVESLKRELQEREQLLIKASKAVESLAEAGGSEIQRVKEDARKKVQQVEDLLTKRILLLEKDVTAAQAELEKAFAGTETEKALRLRLESKLSEMKKMHEGDLAMALVLDEKDRLIEELKLSLKSKEALIQCLKEEKSQMACPDENVSSGELRGLCAAPREEKERETEAAQMEHQKERNSFEERIQALEEDLREKEREIATEKKNSLKRDKAIQGLTMALKSKEKKVEELNSEIEKLSAAFAKAREALQKAQTQEFQGSEDYETALSGKEALSAALRSQNLTKSTENHRLRRSIKKITQELSDLQQERERLEKDLEEAHREKSKGDCTIRDLRNEVEKLRNEVNEREKAMENRYKSLLSESNKKLHNQEQVIKHLTESTNQKDVLLQKFNEKDLEVIQQNCYLMAAEDLELRSEGLITEKCSSQQPPGSKTIFSKEKKQSSDYEELIQVLKKEQDIYTHLVKSLQESDSINNLQAELNKIFALRKQLEQDVLSYQNLRKTLEEQISEIRRREEESFSLYSDQTFYLSICLEENNRFQVEHFSQEELKKKVSDLIQLVKELYTDNQHLKKTIFDLSCMGFQGNGFPDRLASTEQTELLASKEDEDTIKIGEDDEINFLSDQHLQQSNEIMKDLSKGGCKNGYLRHTESKISDCDGAHAPGCLEEGAFINLLAPLFNEKATLLLESRPDLLKVVRELLLGQLFLTEQEVSGEHLDGKTEKTPKQKGELVHFVQTNSFSKPHDELKLSCEAQLVKAGEVPKVGLKDASVQTVATEGDLLRFKHEATREAWEEKPINTALSAEHRPENLHGVPGWQAALLSLPGITNREAKKSRLPILIKPSRSLGNMYRLPATQEVVTQLQSQILELQGELKEFKTCNKQLHQKLILAEAVMEGRPTPDKTLLNAQPPVGAAYQDSPGEQKGIKTTSSVWRDKEMDSDQQRSYEIDSEICPPDDLASLPSCKENPEDVLSPTSVATYLSSKSQPSAKVSVMGTDQSESINTSNETEYLKQKIHDLETELEGYQNFIFQLQKHSQCSEAIITVLCGTEGAQDGLSKPKNGSDGEEMTFSSLHQVRYVKHVKILGPLAPEMIDSRVLENLKQQLEEQEYKLQKEQNLNMQLFSEIHNLQNKFRDLSPPRYDSLVQSQARELSLQRQQIKDGHGICVISRQHMNTMIKAFEELLQASDVDYCVAEGFQEQLNQCAELLEKLEKLFLNGKSVGVEMNTQNELMERIEEDNLTYQHLLPESPEPSASHALSDYETSEKSFFSRDQKQDNETEKTSVMVNSFSQDLLMEHIQEIRTLRKRLEESIKTNEKLRKQLERQGSEFVQGSTSIFASGSELHSSLTSEIHFLRKQNQALNAMLIKGSRDKQKENDKLRESLSRKTVSLEHLQREYASVKEENERLQKEGSEKERHNQQLIQEVRCSGQELSRVQEELKLRQQLLSQNDKLLQSLRVELKAYEKLDEEHRRLREASGEGWKGQDPFRDLHSLLMEIQALRLQLERSIETSSTLQSRLKEQLARGAEKAQEGALTLAVQAVSIPEVPLQPDKHDGDKYPMESDNSFDLFDSSQAVTPKSVSETPPLSGNDTDSLSCDSGSSATSTPCVSRLVTGHHLWASKNGRHVLGLIEDYEALLKQISQGQRLLAEMDIQTQEAPSSTSQELGTKGPHPAPLSKFVSSVSTAKLTLEEAYRRLKLLWRVSLPEDGQCPLHCEQIGEMKAEVTKLHKKLFEQEKKLQNTMKLLQLSKRQEKVIFDQLVVTHKILRKARGNLELRPGGAHPGTCSPSRPGS

SEQ ID NO: 6318 - protein, 1852 aa, Homo sapiens
MMDLVLEEDVTVPGTLSGCSGLVPSVPDDLDGINPNAGLGNGVLPNVSEETVSPTRARNMKDFENQITELKKENFNLKLRIYFLEERMQQEFHGPTEHIYKTNIELKVEVESLKRELQEREQLLIKASKAVESLAEAGGSEIQRVKEDARKKVQQVEDLLTKRILLLEKDVTAAQAELEKAFAGTETEKALRLRLESKLSEMKKMHEGDLAMALVLDEKDRLIEELKLSLKSKEALIQCLKEEKSQMACPDENVSSGELRGLCAAPREEKERETEAAQMEHQKERNSFEERIQALEEDLREKEREIATEKKNSLKRDKAIQGLTMALKSKEKKVEELNSEIEKLSAAFAKAREALQKAQTQEFQGSEDYETALSGKEALSAALRSQNLTKSTENHRLRRSIKKITQELSDLQQERERLEKDLEEAHREKSKGDCTIRDLRNEVEKLRNEVNEREKAMENRYKSLLSESNKKLHNQEQVIKHLTESTNQKDVLLQKFNEKDLEVIQQNCYLMAAEDLELRSEGLITEKCSSQQPPGSKTIFSKEKKQSSDYEELIQVLKKEQDIYTHLVKSLQESDSINNLQAELNKIFALRKQLEQDVLSYQNLRKTLEEQISEIRRREEESFSLYSDQTFYLSICLEENNRFQVEHFSQEELKKKVSDLIQLVKELYTDNQHLKKTIFDLSCMGFQGNGFPDRLASTEQTELLASKEDEDTIKIGEDDEINFLSDQHLQQSNEIMKDLSKGGCKNGYLRHTESKISDCDGAHAPGCLEEGAFINLLAPLFNEKATLLLESRPDLLKVVRELLLGQLFLTEQEVSGEHLDGKTEKTPKQKGELVHFVQTNSFSKPHDELKLSCEAQLVKAGEVPKVGLKDASVQTVATEGDLLRFKHEATREAWEEKPINTALSAEHRPENLHGVPGWQAALLSLPGITNREAKKSRLPILIKPSRSLGNMYRLPATQEVVTQLQSQILELQGELKEFKTCNKQLHQKLILAEAVMEGRPTPDKTLLNDSEICPPDDLASLPSCKENPEDVLSPTSVATYLSSKSQPSAKVSVMGTDQSESINTSNETEYLKQKIHDLETELEGYQNFIFQLQKHSQCSEAIITVLCGTEGAQDGLSKPKNGSDGEEMTFSSLHQVRYVKHVKILGPLAPEMIDSRVLENLKQQLEEQEYKLQKEQNLNMQLFSEIHNLQNKFRDLSPPRYDSLVQSQARELSLQRQQIKDGHGICVISRQHMNTMIKAFEELLQASDVDYCVAEGFQEQLNQCAELLEKLEKLFLNGKSVGVEMNTQNELMERIEEDNLTYQHLLPESPEPSASHALSDYETSEKSFFSRDQKQDNETEKTSVMVNSFSQDLLMEHIQEIRTLRKRLEESIKTNEKLRKQLERQGSEFVQGSTSIFASGSELHSSLTSEIHFLRKQNQALNAMLIKGSRDKQKENDKLRESLSRKTVSLEHLQREYASVKEENERLQKEGSEKERHNQQLIQEVRCSGQELSRVQEELKLRQQLLSQNDKLLQSLRVELKAYEKLDEEHRRLREASGEGWKGQDPFRDLHSLLMEIQALRLQLERSIETSSTLQSRLKEQLARGAEKAQEGALTLAVQAVSIPEVPLQPDKHDGDKYPMESDNSFDLFDSSQAVTPKSVSETPPLSGNDTDSLSCDSGSSATSTPCVSRLVTGHHLWASKNGRHVLGLIEDYEALLKQISQGQRLLAEMDIQTQEAPSSTSQELGTKGPHPAPLSKFVSSVSTAKLTLEEAYRRLKLLWRVSLPEDGQCPLHCEQIGEMKAEVTKLHKKLFEQEKKLQNTMKLLQLSKRQEKVIFDQLVVTHKILRKARGNLELRPGGAHPGTCSPSRPGS

SEQ ID NO: 6319 - protein, 1814 aa, Homo sapiens
MMDLVLEEDVTVPGTLSGCSGLVPSVPDDLDGINPNAGLGNGVLPNVSEETVSPTRARNMKDFENQITELKKENFNLKLRIYFLEERMQQEFHGPTEHIYKTNIELKVEVESLKRELQEREQLLIKASKAVESLAEAGGSEIQRVKEDARKKVQQVEDLLTKRILLLEKDVTAAQAELEKAFAGTETEKALRLRLESKLSEMKKMHEGDLAMALVLDEKDRLIEELKLSLKSKEALIQCLKEEKSQMACPDENVSSGELRGLCAAPREEKERETEAAQMEHQKERNSFEERIQALEEDLREKEREIATEKKNSLKRDKAIQGLTMALKSKEKKVEELNSEIEKLSAAFAKAREALQKAQTQEFQGSEDYETALSGKEALSAALRSQNLTKSTENHRLRRSIKKITQELSDLQQERERLEKDLEEAHREKSKGDCTIRDLRNEVEKLRNEVNEREKAMENRYKSLLSESNKKLHNQEQVIKHLTESTNQKDVLLQKFNEKDLEVIQQNCYLMAAEDLELRSEGLITEKCSSQQPPGSKTIFSKEKKQSSDYEELIQVLKKEQDIYTHLVKSLQESDSINNLQAELNKIFALRKQLEQDVLSYQNLRKTLEEQISEIRRREEESFSLYSDQTFYLSICLEENNRFQVEHFSQEELKKKVSDLIQLVKELYTDNQHLKKTIFDLSCMGFQGNGFPDRLASTEQTELLASKEDEDTIKIGEDDEINFLSDQHLQQSNEIMKDLSKGGCKNGYLRHTESKISDCDGAHAPGCLEEGAFINLLAPLFNEKATLLLESRPDLLKVVRELLLGQLFLTEQEVSGEHLDGKTEKTPKQKGELVHFVQTNSFSKPHDELKLSCEAQLVKAGEVPKVGLKDASVQTVATEGDLLRFKHEATREAWEEKPINTALSAEHRPENLHGVPGWQAALLSLPGITNREAKKSRLPILIKPSRSLGNMYRLPATQEVVTQLQSQILELQGELKEFKTCNKQLHQKLILAEAVMEGRPTPDKTLLNAQPPVGAAYQDSPGEQKGIKTTSSVWRDKEMDSDQQRSYEIDSEICPPDDLASLPSCKENPEDVLSPTSVATYLSSKSQPSAKVSVMGTDQSESINTSNETEYLKQKIHDLETELEGYQNFIFQLQKHSQCSEAIITVLCGTEGAQDGLSKPKNGSDGEEMTFSSLHQVRYVKHVKILGPLAPEMIDSRVLENLKQQLEEQEYKLQKEQNLNMQLFSEIHNLQNKFRDLSPPRYDSLVQSQARELSLQRQQIKDGHGICVISRQHMNTMIKAFEELLQASDVDYCVAEGFQEQLNQCAELLEKLEKLFLNGKSVGVEMNTQNELMERIEEDNLTYQHLLPESPEPSASHALSDYETSEKSFFSRDQKQDNETEKTSVMVNSFSQDLLMEHIQEIRTLRKRLEESIKTNEKLRKQLERQGSEFVQGSTSIFASGSELHSSLTSEIHFLRKQNQALNAMLIKGSRDKQKENDKLRESLSRKTVSLEHLQREYASVKEENERLQKEGSEKERHNQQLIQEVRCSGQELSRVQEELKLRQQLLSQNDKLLQSLRVELKAYEKLDEEHRRLRDGDKYPMESDNSFDLFDSSQAVTPKSVSETPPLSGNDTDSLSCDSGSSATSTPCVSRLVTGHHLWASKNGRHVLGLIEDYEALLKQISQGQRLLAEMDIQTQEAPSSTSQELGTKGPHPAPLSKFVSSVSTAKLTLEEAYRRLKLLWRVSLPEDGQCPLHCEQIGEMKAEVTKLHKKLFEQEKKLQNTMKLLQLSKRQEKVIFDQLVVTHKILRKARGNLELRPGGAHPGTCSPSRPGS

SEQ ID NO: 6320 - protein, 792 aa, Homo sapiens
HLGDLLHKLQFVLTTRRVDNSNTRLAVQIERDPGNDDNNLNSIFYEHLTRTLQESLCGDLVLGRWGNYSSGDCFILASDDLNAFVHLIEIGNGLVTFQLRGLEFRGTYCQQREVEAIMEGDEEDRGCCCCKPGHLPHLLSCNAAFHLRWLTWEITQTQYILEGYSILDNNAATMLQVFDLRRILIRYYIKSIIYYMVTSPKLLSWIKNESLLKSLQPFAKWHYIERDLAMFNINIDDDYVPCLQGITRASFCNVYLEWIQHCARKRQEPSTTLDSDEDSPLVTLSFALCTLGRRALGTAAHNMAISLDSFLYGLHVLFKGDFRITARDEWVFADMDLLHKVVAPAIRMSLKLHQDQFTCPDEYEDPAVLYEAIQSFEKKVVICHEGDPAWRGAVLSNKEELLTLRHVVDEGADEYKVIMLHRSFLSFKVIKVNKECVRGLWAGQQQELIFLRNRNPERGSIQNNKQVLRNLINSSCDQPLGYPMYVSPLTTSYLGTHRQLKNIWGGPITLDRIRTWFWTKWVRMRKDCNARQHSGGNIEDVDGGGAPTTGGNNAPSGGSQESSAEQPRKGGAQHGVSSCEGTQRTGRRKGRSQSVQAHSALSQRPPMLSSSGPILESRQTFLQTSTSVHELAQRLSGSRLSLHASATSLHSQPPPVTTTGHLSVRERAEALIRSSLGSSTSSTLSFLFGKRSFSSALVISGLSAAEGGNTSDTQSSSSVNIVMGPSARAASQATRHLSEPCEPPDATEQGQLHDRCLAEAVADTLGVVCRRASQEDMGLDDTASQQSVSDEQ

SEQ ID NO: 6321 - protein, 777 aa, Homo sapiens
MTFYPFVASSSTRRVDNSNTRLAVQIERDPGNDDNNLNSIFYEHLTRTLQESLCGDLVLGRWGNYSSGDCFILASDDLNAFVHLIEIGNGLVTFQLRGLEFRGTYCQQREVEAIMEGDEEDRGCCCCKPGHLPHLLSCNAAFHLRWLTWEITQTQYILEGYSILDNNAATMLQVFDLRRILIRYYIKSIIYYMVTSPKLLSWIKNESLLKSLQPFAKWHYIERDLAMFNINIDDDYVPCLQGITRASFCNVYLEWIQHCARKRQEPSTTLDSDEDSPLVTLSFALCTLGRRALGTAAHNMAISLDSFLYGLHVLFKGDFRITARDEWVFADMDLLHKVVAPAIRMSLKLHQDQFTCPDEYEDPAVLYEAIQSFEKKVVICHEGDPAWRGAVLSNKEELLTLRHVVDEGADEYKVIMLHRSFLSFKVIKVNKECVRGLWAGQQQELIFLRNRNPERGSIQNNKQVLRNLINSSCDQPLGYPMYVSPLTTSYLGTHRQLKNIWGGPITLDRIRTWFWTKWVRMRKDCNARQHSGGNIEDVDGGGAPTTGGNNAPNGGSQESSAEQPRKGGAQHGVSSCEGTQRTGRRKGRSQSVQAHSALSQRPPMLSSSGPILESRQTFLQTSTSVHELAQRLSGSRLSLHASATSLHSQPPPVTTTGHLSVRERAEALIRSSLGSSTSSTLSFLFGKRSFSSALVISGLSAAEGGNTSDTQSSSSVNIVMGPSARAASQATRVRGWAGLTRTGWDGGTGSWPERGTCLAFPPFCLQNPIPFSMGLPE

SEQ ID NO: 6322 - protein, 399 aa, Homo sapiens
MYSPRGSQGRGTAEATANSPSPPIAPSHSRVTFSLSTLHTLSPPPRPFPSVSRAAAQKPHHLHPHILLAGSAAVPPRVLKAEMNNTAASPMSTATSSSGRSTGKSISFATELQSMMYSLGDARRPLHETAVLVEDVVHTQLINLLQQAAEVSQLRGARVITPEDLLFLMRKDKKKLRRLLKYMFIRDYKSKIVKGIDEDDLLEDKLSGSNNANKRQKIAQDFLNSIDQTGELLAMFEDDEIDEVKQERMERAERQTRIMDSAQYAEFCESRQLSFSKKASKFRDWLDCSSMEIKPNVVAMEILAYLAYETVAQLVDLALLVRQDMVTKAGDPFSHAISATFIQYHNSAESTAACGVEAHSDAIQPCHIREAIRRYSHRIGPLSPFTNAYRRNGMAFLAC

SEQ ID NO: 6323 - protein, 317 aa, Homo sapiens
MNNTAASPMSTATSSSGRSTGKSISFATELQSMMYSLGDARRPLHETAVLVEDVVHTQLINLLQQAAEVSQLRGARVITPEDLLFLMRKDKKKLRRLLKYMFIRDYKSKIVKGIDEDDLLEDKLSGSNNANKRQKIAQDFLNSIDQTGELLAMFEDDEIDEVKQERMERAERQTRIMDSAQYAEFCESRQLSFSKKASKFRDWLDCSSMEIKPNVVAMEILAYLAYETVAQLVDLALLVRQDMVTKAGDPFSHAISATFIQYHNSAESTAACGVEAHSDAIQPCHIREAIRRYSHRIGPLSPFTNAYRRNGMAFLAC

SEQ ID NO: 6324 - protein, 96 aa, Homo sapiens
SCTPPIAPSHSRVTFSLSTLHTLSPPPRPFPSVSRAAQKPHHLHPHILLAGSAAVPPRVLKAEMNNTAASPMSTATSSSGRSTGKSISFATELQSM

SEQ ID NO: 6325 - protein, 531 aa, Homo sapiens
MDSVAFEDVAVNFTQEEWALLDPSQKNLYREVMQETLRNLTSIGKKWNNQYIEDEHQNPRRNLRRLIGERLSESKESHQHGEVLTQVPDDTLKKKTPGVQSYESSVCGEIGIGLSSLNRHLRAFSYSSSLAIHGRTHTGEKPYECKECGKAFRFPSSVRRHERIHSAKKPYECKQCGKAFSFPSSVRRHERIHSAKKPYECKQCGKALSYLVSFQTHMRMHTGERPHKCNICGKAFFSPSSLKRHEKSHTGEKRYKCKQCDKAFNCPSSFQYHERTHSGEKPYECTQCRKAFRSVKYLRVHERKHTGEKPYECKLCGKGFISSTSFRYHEKTHTGEKPYECKKCVKAFSFVKDLRIHERTHTGEKPFECKQCGKTFTSSNSFHYHERTHTGEKPYECKQCGKAFRSASVLQKHIRTHTGEKPYGCKQCGKVFRVASQLKMHERTHTGEKPYECKQCGKAFISSNSIRYHKRTHTGEKPYKCKQCGKAFISSNSFLYHERIHTGEKPYECKQCGKAFRSASILQKHVRTHAG

SEQ ID NO: 6326 - protein, 123 aa, Homo sapiens
MALNNVSLSSGDQRSRVAYRSSHGDLRPRASALAMVSGDGFLVSRPEAIHLGPRQAVRPSVRAESRRVDGGGRSPREPDGRGRSRQARFSPYPIPAVEPDLLRSVLQQRLIALGGVIAARISV

SEQ ID NO: 6327 - protein, 126 aa, Homo sapiens
MAEAGAGLSETVTETTVTVTTEPENRSLTIKLRKRKPEKKVEWTSDTVDNEHMGRRSSKCCCIYEKPRAFGESSTESDEEEEEGCGHTHCVRGHRKGRRRATLGPTPTTPPQPPDPSQPPPGPMQH

SEQ ID NO: 6328 - protein, 916 aa, Homo sapiens
MTAGAGVLLLLLSLSGALRAHNEDLTTRETCKAGFSEDDYTALISQNILEGEKLLQVKFSSCVGTKGTQYETNSMDFKVGADGTVFATRELQVPSEQVAFTVTAWDSQTAEKWDAVVRLLVAQTSSPHSGHKPQKGKKVVALDPSPPPKDTLLPWPQHQNANGLRRRKRDWVIPPINVPENSRGPFPQQLVRIRSDKDNDIPIRYSITGVGADQPPMEVFSIDSMSGRMYVTRPMDREEHASYHLRAHAVDMNGNKVENPIDLYIYVIDMNDNRPEFINQVYNGSVDEGSKPGTYVMTVTANDADDSTTANGMVRYRIVTQTPQSPSQNMFTINSETGDIVTVAAGLDREKVQQYTVIVQATDMEGNLNYGLSNTATAIITVTDVNDNPPEFTASTFAGEVPENRVETVVANLTVMDRDQPHSPNWNAVYRIISGDPSGHFSVRTDPVTNEGMVTVVKAVDYELNRAFMLTVMVSNQAPLASGIQMSFQSTAGVTISIMDINEAPYFPSNHKLIRLEEGVPPGTVLTTFSAVDPDRFMQQAVRYSKLSDPASWLHINATNGQITTAAVLDRESLYTKNNVYEATFLAADNGIPPASGTGTLQIYLIDINDNAPELLPKEAQICEKPNLNAINITAADADVDPNIGPYVFELPFVPAAVRKNWTITRLNGDYAQLSLRILYLEAGMYDVPIIVTDSGNPPLSNTSIIKVKVCPCDDNGDCTTIGAVAAAGLGTGAIVAILICILILLTMVLLFVMWMKRREKERHTKQLLIDPEDDVRDNILKYDEEGGGEEDQDYDLSQLQQPEAMGHVPSKAPGVRRVDERPVGAEPQYPIRPMVPHPGDIGDFINEGLRAADNDPTAPPYDSLLVFDYEGSGSTAGSVSSLNSSSSGDQDYDYLNDWGPRFKKLADMYGGGEED

SEQ ID NO: 6329 - protein, 354 aa, Homo sapiens
MGKLVALVLLGVGLSLVGEMFLAFRERVNASREVEPVEPENCHLIEELESGSEDIDILPSGLAFISSGLKYPGMPNFAPDEPGKIFLMDLNEQNPRAQALEISGGFDKELFNPHGISIFIDKDNTVYLYVVNHPHMKSTVEIFKFEEQQRSLVYLKTIKHELLKSVNDIVVLGPEQFYATRDHYFTNSLLSFFEMILDLRWTYVLFYSPREVKVVAKGFCSANGITVSADQKYVYVADVAAKNIHIMEKHDNWDLTQLKVIQLGTLVDNLTVDPATGDILAGCHPNPMKLLNYNPEDPPGSEVLRIQNVLSEKPRVSTVYANNGSVLQGTSVASVYHGKILIGTVFHKTLYCEL

SEQ ID NO: 6330 - protein, 354 aa, Homo sapiens
  VARIANT 347: Xaa = Any Amino Acid
MGKLVALVLLGVGLSLVGEMFLAFRERVNASREVEPVEPENCHLIEELESGSEDIDILPSGLAFISSGLKYPGMPNFAPDEPGKIFLMDLNEQNPRAQALEISGGFDKELFNPHGISIFIDKDNTVYLYVVNHPHMKSTVEIFKFEEQQRSLVYLKTIKHELLKSVNDIVVLGPEQFYATRDHYFTNSLLSFFEMILDLRWTYVLFYSPREVKVVAKGFCSANGITVSADQKYVYVADVAAKNIHIMEKHDNWDLTQLKVIQLGTLVDNLTVDPATGDILAGCHPNPMKLLNYNPEDPPGSEVLRIQNVLSEKPRVSTVYANNGSVLQGTSVASVYHGKILIGTVFXKTLYCEL

SEQ ID NO: 6331 - protein, 468 aa, Homo sapiens
MLAVGCALLAALLAAPGAALAPRRCPAQEVARGVLTSLPGDSVTLTCPGVEPEDNATVHWVLRKPAAGSHPSRWAGMGRRLLLRSVQLHDSGNYSCYRAGRPAGTVHLLVDVPPEEPQLSCFRKSPLSNVVCEWGPRSTPSLTTKAVLLVRKFQNSPAEDFQEPCQYSQESQKFSCQLAVPEGDSSFYIVSMCVASSVGSKFSKTQTFQGCGILQPDPPANITVTAVARNPRWLSVTWQDPHSWNSSFYRLRFELRYRAERSKTFTTWMVKDLQHHCVIHDAWSGLRHVVQLRAQEEFGQGEWSEWSPEAMGTPWTESRSPPAENEVSTPMQALTTNKDDDNILFRDSANATSLPVQDSSSVPLPTFLVAGGSLAFGTLLCIAIVLRFKKTWKLRALKEGKTSMHPPYSLGQLVPERPRPTPVLVPLISPPVSPSSLGSDNTSSHNRPDARDPRSPYDISNTDYFFPR

SEQ ID NO: 6332 - protein, 365 aa, Homo sapiens [sequence omitted]

SEQ ID NO: 6333 - protein, 514 aa, Homo sapiens
MAVWLAQWLGPLLLVSLWGLLAPASLLRRLGEHIQQFQESSAQGLGLSLGPGAAALPKVGWLEQLLDPFNVSDRRSFLQRYWVNDQHWVGQDGPIFLHLGGEGSLGPGSVMRGHPAALAPAWGALVISLEHRFYGLSIPAGGLEMAQLRFLSSRLALADVVSARLALSRLFNISSSSPWICFGGSYAGSLAAWARLKFPHLIFASVASSAPVRAVLDFSEYNDVVSRSLMSTAIGGSLECRAAVSVAFAEVERRLRSGGAAQAALRTELSACGPLGRAENQAELLGALQALVGGVVQYDGQTGAPLSVRQLCGLLLGGGGNRSHSTPYCGLRRAVQIVLHSLGQKCLSFSRAETVAQLRSTEPQLSGVGDRQWLYQTCTEFGFYVTCENPRCPFSQLPALPSQLDLCEQVFGLSALSVAQAVAQTNSYYGGQTPGANKVLFVNGDTDPWHVLSVTQALGSSESTLLIRTGSHCLDMAPERPSDSPSLRLGRQNIFQQLQTWLKLAKESQIKGEV

SEQ ID NO: 6334 - protein, 267 aa, Homo sapiens
MPRSCCSRSGALLLALLLQASMEVRGWCLESSQCQDLTTESNLLECIRACKPDLSAETPMFPGNGDEQPLTENPRKYVMGHFRWDRFGRRNSSSSGSSGAGQKREDVSAGEDCGPLPEGGPEPRSDGAKPGPREGKRSYSMEHFRWGKPVGKKRRPVKVYPNGAEDESAEAFPLEFKRELTGQRLREGDGPDGPADDGAGAQADLEHSLLVAAEKKDEGPYRMEHFRWGSPPKDKRYGGFMTSEKSQTPLVTLFKNAIIKNAYKKGE

SEQ ID NO: 6335 - protein, 224 aa, Homo sapiens
MRVSGVLRLLALIFAIVTTWMFIRSYMSFSMKTIRLPRWLAASPTKEIQVKKYKCGLIKPCPANYFAFKICSGAANVVGPTMCFEDRMIMSPVKNNVGRGLNIALVNGTTGAVLGQKAFDMYSGDVMHLVKFLKEIPGGALVLVASYDDPGTKMNDESRKLFSDLGSSYAKQLGFRDSWVFIGAKDLRGKSPFEQFLKNSPDTNKYEGWPELLEMEGCMPPKPF

SEQ ID NO: 6336 - protein, 323 aa, Homo sapiens
SAFQNGGGGGIWCAWPGGLEAPAAAMPARGRCRQALVPRAFHASAVGLRSSDEQKQQPPNSFSQQHSETQGAEKPDPESSHSPPRYTDQGGEEEEDYESEEQLQHRILTAALEFVPAHGWTAEAIAEGAQSLGLSSGSSQHVSGRMGSELILHFVTQCNTRLTRVLEEEQKLVQLGQAEKRKTDQFLRDAVETRLRMLIPYIEHWPRALSILMLPHNIPSSLSLLTSMVDDMWHYAGDQSTDFNWYTRRAMLAAIYNTTELVMMQDSSPDFEDTWRFLENRVNDAMNMGHTAKQVKSTGEALVQGLMGAAVTLKNLTGLNQRR

SEQ ID NO: 6337 - protein, 323 aa, Homo sapiens
VPASKMAAAAVSGALGRAGWRLLQLRCLPVARCRQALVPRAFHASAVGLRSSDEQKQQPPNSFSQQHSETQGAEKPDPESSHSPPRYTDQGGEEEEDYESEEQLQHRILTAALEFVPAHGWTAEAIAEGAQSLGLSSAAASMFGKDGSELILHFVTQCNTRLTRVLEEEQKLVQLGQAEKRKTDQFLRDAVETRLRMLIPYIEHWPRALSILMLPHNIPSSLSLLTSMVDDMWHYAGDQSTDFNWYTRRAMLAAIYNTTELVMMQDSSPDFEDTWRFLENRVNDAMNMGHTAKQVKSTGEALVQGLMGAAVTLKNLTGLNQRR

SEQ ID NO: 6338 - protein, 1214 aa, Homo sapiens
PRRLPLWLAAPRRRCTPDPAAVPRAMDLPRGLVVAWALSLWPGFTDTFNMDTRKPRVIPGSRTAFFGYTVQQHDISGNKWLVVGAPLETNGYQKTGDVYKCPVIHGNCTKLNLGRVTLSNVSERKDNMRLGLSLATNPKDNSFLACSPLWSHECGSSYYTTGMCSRVNSNFRFSKTVAPALQRCQTYMDIVIVLDGSNSIYPWVEVQHFLINILKKFYIGPGQIQVGVVQYGEDVVHEFHLNDYRSVKDVVEAASHIEQRGGTETRTAFGIEFARSEAFQKGGRKGAKKVMIVITDGESHDSPDLEKVIQQSERDNVTRYAVAVLGYYNRRGINPETFLNEIKYIASDPDDKHFFNVTDEAALKDIVDALGDRIFSLEGTNKNETSFGLEMSQTGFSSHVVEDGVLLGAVGAYDWNGAVLKETSAGKVIPLRESYLKEFPEELKNHGAYLGYTVTSVVSSRQGRVYVAGAPRFNHTGKVILFTMHNNRSLTIHQAMRGQQIGSYFGSEITSVDIDGDGVTDVLLVGAPMYFNEGRERGKVYVYELRQNLFVYNGTLKDSHSYQNARFGSSIASVRDLNQDSYNDVVVGAPLEDNHAGAIYIFHGFRGSILKTPKQRITASELATGLQYFGCSIHGQLDLNEDGLIDLAVGALGNAVILWSRPVVQINASLHFEPSKINIFHRDCKRSGRDATCLAAFLCFTPIFLAPHFQTTTVGIRYNATMDERRYTPRAHLDEGGDRFTNRAVLLSSGQELCERINFHVLDTADYVKPVTFSVEYSLEDPDHGPMLDDGWPTTLRVSVPFWNGCNEDEHCVPDLVLDARSDLPTAMEYCQRVLRKPAQDCSAYTLSFDTTVFIIESTRQRVAVEATLENRGENAYSTVLNISQSANLQFASLIQKEDSDGSIECVNEERRLQKQVCNVSYPFFRAKAKVAFRLDFEFSKSIFLHHLEIELAAGSDSNERDSTKEDNVAPLRFHLKYEADVLFTRSSSLSHYEVKPNSSLERYDGIGPPFSCIFRIQNLGLFPIHGMMMKITIPIATRSGNRLLKLRDFLTDEVANTSCNIWGNSTEYRPTPVEEDLRRAPQLNHSNSDVVSINCNIRLVPNQEINFHLLGNLWLRSLKALKYKSMKIMVNAALQRQFHSPFIFREEDPSRQIVFEISKQEDWQVPIWIIVGSTLGGLLLLALLVLALWKLGFFRSARRRREPGLDPTPKVLE

SEQ ID NO: 6339 - protein, 1179 aa, Homo sapiens
MWLFHTLLCIASLALLAAFNVDVARPWLTPKGGAPFVLSSLLHQDPSTNQTWLLVTSPRTKRTPGPLHRCSLVQDEILCHPVEHVPIPKGRHRGVTVVRSHHGVLICIQVLVRRPHSLSSELTGTCSLLGPDLRPQAQANFFDLENLLDPDARVDTGDCYSNKEGGGEDDVNTARQRRALEKEEEEDKEEEEDEEEEEAGTEIAIILDGSGSIDPPDFQRAKDFISNMMRNFYEKCFECNFALVQYGGVIQTEFDLRDSQDVMASLARVQNITQVGSVTKTASAMQHVLDSIFTSSHGSRRKASKVMVVLTDGGIFEDPLNLTTVINSPKMQGVERFAIGVGEEFKSARTARELNLIASDPDETHAFKVTNYMALDGLLSKLRYNIISMEGTVGDALHYQLAQIGFSAQILDERQVLLGAVGAFDWSGGALLYDTRSRRGRFLNQTAAAAADAEAAQYSYLGYAVAVLHKTCSLSYVAGAPQYKHHGAVFELQKEGREASFLPVLEGEQMGSYFGSELCPVDIDMDGSTDFLLVAAPFYHVHGEEGRVYVYRLSEQDGSFSLARILSGHPGFTNARFGFAMAAMGDLSQDKLTDVAIGAPLEGFGADDGASFGSVYIYNGHWDGLSASPSQRIRASTVAPGLQYFGMSMAGGFDISGDGLADITVGTLGQAVVFRSRPVVRLKVSMAFTPSALPIGFNGVVNVRLCFEISSVTTASESGLREALLNFTLDVDVGKQRRRLQCSDVRSCLGCLREWSSGSQLCEDLLLMPTEGELCEEDCFSNASVKVSYQLQTPEGQTDHPQPILDRYTEPFAIFQLPYEKACKNKLFCVAELQLATTVSQQELVVGLTKELTLNINLTNSGEDSYMTSMALNYPRNLQLKRMQKPPSPNIQCDDPQPVASVLIMNCRIGHPVLKRSSAHVSVVWQLEENAFPNRTADITVTVTNSNERRSLANETHTLQFRHGFVAVLSKPSIMYVNTGQGLSHHKEFLFHVHGENLFGAEYQLQICVPTKLRGLQVAAVKKLTRTQASTVCTWSQERACAYSSVQHVEEWHSVSCVIASDKENVTVAAEISWDHSEELLKDVTELQILGEISFNKSLYEGLNAENHRTKITVVFLKDEKYHSLPIIIKGSVGGLLVLIVILVILFKCGFFKRKYQQLNLESIRKAQLKSENLLEEEN

SEQ ID NO: 6340 - protein, 1218 aa, Homo sapiens
MRSPRTRGRSGRPLSLLLALLCALRAKVCGASGQFELEILSMQNVNGELQNGNCCGGARNPGDRKCTRDECDTYFKVCLKEYQSRVTAGGPCSFGSGSTPVIGGNTFNLKASRGNDRNRIVLPFSFAWPRSYTLLVEAWDSSNDTVQPDSIIEKASHSGMINPSRQWQTLKQNTGVAHFEYQIRVTCDDYYYGFGCNKFCRPRDDFFGHYACDQNGNKTCMEGWMGPECNRAICRQGCSPKHGSCKLPGDCRCQYGWQGLYCDKCIPHPGCVHGICNEPWQCLCETNWGGQLCDKDLNYCGTHQPCLNGGTCSNTGPDKYQCSCPEGYSGPNCEIAEHACLSDPCHNRGSCKETSLGFECECSPGWTGPTCSTNIDDCSPNNCSHGGTCQDLVNGFKCVCPPQWTGKTCQLDANECEAKPCVNAKSCKNLIASYYCDCLPGWMGQNCDININDCLGQCQNDASCRDLVNGYRCICPPGYAGDHCERDIDECASNPCLNGGHCQNEINRFQCLCPTGFSGNLCQLDIDYCEPNPCQNGAQCYNRASDYFCKCPEDYEGKNCSHLKDHCRTTPCEVIDSCTVAMASNDTPEGVRYISSNVCGPHGKCKSQSGGKFTCDCNKGFTGTYCHENINDCESNPCRNGGTCIDGVNSYKCICSDGWEGAYCETNINDCSQNPCHNGGTCRDLVNDFYCDCKNGWKGKTCHSRDSQCDEATCNNGGTCYDEGDAFKCMCPGGWEGTTCNIARNSSCLPNPCHNGGTCVVNGESFTCVCKEGWEGPICAQNTNDCSPHPCYNSGTCVDGDNWYRCECAPGFAGPDCRININECQSSPCAFGATCVDEINGYRCVCPPGHSGAKCQEVSGRPCITMGSVIPDGAKWDDDCNTCQCLNGRIACSKVWCGPRPCLLHKGHSECPSGQSCIPILDDQCFVHPCTGVGECRSSSLQPVKTKCTSDSYYQDNCANITFTFNKEMMSPGLTTEHICSELRNLNILKNVSAEYSIYIACEPSPSANNEIHVAISAEDIRDDGNPIKEITDKIIDLVSKRDGNSSLIAAVAEVRVQRRPLKNRTDFLVPLLSSVLTVAWICCLVTAFYWCLRKRRKPGSHTHSASEDNTTNNVREQLNQIKNPIEKHGANTVPIKDYENKNSKMSKIRTHNSEVEEDDMDKHQQKARFAKQPAYTLVDREEKPPNGTPTKHPNWTNKQDNRDLESAQSLNRMEYIV

SEQ ID NO: 6341 - protein, 2559 aa, Homo sapiens
MPPLLAPLLCLALLPALAARGPRCSQPGETCLNGGKCEAANGTEACVCGGAFVGPRCQDPNPCLSTPCKNAGTCHVVDRRGVADYACSCALGFSGPLCLTPLDNACLTNPCRNGGTCDLLTLTEYKCRCPPGWSGKSCQQADPCASNPCANGGQCLPFEASYICHCPPSFHGPTCRQDVNECGQKPGLCRHGGTCHNEVGSYRCVCRATHTGPNCERPYVPCSPSPCQNGGTCRPTGDVTHECACLPGFTGQNCEENIDDCPGNNCKNGGACVDGVNTYNCRCPPEWTGAYTGQYCTEDVDECQLMPNACQNGGTCHNTHGGYNCVCVNGWTGEDCSENIDDCASAACFHGATCHDRVASFYCECPHGRTGLLCHLNDACISNPCNEGSNCDTNPVNGKAICTCPSGYTGPACSQDVDECSLGANPCEHAGKCINTLGSFECQCLQGYTGPRCEIDVNECVSNPCQNDATCLDQIGEFQCICMPGYEGVHCEVNTDECASSPCLHNGRCLDKINEFQCECPTGFTGHLCQYDVDECASTPCKNGAKCLDGPNTYTCVCTEGYTGTHCEVDIDECDPDPCHYGSCKDGVATFTCLCRPGYTGHHCETNINECSSQPCRHGGTCQDRDNAYLCFCLKGTTGPNCEINLDDCASSPCDSGTCLDKIDGYECACEPGYTGSMCNINIDECAGNPCHNGGTCEDGINGFTCRCPEGYHDPTCLSEVNECNSNPCVHGACRDSLNGYKCDCDPGWSGTNCDINNNECESNPCVNGGTCKDMTSGYVCTCREGFSGPNCQTNINECASNPCLNQGTCIDDVAGYKCNCLLPYTGATCEVVLAPCAPSPCRNGGECRQSEDYESFSCVCPTGWQGQTCEVDINECVLSPCRHGASCQNTHGGYRCHCQAGYSGRNCETDIDDCRPNPCHNGGSCTDGINTAFCDCLPGFRGTFCEEDINECASDPCRNGANCTDCVDSYTCTCPAGFSGIHCENNTPDCTESSCFNGGTCVDGINSFTCLCPPGFTGSYCQHDVNECDSQPCLHGGTCQDGCGSYRCTCPQGYTGPNCQNLVHWCDSSPCKNGGKCWQTHTQYRCECPSGWTGLYCDVPSVSCEVAAQRQGVDVARLCQHGGLCVDAGNTHHCRCQAGYTGSYCEDLVDECSPSPCQNGATCTDYLGGYSCKCVAGYHGVNCSEEIDECLSHPCQNGGTCLDLPNTYKCSCPRGTQGVHCEINVDDCNPPVDPVSRSPKCFNNGTCVDQVGGYSCTCPPGFVGERCEGDVNECLSNPCDARGTQNCVQRVNDFHCECRAGHTGRRCESVINGCKGKPCKNGGTCAVASNTARGFICKCPAGFEGATCENDARTCGSLRCLNGGTCISGPRSPTCLCLGPFTGPECQFPASSPCLGGNPCYNQGTCEPTSESPFYRCLCPAKFNGLLCHILDYSFGGGAGRDIPPPLIEEACELPECQEDAGNKVCSLQCNNHACGWDGGDCSLNFNDPWKNCTQSLQCWKYFSDGHCDSQCNSAGCLFDGFDCQRAEGQCNPLYDQYCKDHFSDGHCDQGCNSAECEWDGLDCAEHVPERLAAGTLVVVVLMPPEQLRNSSFHFLRELSRVLHTNVVFKRDAHGQQMIFPYYGREEELRKHPIKRAAEGWAAPDALLGQVKASLLPGGSEGGRRRRELDPMDVRGSIVYLEIDNRQCVQASSQCFQSATDVAAFLGALASLGSLNIPYKIEAVQSETVEPPPPAQLHFMYVAAAAFVLLFFVGCGVLLSRKRRRQHGQLWFPEGFKVSEASKKKRREPLGEDSVGLKPLKNASDGALMDDNQNEWGDEDLETKKFRFEEPVVLPDLDDQTDHRQWTQQHLDAADLRMSAMAPTPPQGEVDADCMDVNVRGPDGFTPLMIASCSGGGLETGNSEEEEDAPAVISDFIYQGASLHNQTDRTGETALHLAARYSRSDAAKRLLEASADANIQDNMGRTPLHAAVSADAQGVFQILIRNRATDLDARMHDGTTPLILAARLAVEGMLEDLINSHADVNAVDDLGKSALHWAAAVNNVDAAVVLLKNGANKDMQNNREETPLFLAAREGSYETAKVLLDHFANRDITDHMDRLPRDIAQERMHHDIVRLLDEYNLVRSPQLHGAPLGGTPTLSPPLCSPNGYLGSLKPGVQGKKVRKPSSKGLACGSKEAKDLKARRKKSQDGKGCLLDSSGMLSPVDSLESPHGYLSDVASPPLLPSPFQQSPSVPLNHLPGMPDTHLGIGHLNVAAKPEMAALGGGGRLAFETGPPRLSHLPVASGTSTVLGSSSGGALNFTVGGSTSLNGQCEWLSRLQSGMVPNQYNPLRGSVAPGPLSTQAPSLQHGMVGPLHSSLAASALSQMMSYQGLPSTRLATQPHLVQTQQVQPQNLQMQQQNLQPANIQQQQSLQPPPPPPQPHLGVSSAASGHLGRSFLSGEPSQADVQPLGPSSLAVHTILPQESPALPTSLPSSLVPPVTAAQFLTPPSQHSYSSPVDNTPSHQLQVPEHPFLTPSPESPDQWSSSSPHSNVSDWSEGVSSPPTSMQSQIARIPEAFK

SEQ ID NO: 6342 - protein, 424 aa, Homo sapiens
MTLRPGTMRLACMFSSILLFGAAGLLLFISLQDPTELAPQQVPGIKFNIRPRQPHHDLPPGGSQDGDLKEPTERVTRDLSSGAPRGRNLPAPDQPQPPLQRGTRLRLRQRRRRLLIKKMPAAATIPANSSDAPFIRPGPGTLDGRWVSLHRSQQERKRVMQEACAKYRASSSRRAVTPRHVSRIFVEDRHRVLYCEVPKAGCSNWKRVLMVLAGLASSTADIQHNTVHYGSALKRLDTFDRQGILHRLSTYTKMLFVREPFERLVSAFRDKFEHPNSYYHPVFGKAILARYRANASREALRTGSGVRFPEFVQYLLDVHRPVGMDIHWDHVSRLCSPCLIDYDFVGKFESMEDDANFFLSLIRAPRNLTFPRFKDRHSQEARTTARIAHQYFAQLSALQRQRTYDFYYMDYLMFNYSKPFADLY

SEQ ID NO: 6343 - protein, 424 aa, Homo sapiens
MTLRPGTMRLACMFSSILLFGAAGLLLFISLQDPTELAPQQVPGIKFNIRPRQPHHDLPPGGSQDGDLKEPTERVTRDLSSGAPRGRNLPAPDQPQPPLQRGTRLRLRQRRRRLLIKKMPAAATIPANSSDAPFIRPGPGTLDGRWVSLHRSQQERKRVMQEACAKYRASSSRRAVTPRHVSRIFVEDRHRVLYCEVPKAGCSNWKRVLMVLAGLASSTADIQHNTVHYGSALKRLDTFDRQGILHRLSTYTKMLFVREPFERLVSAFRDKFEHPNSYYHPVFGKAILARYRANASREALRTGSGVRFPEFVQYLLDVHRPVGMDTHWDHVSRLCSPCLIDYDFVGKFESMEDDANFFLSLIRAPRNLTFPRFKDRHSQEARTTARIAHQYFAQLSALQRQRTYDFYYMDYLMFNYSKPFADLY

SEQ ID NO: 6344 - protein, 245 aa, Homo sapiens
MGRLDGKVIILTAAAQGIGQAAALAFAREGAKVIATDINESKLQELEKYPGIQTRVLDVTKKKQIDQFANEVERLDVLFNVAGFVHHGTVLDCEEKDWDFSMNLNVRSMYLMIKAFLPKMLAQKSGNIINMSSVASSVKGVVNRCVYSTTKAAVIGLTKSVAADFIQQGIRCNCVCPGTVDTPSLQERIQARGNPEEARNDFLKRQKTGRFATAEEIAMLCVYLASDESAYVTGNPVIIDGGWSL

SEQ ID NO: 6345 - protein, 173 aa, Homo sapiens
MGRLDGKVIILTAAAQGIGQAAALAFAREGAKVIATDINESKLQELEKYPGIQTRVLDVTKKKQIDQFANEVERLDVLFNVAGFVHHGTVLDCEEKDWDFSMNLNVRSMYLMIKAFLPKMLAQKSGNIINMSSVASSVKGGSVSFRGLRCSYTHIIKSSAFGNRHSRDYNFKY

SEQ ID NO: 6346 - protein, 998 aa, Homo sapiens
MVFQTRYPSWIILCYIWLLRFAHTGEAQAAKEVLLLDSKAQQTELEWISSPPNGWEEISGLDENYTPIRTYQVCQVMEPNQNNWLRTNWISKGNAQRIFVELKFTLRDCNSLPGVLGTCKETFNLYYYETDYDTGRNIRENLYVKIDTIAADESFTQGDLGERKMKLNTEVREIGPLSKKGFYLAFQDVGACIALVSVKVYYKKCWSIIENLAIFPDTVTGSEFSSLVEVRGTCVSSAEEEAENAPRMHCSAEGEWLVPIGKCICKAGYQQKGDTCEPCGRGFYKSSSQDLQCSRCPTHSFSDKEGSSRCECEDGYYRAPSDPPYVACTRPPSAPQNLIFNINQTTVSLEWSPPADNGGRNDVTYRILCKRCSWEQGECVPCGSNIGYMPQQTGLEDNYVTVMDLLAHANYTFEVEAVNGVSDLSRSQRLFAAVSITTGQAAPSQVSGVMKERVLQRSVELSWQEPEHPNGVITEYEIKYYEKDQRERTYSTVKTKSTSASINNLKPGTVYVFQIRAFTAAGYGNYSPRLDVATLEEATGKMFEATAVSSEQNPVIIIAVVAVAGTIILVFMVFGFIIGRRHCGYSKADQEGDEELYFHFKFPGTKTYIDPETYEDPNRAVHQFAKELDASCIKIERVIGAGEFGEVCSGRLKLPGKRDVAVAIKTLKVGYTEKQRRDFLCEASIMGQFDHPNVVHLEGVVTRGKPVMIVIEFMENGALDAFLRKHDGQFTVIQLVGMLRGIAAGMRYLADMGYVHRDLAARNILVNSNLVCKVSDFGLSRVIEDDPEAVYTTTGGKIPVRWTAPEAIQYRKFTSASDVWSYGIVMWEVMSYGERPYWDMSNQDVIKAIEEGYRLPAPMDCPAGLHQLMLDCWQKERAERPKFEQIVGILDKMIRNPNSLKTPLGTCSRPISPLLDQNTPDFTTFCSVGEWLQAIKMERYKDNFTAAGYNSLESVARMTIEDVMSLGITLVGHQKKIMSSIQTMRAQMLHLHGTGIQV

SEQ ID NO: 6347 - protein, 824 aa, Homo sapiens
MLFSWREDPGAQCLLLSLLLLAASEVGSGQLHYSVSEEAKHGTFVGRIAQDLGLELAELVPRLFRVASKRHGDLLEVNLQNGILFVNSRIDREELCGRSAECSIHLEVIVDRPLQVFHVEVEVKDINDNAPVFPMAVKNLFISESRQPGSRFSLEGASDADIGTNSLLTYSLDSTEYFTLDVKRNDEEIKSLGLVLKKNLNREDTPKHYLLITAIDGGKPELTGTTQLKITVLDVNDNAPAFERTIYKVRLLENAPNGTLVVTVNATDLDEGVNKDIAYSFNTDMSADILSKFHLDPVNGQISVKGNIDFEESKSYEIQVEATDKGNPPMSDHCTVLLEIVDINDNVPELVIQSLSLPVLEDSPLSTVIALISVSDRDSGVNGQVTCSLTPHVPFKLVSTFKNYYSLVLDSPLDRESVSAYELVVTARDGGSPSLWATASVSVEVADVNDNAPAFSQSEYTVFVKENNPPGCHIFTVSARDADAQENALVSYSLVERRVGERALSSYVSVHAESGKVYALQPLDHEELELLQFQVSARDAGVPPLGSNVTLQVFVLDENDNAPALLMPRVGGIGGAVSELVPRSVGAGHVVAKVRAVDADSGYNAWLSYELQPGTGGARIPFRVGLYTGEISTTRALDEVDAPRHRLLVLVKDHGEPSLTATATVLVSLVESGQAPKASSQASAGATGPEAALVDVNVYLIVAICAVSSLLVLTLLLYTALRCSAPPTEGDCGPGKPTLVCSSAVGSWSYSQQRQQRVCSGEGLPKTDLMAFSPSLPPCPISRDREEKQDVDVDLSAKVSNFYLFFPKCLCFSFLNVSTPLEIH

SEQ ID NO: 6348 - protein, 950 aa, Homo sapiens
MLFSWREDPGAQCLLLSLLLLAASEVGSGQLHYSVSEEAKHGTFVGRIAQDLGLELAELVPRLFRVASKRHGDLLEVNLQNGILFVNSRIDREELCGRSAECSIHLEVIVDRPLQVFHVEVEVKDINDNAPVFPMAVKNLFISESRQPGSRFSLEGASDADIGTNSLLTYSLDSTEYFTLDVKRNDEEIKSLGLVLKKNLNREDTPKHYLLITAIDGGKPELTGTTQLKITVLDVNDNAPAFERTIYKVRLLENAPNGTLVVTVNATDLDEGVNKDIAYSFNTDMSADILSKFHLDPVNGQISVKGNIDFEESKSYEIQVEATDKGNPPMSDHCTVLLEIVDINDNVPELVIQSLSLPVLEDSPLSTVIALISVSDRDSGVNGQVTCSLTPHVPFKLVSTFKNYYSLVLDSPLDRESVSAYELVVTARDGGSPSLWATASVSVEVADVNDNAPAFSQSEYTVFVKENNPPGCHIFTVSARDADAQENALVSYSLVERRVGERALSSYVSVHAESGKVYALQPLDHEELELLQFQVSARDAGVPPLGSNVTLQVFVLDENDNAPALLMPRVGGIGGAVSELVPRSVGAGHVVAKVRAVDADSGYNAWLSYELQPGTGGARIPFRVGLYTGEISTTRALDEVDAPRHRLLVLVKDHGEPSLTATATVLVSLVESGQAPKASSQASAGATGPEAALVDVNVYLIVAICAVSSLLVLTLLLYTALRCSAPPTEGDCGPGKPTLVCSSAVGSWSYSQQRQQRVCSGEGLPKTDLMAFSPSLPPCPISRDREEKQDVDVDLSAKPRQPNPDWRYSASLRAGMHSSVHLEEAGILRAGPGGPDQQWPTVSSATPEPEAGEVSPPVGAGVNSNSWTFKYGPGNPKQSGPGELPDKFIIPGSPAIISIRQEPTNSQIDKSDFITFGKKEETKKKKKKKKGNKTQEKKEKGNSTTDNSDQ

SEQ ID NO: 6349 - protein, 439 aa, Homo sapiens
AAAGPSPSPGAGTMVLSVPVIALGATLGTATSILALCGVTCLCRHMHPKKGLLPRDQDPDLEKAKPSLLGSAQQFNVKKSTEPVQPRALLKFPDIYGPRPAVTAPEVINYADYSLRSTEEPTAPASPQPPNDSRLKRQVTEELFILPQNGVVEDVCVMETWNPEKAASWNQAPKLHYCLDYDCQKAELFVTRLEAVTSNHDGGCDCYVQGSVANRTGSVEAQTALKKRQLHTTWEEGLVLPLAEEELPTATLTLTLRTCDRFSRHSVAGELRLGLDGTSVPLGAAQWGELKTSAKEPSAGAGEVLLSISYLPAANRLLVVLIKAKNLHSNQSKELLGKDVSVKVTLKHQARKLKKKQTKRAKHKINPVWNEMIMFELPDDLLQASSVELEVLGQDDSGQSCALGHCSLGLHTSGSERSHWEEMLKNPRRQIAMWHQLHL

SEQ ID NO: 6350 - protein, 541 aa, Homo sapiens
MTTPAGSGSGFGSVSWWGLSPALDLQAESPPVDPDSQADTVHSNPELDVLLLGSVDGRHLLRTLSRAKFWPRRRFNFFVLENNLEAVARHMLIFSLALEEPEKMGLQERSETFLEVWGNALLRPPVAAFVRAQADLLAHLVPEPDRLEEQLPWLSLRALKFRERDALEAVFRFWAGGEKGPQAFPMSRLWDSRLRHYLGSRYDARRGVSDWDLRMKLHDRGAQVIHPQEFRRWRDTGVAFELRDSSAYHVPNRTLASGRLLSYRGERVAARGYWGDIATGPFVAFGIEADDESLLRTSNGQPVKTAGEITQHNVTELLRDVAAWGRARATGGDLEEQQHAEGSPEPGTPAAPTPESFTVHFLPLNSAQTLHHKSCYNGRFQLLYVACGMVHLLIPELGACVAPGGNLIVELARYLVDVRQEQLQGFNTRVRELAQAAGFAPQTGARPSETFARFCKSQESALGNTVPAVEPGTPPLDILAQPLEASNPALEGLTQPLQGGTPHCEPCQLPSESPGSLSEVLAQPQGALAPPNCESDSKTGV

SEQ ID NO: 6351 - protein, 608 aa, Homo sapiens
MLPLLDSSKRAGTLGSGCGVPRVHSAALSREEGASRDIWRIKVWARVMTTPAGSGSGFGSVSWWGLSPALDLQAERDATVDALPTTMVPQPAVILPGPPVDPDSQADTVHSNPELDVLLLGSVDGRHLLRTLSRAKFWPRRRFNFFVLENNLEAVARHMLIFSLALEEPEKMGLQERSETFLEVWGNALLRPPVAAFVRAQADLLAHLVPEPDRLEEQLPWLSLRALKFRERDALEAVFRFWAGGEKGPQAFPMSRLWDSRLRHYLGSRYDARRGVSDWDLRMKLHDRGAQVIHPQEFRRWRDTGVAFELRDSSAYHVPNRTLASGRLLSYRGERVAARGYWGDIATGPFVAFGIEADDESLLRTSNGQPVKTAGEITQHNVTELLRDVAAWGRARATGGDLEEQQHAEGSPEPGTPAPTPESFTVHFLPLNSAQTLHHKSCYNGRFQLLYVACGMVHLLIPELGACVAPGGNLIVELARYLVDVRQEQLQGFNTRVRELAQAAGFAPQTGARPSETFARFCKSQESALGNTVPAVEPGTPPLDILAQPLEASNPALEGLTQPLQGGTPHCEPCQLPSESPGSLSEVLAQPQGALAPPNCESDSKTGV

SEQ ID NO: 6352 - protein, 326 aa, Homo sapiens
SGTGKMATFAISILQQIALDLKATQALVLAPTRELAQQIQKVVMALVDYMGASCHACIRGTNVRAEVQKLQMEAPHIIVGTPSCVFDMLNRRYLSPKYIKMFVLDEADEMLSRGFKDQIYDIFQKLNSNTQVVLLSATMPSDVLEVIKKFMRDPIRILVKKEELTLEGIRQFYINVEREEWKLDTLCDLYETLTITQAVIFINTRRKVDWLTEKMHARDFTVSAMHGDMDQKERDVITREFRSGSSRVLITTDLLARGIDVQQVSLVINYDLPTNRENYIHRISRGGQFGRKDVAINMVTEEDKRTLRDIETFYNTSIEEMPPMLL

SEQ ID NO: 6353 - protein, 406 aa, Homo sapiens
MPRAGRSLGRSAGTSPPSSGASPKAGQSKISAVSRLLLASPRAHGPSASTTKTLSFSTKSLPQAVGQGSSSPPGGKHTPWSTQSLSRNRSSGLASKLPLRAVSGRISELLQGGAGARGLQLRAGPEAEARGGALAEDEPAAAHLLPSPYSKITPPRRPHRCSSGHGSDNSSVLSGELPPAMGKTALFYHSGGSSGYESVMRDSEATGSASSAQDSTSENSSSVGGRCRSLKTPKKRSNPGSQRRRLIPALSLDTSSPVRKPPNSTGVRWVDGPLRSSPRGLGEPFEIKVYEIDDVERLQRRRGGASKEAMCFNAKLKILEHRQQRIAEVRAKYEWLMKELEATKQYLMLDPNKWLSEFDLEQVWELDSLEYLEALECVTERLESRVNFCKAHLMMITCFDITSRRR

SEQ ID NO: 6354 - protein, 1682 aa, Homo sapiens
PGWMHRAVDPPGARAAREAFALGGLSCAGAWSSCPPHPPPRSAWLPGGRCSASIGQPPLPAPLPPSHGSSSGHPSKPYYAPGAPTPRPLHGKLESLHGCVQALLREPAQPGLWEQLGQLYESEHDSEEATRCYHSALRYGGSFAELGPRIGRLQQAQLWNFHTGSCQHRAKVLPPLEQVWNLLHLEHKRNYGAKRGGPPVKRAAEPPVVQPVPPAALSGPSGEEGLSPGGKRRRGCNSEQTGLPPGLPLPPPPLPPPPPPPPPPLPGLATSPPFQLTKPGLWSTLHGDAWGPERKGSAPPERQEQRHSLPHPYPYPAPAYTAHPPGHRLVPAAPPGPGPRPPGAESHGCLPATRPPGSDLRESRVQRSRMDSSVSPAATTACVPYAPSRPPGLPGTTTSSSSSSSSNTGLRGVEPNPGIPGADHYQTPALEVSHHGRLGPSAHSSRKPFLGAPAATPHLSLPPGPSSPPPPPCPRLLRPPPPPAWLKGPACRAAREDGEILEELFFGTEGPPRPAPPPLPHREGFLGPPASRFSVGTQDSHTPPTPPTPTTSSSNSNSGSHSSSPAGPVSFPPPPYLARSIDPLPRPPSPAQNPQDPPLVPLTLALPPAPPSSCHQNTSGSFRRPESPRPRVSFPKTPEVGPGPPPGPLSKAPQPVPPGVGELPARGPRLFDFPPTPLEDQFEEPAEFKILPDGLANIMKMLDESIRKEEEQQQHEAGVAPQPPLKEPFASLQSPFPTDTAPTTTAPAVAVTTTTTTTTTTTATQEEEKKPPPALPPPPPLAKFPPPSQPQPPPPPPPSPASLLKSLASVLEGQKYCYRGTGAAVSTRPGPLPTTQYSPGPPSGATALPPTSAAPSAQGSPQPSASSSSQFSTSGGPWARERRAGEEPVPGPMTPTQPPPPLSLPPARSESEVLEEISRACETLVERVGRSATDPADPVDTAEPADSGTERLLPPAQAKEEAGGVAAVSGSCKRRQKEHQKEHRRHRRACKDSVGRRPREGRAKAKAKVPKEKSRRVLGNLDLQSEEIQGREKSRPDLGGASKAKPPTAPAPPSAPAPSAQPTPPSASVPGKKAREEAPGPPGVSRADMLKLRSLSEGPPKELKIRLIKVESGDKETFIASEVEERRLRMADLTISHCAADVVRASRNAKVKGKFRESYLSPAQSVKPKINTEEKLPREKLNPPTPSIYLESKRDAFSPVLLQFCTDPRNPITVIRGLAGSLRLNLGLFSTKTLVEASGEHTVEVRTQVQQPSDENWDLTGTRQIWPCESSRSHTTIAKYAQYQASSFQESLQEEKESEDEESEEPDSTTGTPPSSAPDPKNHHIIKFGTNIDLSDAKRWKPQLQELLKLPAFMRVTSTGNMLSHVGHTILGMNTVQLYMKVPGSRTPGHQENNNFCSVNINIGPGDCEWFAVHEHYWETISAFCDRHGVDYLTGSWWPILDDLYASNIPVYRFVQRPGDLVWINAGTVHWVQATGWCNNIAWNVGPLTAYQYQLALERYEWNEVKNVKSIVPMIHVSWNVARTVKISDPDLFKMIKFCLLQSMKHCQVQRESLVRAGKKIAYQGRVKDEPAYYCNECDVEVFNILFVTSENGSRNTYLVHCEGCARRRSAGLQGVVVLEQYRTEELAQAYDAFTLVRARRARGQRRRALGQAAGTGFGSPAAPFPEPPPAFSPQAPASTSR

SEQ ID NO: 6355 - protein, 1253 aa, Homo sapiens
MVVALRYVWPLLLCSPCLLIQIPEEYEGHHVMEPPVITEQSPRRLVVFPTDDISLKCEASGKPEVQFRWTRDGVHFKPKEELGVTVYQSPHSGSFTITGNNSNFAQRFQGIYRCFASNKLGTAMSHEIRLMAEGAPKWPKETVKPVEVEEGESVVLPCNPPPSAEPLRIYWMNSKILHIKQDERVTMGQNGNLYFANVLTSDNHSDYICHAHFPGTRTIIQKEPIDLRVKATNSMIDRKPRLLFPTNSSSHLVALQGQPLVLECIAEGFPTPTIKWLRPSGPMPADRVTYQNHNKTLQLLKVGEEDDGEYRCLAENSLGSARHAYYVTVEAAPYWLHKPQSHLYGPGETARLDCQVQGRPQPEVTWRINGIPVEELAKDQKYRIQRGALILSNVQPSDTMVTQCEARNRHGLLLANAYIYVVQLPAKILTADNQTYMAVQGSTAYLLCKAFGAPVPSVQWLDEDGTTVLQDERFFPYANGTLGIRDLQANDTGRYFCLAANDQNNVTIMANLKVKDATQITQGPRSTIEKKGSRVTFTCQASFDPSLQPSITWRGDGRDLQELGDSDKYFIEDGRLVIHSLDYSDQGNYSCVASTELDVVESRAQLLVVGSPGPVPRLVLSDLHLLTQSQVRVSWSPAEDHNAPIEKYDIEFEDKEMAPEKWYSLGKVPGNQTSTTLKLSPYVHYTFRVTAINKYGPGEPSPVSETVVTPEAAPEKNPVDVKGEGNETTNMVITWKPLRWMDWNAPQVQYRVQWRPQGTRGPWQEQIVSDPFLVVSNTSTFVPYEIKVQAVNSQGKGPEPQVTIGYSGEDYPQAIPELEGIEILNSSAVLVKWRPVDLAQVKGHLRGYNVTYWREGSQRKHSKRHIHKDHVVVPANTTSVILSGLRPYSSYHLEVQAFNGRGSGPASEFTFSTPEGVPGHPEALHLECQSNTSLLLRWQPPLSHNGVLTGYVLSYHPLDEGGKGQLSFNLRDPELRTHNLTDLSPHLRYRFQLQATTKEGPGEAIVREGGTMALSGISDFGNISATAGENYSVVSWVPKEGQCNFRFHILFKALGEEKGGASLSPQYVSYNQSSYTQWDLQPDTDYEIHLFKERMFRHQMAVKTNGTGRVRLPPAGFATEGWFIGFVSAIILLLLVLLILCFIKRSKGGKYSVKDKEDTQVDSEARPMKDETFGEYSDNEEKAFGSSQPSLNGDIKPLGSDDSLADYGGSVDVQFNEDGSFIGQYSGKKEKEAAGGNDSSGATSPINPAVALE

SEQ ID NO: 6356 - protein, 1257 aa, Homo sapiens
MVVALRYVWPLLLCSPCLLIQIPEEYEGHHVMEPPVITEQSPRRLVVFPTDDISLKCEASGKPEVQFRWTRDGVHFKPKEELGVTVYQSPHSGSFTITGNNSNFAQRFQGIYRCFASNKLGTAMSHEIRLMAEGAPKWPKETVKPVEVEEGESVVLPCNPPPSAEPLRIYWMNSKILHIKQDERVTMGQNGNLYFANVLTSDNHSDYICHAHFPGTRTIIQKEPIDLRVKATNSMIDRKPRLLFPTNSSSHLVALQGQPLVLECIAEGFPTPTIKWLRPSGPMPADRVTYQNHNKTLQLLKVGEEDDGEYRCLAENSLGSARHAYYVTVEAAPYWLHKPQSHLYGPGETARLDCQVQGRPQPEVTWRINGIPVEELAKDQKYRIQRGALILSNVQPSDTMVTQCEARNRHGLLLANAYIYVVQLPAKILTADNQTYMAVQGSTAYLLCKAFGAPVPSVQWLDEDGTTVLQDERFFPYANGTLGIRDLQANDTGRYFCLAANDQNNVTIMANLKVKDATQITQGPRSTIEKKGSRVTFTCQASFDPSLQPSITWRGDGRDLQELGDSDKYFIEDGRLVIHSLDYSDQGNYSCVASTELDVVESRAQLLVVGSPGPVPRLVLSDLHLLTQSQVRVSWSPAEDHNAPIEKYDIEFEDKEMAPEKWYSLGKVPGNQTSTTLKLSPYVHYTFRVTAINKYGPGEPSPVSETVVTPEAAPEKNPVDVKGEGNETTNMVITWKPLRWMDWNAPQVQYRVQWRPQGTRGPWQEQIVSDPFLVVSNTSTFVPYEIKVQAVNSQGKGPEPQVTIGYSGEDYPQAIPELEGIEILNSSAVLVKWRPVDLAQVKGHLRGYNVTYWREGSQRKHSKRHIHKDHVVVPANTTSVILSGLRPYSSYHLEVQAFNGRGSGPASEFTFSTPEGVPGHPEALHLECQSNTSLLLRWQPPLSHNGVLTGYVLSYHPLDEGGKGQLSFNLRDPELRTHNLTDLSPHLRYRFQLQATTKEGPGEAIVREGGTMALSGISDFGNISATAGENYSVVSWVPKEGQCNFRFHILFKALGEEKGGASLSPQYVSYNQSSYTQWDLQPDTDYEIHLFKERMFRHQMAVKTNGTGRVRLPPAGFATEGWFIGFVSAIILLLLVLLILCFIKRSKGGKYSVKDKEDTQVDSEARPMKDETFGEYRSLESDNEEKAFGSSQPSLNGDIKPLGSDDSLADYGGSVDVQFNEDGSFIGQYSGKKEKEAAGGNDSSGATSPINPAVALE

SEQ ID NO: 6357 - protein, 391 aa, Homo sapiens
MLRPGGAEEAAQLPLRRASAPVPVPSPAAPDGSRASARLGLACLLLLLLLTLPARVDTSWWYIGALGARVICDNIPGLVSRQRQLCQRYPDIMRSVGEGAREWIRECQHQFRHHRWNCTTLDRDHTVFGRVMLRSSREAAFVYAISSAGVVHAITRACSQGELSVCSCDPYTRGRHHDQRGDFDWGGCSDNIHYGVRFAKAFVDAKEKRLKDARALMNLHNNRCGRTAVRRFLKLECKCHGVSGSCTLRTCWRALSDFRRTGDYLRRRYDGAVQVMATQDGANFTAARQGYRRATRTDLVYFDNSPDYCVLDKAAGSLGTAGRVCSKTSKGTDGCEIMCCGRGYDTTRVTRVTQCECKFHWCCAVRCKECRNTVDVHTCKAPKKAEWLDQT

SEQ ID NO: 6358 - protein, 372 aa, Homo sapiens
MLDGLGVVAISIFGIQLKTEGSLRTAVPGIPTQSAFNKCLQRYIGALGARVICDNIPGLVSRQRQLCQRYPDIMRSVGEGAREWIRECQHQFRHHRWNCTTLDRDHTVFGRVMLRSSREAAFVYAISSAGVVHAITRACSQGELSVCSCDPYTRGRHHDQRGDFDWGGCSDNIHYGVRFAKAFVDAKEKRLKDARALMNLHNNRCGRTAVRRFLKLECKCHGVSGSCTLRTCWRALSDFRRTGDYLRRRYDGAVQVMATQDGANFTAARQGYRRATRTDLVYFDNSPDYCVLDKAAGSLGTAGRVCSKTSKGTDGCEIMCCGRGYDTTRVTRVTQCECKFHWCCAVRCKECRNTVDVHTCKAPKKAEWLDQT

SEQ ID NO: 6359 - protein, 741 aa, Homo sapiens
MRRYRTCDNPPPSNGGRACGGPDSQIQRCNTDMCPVDGSWGSWHSWSQCSASCGGGEKTRKRLCDHPVPVKGGRPCPGDTTQVTRCNVQACPGGPQRARGSVIGNINDVEFGIAFLNATITDSPNSDTRIIRAKITNVPRSLGSAMRKIVSILNPIYWTTAKEIGEAVNGFTLTNAVFKRETQVEFATGEILQMSHIARGLDSDGSLLLDIVVSGYVLQLQSPAEVTVKDYTEDYIQTGPGQLYAYSTRLFTIDGISIPYTWNHTVFYDQAQGRMPFLVETLHASSVESDYNQIEETLGFKIHASISKGDRSNQCPSGFTLDSVGPFCADEDECAAGNPCSHSCHNAMGTYYCSCPKGLTIAADGRTCQDIDECALGRHTCHAGQDCDNTIGSYRCVVRCGSGFRRTSDGLSCQDINECQESSPCHQRCFNAIGSFHCGCEPGYQLKGRKCMDVNECRQNVCRPDQHCKNTRGGYKCIDLCPNGMTKAENGTCIDIDECKDGTHQCRYNQICENTRGSYRCVCPRGYRSQGVGRPCMDIDECENTDACQHECKNTFGSYQCICPPGYQLTHNGKTCQDIDECLEQNVHCGPNRMCFNMRGSYQCIDTPCPPNYQRDPVSGFCLKNCPPNDLECALSPYALEYKLVSLPFGIATNQDLIRLVAYTQDGVMHPRTTFLMVDEEQTVPFALRDENLKGVVYTTRPLREAETYRMRVRASSYSANGTIEYQTTFIVYIAVSAYPY

SEQ ID NO: 6360 - protein, 5636 aa, Homo sapiens
MISWEVVHTVFLFALLYSSLAQDASPQSEIRAEEIPEGASTLAFVFDVTGSMYDDLVQVIEGASKILETSLKRPKRPLFNFALVPFHDPEIGPVTITTDPKKFQYELRELYVQGGGDCPEMSIGAIKIALEISLPGSFIYVFTDARSKDYRLTHEVLQLIQQKQSQVVFVLTGDCDDRTHIGYKVYEEIASTSSGQVFHLDKKQVNEVLKWVEEAVQASKVHLLSTDHLEQAVNTWRIPFDPSLKEVTVSLSGPSPMIEIRNPLGKLIKKGFGLHELLNIHNSAKVVNVKEPEAGMWTVKTSSSGRHSVRITGLSTIDFRAGFSRKPTLDFKKTVSRPVQGIPTYVLLNTSGISTPARIDLLELLSISGSSLKTIPVKYYPHRKPYGIWNISDFVPPNEAFFLKVTGYDKDDYLFQRVSSVSFSSIVPDAPKVTMPEKTPGYYLQPGQIPCSVDSLLPFTLSFVRNGVTLGVDQYLKESASVNLDIAKVTLSDEGFYECIAVSSAGTGRAQTFFDVSEPPPVIQVPNNVTVTPGERAVLTCLIISAVDYNLTWQRNDRDVRLAEPARIRTLANLSLELKSVKFNDAGEYHCMVSSEGGSSAASVFLTVQEPPKVTVMPKNQSFTGGSEVSIMCSATGYPKPKIAWTVNDMFIVGSHRYRMTSDGTLFIKNAAPKDAGIYGCLASNSAGTDKQNSTLRYIEAPKLMVVQSELLVALGDITVMECKTSGIPPPQVKWFKGDLELRPSTFLIIDPLLGLLKIQETQDLDAGDYTCVAINEAGRATGKITLDVGSPPVFIQEPADVSMEIGSNVTLPCYVQGYPEPTIKWRRLDNMPIFSRPFSVSSISQLRTGALFILNLWASDKGTYICEAENQFGKIQSETTVTVTGLVAPLIGISPSVANVIEGQQLTLPCTLLAGNPIPERRWIKNSAMLLQNPYITVRSDGSLHIERVQLQDGGEYTCVASNVAGTNNKTTSVVVHVLPTIQHGQQILSTIEGIPVTLPCKASGNPKPSVIWSKKGELISTSSAKFSAGADGSLYVVSPGGEESGEYVCTATNTAGYAKRKVQLTVYVRPRVFGDQRGLSQDKPVEISVLAGEEVTLPCEVKSLPPPIITWAKETQLISPFSPRHTFLPSGSMKITETRTSDSGMYLCVATNIAGNVTQAVKLNVHVPPKIQRGPKHLKVQVGQRVDIPCNAQGTPLPVITWSKGGSTMLVDGEHHVSNPDGTLSIDQATPSDAGIYTCVATNIAGTDETEITLHVQEPPTVEDLEPPYNTTFQERVANQRIEFPCPAKGTPKPTIKWLHNGRELTGREPGISILEDGTLLVIASVTPYDNGEYICVAVNEAGTTERKYNLKVHVPPVIKDKEQVTNVSVLLNQLTNLFCEVEGTPSPIIMWYKDNVQVTESSTIQTVNNGKILKLFRATPEDAGRYSCKAINIAGTSQKYFNIDVLVPPTIIGTNFPNEVSVVLNRDVALECQVKGTPFPDIHWFKDGKPLFLGDPNVELLDRGQVLHLKNARRNDKGRYQCTVSNAAGKQAKDIKLTIYIPPSIKGGNVTTDISVLINSLIKLECETRGLPMPAITWYKDGQPIMSSSQALYIDKGQYLHIPRAQVSDSATYTCHVANVAGTAEKSFHVDVYVPPMIEGNLATPLNKQVVIAHSLTLECKAAGNPSPILTWLKDGVPVKANDNIRIEAGGKKLEIMSAQEIDRGQYICVATSVAGEKEIKYEVDVLVPPAIEGGDETSYFIVMVNNLLELDCHVTGSPPPTIMWLKDGQLIDERDGFKILLNGRKLVIAQAQVSNTGLYRCMAANTAGDHKKEFEVTVHVPPTIKSSGLSERVVVKYKPVALQCIANGIPNPSITWLKDDQPVNTAQGNLKIQSSGRVLQIAKTLLEDAGRYTCVATNAAGETQQHIQLHVHEPPSLEDAGKMLNETVLVSNPVQLECKAAGNPVPVITWYKDNRLLSGSTSMTFLNRGQIIDIESAQISDAGIYKCVAINSAGATELFYSLQVHVAPSISGSNNMVAVVVNNPVRLECEARGIPAPSLTWLKDGSPVSSFSNGLQVLSGGRILALTSAQISDTGRYTCVAVNAAGEKQRDIDLRVYVPPNIMGEEQNVSVLISQAVELLCQSDAIPPPTLTWLKDGHPLLKKPGLSISENRSVLKIEDAQVQDTGRYTCEATNVAGKTEKKNYNVNIWVPPNIGGSDELTQLTVIEGNLISLLCESSGIPPPNLIWKKKGSPVLTDSMGRVRILSGGRQLQISIAEKSDAALYSCVASNVAGTAKKEYNLQVYIRPTITNSGSHPTEIIVTRGKSISLECEVQGIPPPTVTWMKDGHPLIKAKGVEILDEGHILQLKNIHVSDTGRYVCVAVNVAGMTDKKYDLSVHAPPSIIGNHRSPENISVVEKNSVSLTCEASGIPLPSITWFKDGWPVSLSNSVRILSGGRMLRLMQTTMEDAGQYTCVVRNAAGEERKIFGLSVLVPPHIVGENTLEDVKVKEKQSVTLTCEVTGNPVPEITWHKDGQPLQEDEAHHIISGGRFLQITNVQVPHTGRYTCLASSPAGHKSRSFSLNVFVSPTIAGVGSDGNPEDVTVILNSPTSLVCEAYSYPPATITWFKDGTPLESNRNIRILPGGRTLQILNAQEDNAGRYSCVATNEAGEMIKHYEVKVYIPPIINKGDLWGPGLSPKEVKIKVNNTLTLECEAYAIPSASLSWYKDGQPLKSDDHVNIAANGHTLQIKEAQISDTGRYTCVASNIAGEDELDFDVNIQVPPSFQKLWEIGNMLDTGRNGEAKDVIINNPISLYCETNAAPPPTLTWYKDGHPLTSSDKVLILPGGRVLQIPRAKVEDAGRYTCVAVNEAGEDSLQYDVRVLVPPIIKGANSDLPEEVTVLVNKSALIECLSSGSPAPRNSWQKDGQPLLEDDHHKFLSNGRILQILNTQITDIGRYVCVAENTAGSAKKYFNLNVHVPPSVIGPKSENLTVVVNNFISLTCEVSGFPPPDLSWLKNEQPIKLNTNTLIVPGGRTLQIIRAKVSDGGEYTCIAINQAGESKKKFSLTVYVPPSIKDHDSESLSVVNVREGTSVSLECESNAVPPPVITWYKNGRMITESTHVEILADGQMLHIKKAEVSDTGQYVCRAINVAGRDDKNFHLNVYVPPSIEGPEREVIVETISNPVTLTCDATGIPPPTIAWLKNHKRIENSDSLEVRILSGGSKLQIARSQHSDSGNYTCIASNMEGKAQKYYFLSIQVPPSVAGAEIPSDVSVLLGENVELVCNANGIPTPLIQWLKDGKPIASGETERIRVSANGSTLNIYGALTSDTGKYTCVATNPAGEEDRIFNLNVYVTPTIRGNKDEAEKLMTLVDTSINIECRATGTPPPQINWLKNGLPLPLSSHIRLLAAGQVIRIVRAQVSDVAVYTCVASNRAGVDNKHYNLQVFAPPNMDNSMGTEEITVLKGSSTSMACITDGTPAPSMAWLRDGQPLGLDAHLTVSTHGMVLQLLKAETEDSGKYTCIASNEAGEVSKHFILKVLEPPHINGSEEHEEISVIVNNPLELTCIASGIPAPKMTWMKDGRPLPQTDQVQTLGGGEVLRISTAQVEDTGRYTCLASSPAGDDDKEYLVRVHVPPNIAGTDEPRDITVLRNRQVTLECKSDAVPPPVITWLRNGERLQATPRVRILSGGRYLQINNADLGDTANYTCVASNIAGKTTREFILTVNVPPNIKGGPQSLVILLNKSTVLECIAEGVPTPRITWRKDGAVLAGNHARYSILENGFLHIQSAHVTDTGRYLCMATNAAGTDRRRIDLQVHVPPSIAPGPTNMTVIVNVQTTLACEATGIPKPSINWRKNGHLLNVDQNQNSYRLLSSGSLVIISPSVDDTATYECTVTNGAGDDKRTVDLTVQVPPSIADEPTDFLVTKHAPAVITCTASGVPFPSIHWTKNGIRLLPRGDGYRILSSGAIEILATQLNHAGRYTCVARNAAGSAHRHVTLHVHEPPVIQPQPSELHVILNNPILLPCEATGTPSPFITWQKEGINVNTSGRNHAVLPSGGLQISRAVREDAGTYMCVAQNPAGTALGKIKLNVQVPPVISPHLKEYVIAVDKPITLSCEADGLPPPDITWHKDGRAIVESIRQRVLSSGSLQIAFVQPGDAGHYTCMAANVAGSSSTSTKLTVHVPPRIRSTEGHYTVNENSQAILPCVADGIPTPAINWKKDNVLLANLLGKYTAEPYGELILENVVLEDSGFYTCVANNAAGEDTHTVSLTVHVLPTFTELPGDVSLNKGEQLRLSCKATGIPLPKLTWTFNNNIIPAHFDSVNGHSELVIERVSKEDSGTYVCTAENSVGFVKAIGFVYVKEPPVFKGDYPSNWIEPLGGNAILNCEVKGDPTPTIQWNRKGVDIEISHRIRQLGNGSLAIYGTVNEDAGDYTCVATNEAGVVERSMSLTLQSPPIITLEPVETVINAGGKIILNCQATGEPQPTITWSRQGHSISWDDRVNVLSNNSLYIADAQKEDTSEFECVARNLMGSVLVRVPVIVQVHGGFSQWSAWRACSVTCGKGIQKRSRLCNQPLPANGGKPCQGSDLEMRNCQNKPCPVDGSWSEWSLWEECTRSCGRGNQTRTRTCNNPSVQHGGRPCEGNAVEIIMCNIRPCPVHGAWSAWQPWGTCSESCGKGTQTRARLCNNPPPAFGGSYCDGAETQMQVCNERNCPIHGKWATWASWSACSVSCGGGARQRTRGCSDPVPQYGGRKCEGSDVQSDFCNSDPCPTHGNWSPWSGWGTCSRTCNGGQMRRYRTCDNPPPSNGGRACGGPDSQIQRCNTDMCPVDGSWGSWHSWSQCSASCGGGEKTRKRLCDHPVPVKGGRPCPGDTTQVTRCNVQACPGGPQRARGSVIGNINDVEFGIAFLNATITDSPNSDTRIIRAKITNVPRSLGSAMRKIVSILNPIYWTTAKEIGEAVNGFTLTNAVFKRETQVEFATGEILQMSHIARGLDSDGSLLLDIVVSGYVLQLQSPAEVTVKDYTEDYIQTGPGQLYAYSTRLFTIDGISIPYTWNHTVFYDQAQGRMPFLVETLHASSVESDYNQIEETLGFKIHASISKGDRSNQCPSGFTLDSVGPFCADEDECAAGNPCSHSCHNAMGTYYCSCPKGLTIAADGRTCQDIDECALGRHTCHAGQDCDNTIGSYRCVVRCGSGFRRTSDGLSCQDINECQESSPCHQRCFNAIGSFHCGCEPGYQLKGRKCMDVNECRQNVCRPDQHCKNTRGGYKCIDLCPNGMTKAENGTCIDIDECKDGTHQCRYNQICENTRGSYRCVCPRGYRSQGVGRPCMDINECEQVPKPCAHQCSNTPGSFKCICPPGQHLLGDGKSCAGLERLPNYGTQYSSYNLARFSPVRNNYQPQQHYRQYSHLYSSYSEYRNSRTSLSRTRRTIRKTCPEGSEASHDTCVDIDECENTDACQHECKNTFGSYQCICPPGYQLTHNGKTCQDIDECLEQNVHCGPNRMCFNMRGSYQCIDTPCPPNYQRDPVSGFCLKNCPPNDLECALSPYALEYKLVSLPFGIATNQDLIRLVAYTQDGVMHPRTTFLMVDEEQTVPFALRDENLKGVVYTTRPLREAETYRMRVRASSYSANGTIEYQTTFIVYIAVSAYPY

SEQ ID NO: 6361 - protein, 5636 aa, Homo sapiens
  VARIANT 3003, 3041, 3367: Xaa = Any Amino Acid
MISWEVVHTVFLFALLYSSLAQDASPQSEIRAEEFPEGASTLAFVFDVTGSMYDDLVQVIEGASKILETSLKRPKRPLFNFALVPFHDPEIGPVTITTDPKKFQYELRELYVQGGGDCPEMSIGAIKIALEISLPGSFIYVFTDARSKDYRLTHEVLQLIQQKQSQVVFVLTGDCDDRTHIGYKVYEEIASTSSGQVFHLDKKQVNEVLKWVEEAVQASKVHLLSTDHLEQAVNTWRIPFDPSLKEVTVSLSGPSPMIEIRNPLGKLIKKGFGLHELLNIHNSAKVVNVKEPEAGMWTVKTSSSGRHSVRITGLSTIDFRAGFSRKPTLDFKKTVSRPVQGIPTYVLLNTSGISTPARIDLLELLSISGSSLKTIPVKYYPHRKPYGIWNISDFVPPNEAFFLKVTGYDKDDYLFQRVSSVSFSSIVPDAPKVTMPEKTPGYYLQPGQIPCSVDSLLPFTLSFVRNGVTLGVDQYLKESASVSLDIAKVTLSDEGFYECIAVSSAGTGRAQTFFDVSEPPPVIQVPNNVTVTPGERAVLTCLIISAVDYNLTWQRNDRDVRLAEPARIRTLANLSLELKSVKFNDAGEYHCMVSSEGGSSAASVFLTVQEPPKVTVMPKNQSFTGGSEVSIMCSATGYPKPKIAWTVNDMFIVGSHRYRMTSDGTLFIKNAAPKDAGIYGCLASNSAGTDKQNSTLRYIEAPKLMVVQSELLVALGDITVMECKTSGIPPPQVKWFKGDLELRPSTFLIIDPLLGLLKIQETQDLDAGDYTCVAINEAGRATGKITLDVGSPPVFIQEPADVSMEIGSNVTLPCYVQGYPEPTIKWRRLDNMPIFSRPFSVSSISQLRTGALFILNLWASDKGTYICEAENQFGKIQSETTVTVTGLVAPLIGISPSVANVIEGQQLTLPCTLLAGNPIPERRWIKNSAMLLQNPYITVRSDGSLHIERVQLQDGGEYTCVASNVAGTNNKTTSVVVHVLPTIQHGQQILSTIEGIPVTLPCKASGNPKPSVIWSKKGELISTSSAKFSAGADGSLYVVSPEGEESGEYVCTATNTAGYAKRKVQLTVYVRPRVFGDLRGLSQDKPVEISVLAGEEVTLPCEVKSLPPPIITWAKETQLISPFSPRHTFLPSGSMKITETRTSDSGMYLCVATNIAGNVTQAVKLNVHVPPKIQRGPKHLKVQVGQRVDIPCNAQGTPLPVITWSKGGSTMLVDGEHHVSNPDGTLSIDQATPSDAGIYTCVATNIAGTDETEITLHVQEPPTVEDLEPPYNTTFQERVANQRIEFPCPAKGTPKPTIKWLHNGRELTGREPGISILEEGTLLVIASVTPYDNGEYICVAVNEAGTTERKYNLKVHVPPVIKDKEQVSNVSVLLNQLTNLFCEVEGTPSPIIMWYKDNVQVTESSTIQTVNNGKILKLFRATPEDAGRYSCKAINIAGTSQKYFNIDVLVPPTIIGTNFPKEVSVVLNRDVALECQVKGTPFPDIHWFKDGKPLFLGDPNVELLDRGQVLHLKNARRNDKGRYQCTVSNAAGKQAKDIKLTIYIPPSIKGGNVTTDISVLINSLIKLECKTRGLPMPAITWYKDGQPIMSSSQALYIDKGQYLHIPRAQVSDSATYTCHVANVAGTAEKSFHVDVYVPPMIEGNLATPLNKQVVIAHSLTLECNAAGNPSPILTWLKDGVPVKANDNFRIEAGGKKLEIMSAQEIDRGQYICVATSVAGEKEIKYEVDVLVPPAIEGGDETSYFIVMVNNLLELDCHVTGSPPPTIMWLKDGQLIDERDGFKILLNGRKLVIAQAQVSNTGLYRCMAANTAGDHKKEFEVTVHVPPTIKSSGLSERVVVKYKPVALQCIANGIPNPSITWLKDDQPVNTAQGNLKIQSSGRVLQIAKTLLEDAGRYTCVATNAAGETQQHIQLHVHEPPSLEDAGKMLNETVLVSNPVQLECKAAGNPVPVITWYKDNCLLSGSTSMTFLNRGQIIDIESAQISDAGIYKCVAINSAGATELFYSLQVHVAPSISGSNNMVAVVVNNPVRLECEARGIPAPSLTWLKDGSPVSSFSNGLQVLSGGRILALTSTQISDTGRYTCVAVNAAGEKQRDIDLRVYVPPNIMGEEQNVSVLISQAVELLCQSDAIPPPTLTWLKDGHPLLKKPGLSISENRSVLKIEDAQVQDTGRYTCEATNVAGKTEKKNYNVNIWVPPNIGGSDELTQLTVIEGNLISLLCESSGIPPPNLIWKKKGSPVLTDSMGRVRILSGGRQLQISIAEKSDAALYSCVASNVAGTAKKEYNLQVYIRPTITNSGSHPTEIIVTRGKSISLECEVQGIPPPTVTWMKDGHPLIKAKGVEILDEGHILQLKNIHVSDTGRYVCVAVNVAGMTDKKYDLSVHAPPSIIGNHRSPENISVVEKNSVSLTCEASGIPLPSTTWFKDGWPVSLSNSVRILSGGRMLRLMQTTMEDAGQYTCVVRNAAGEERKIFGLSVLVPPHIVGENTLEDVKVKEKQSVTLTCEVTGNPVPEITWHKDGQPLQEDEAHHIISGGRFLQITNVQVPHTGRYTCLASSPAGHKSRSFSLNVFVSPTIAGVGSDGNPEDVTVILNSPTSLVCEAYSYPPATITWFKDGTPLESNRNIRILPGGRTLQILNAQEDNAGRYSCVATNEAGEMIKHYEVKVYIPPIINKGDLWGPGLSPKEVKIKVNNTLTLECEAYAIPSASLSWYKDGQPLKSDDHVNIAANGHTLQIKEAQISDTGRYTCVASNIAGEDELDFDVNIQVPPSFQKLWEIGNMLDTGRNGEAKDVIINNPISLYCETNAAPPPTLTWYKDGHPLTSSDKVLILPGGRVLQIPRAKVEDAGRYTCVAVNEAGEDSLQYDVRVLVPPIIEGANSDLPEEVTVLVNKSALIECLSSGSPAPRNSWQKDGQPLLEDDHHKFLSNGRILQILNTQITDIGRYVCVAENTAGSAKKYFNLNVHVPPSVIGPKSENLTVVVNNFISLTCEVSGFPPPDLSWLKNXQPIKLNTNTLIVPGGRTLQIIRAKVSDGGEYTCIAINXAGESKKKFSLTVYVPPSIKDHDSESLSVVNVREGTSVSLECESNAVPPPVITWYKNGRMITESTHVEILADGQMLHIKKAEVSDTGQYVCRAINVAGRDDKNFHLNVYVPPSIEGPEREVIVETISNPVTLTCDATGIPPPTIAWLKNYKRIENSDSLEVRILSGGSKLQIARSQHSDSGNYTCIASNMEGKAQKYYFLSIQVPPSVAGAEIPSDVSVLLGENVELVCNANGIPTPLIQWLKDGKPIASGETERIRVSANGSTLNIYGALTSDTGKYTCVATNPAGEEDRIFNLNVYVTPTIRGNKDEAEKLMTYVDTSINIECRXTGTPPPQINWLKNGLPLPLSSHIRLLAAGQVIRIVRAQVSDVAVYTCVASNRAGVDNKHYNLQVFAPPNMDNSMGTEEITVLKGSSTSMACITDGTPAPSMAWLRDGQPLGLDAHLTVSTHGMVLQLLKAETEDSGKYTCIASNEAGEVSKHFILKVLEPPHINGSEEHEEISVIVNNPLELTCIASGIPAPKMTWMKDGRPLPQTDQVQTLGGGEVLRISTAQVEDTGRYTCLASSPAGDDDKEYLVRVHVPPNIAGTDEPRDITVLRNRQVTLECKSDAVPPPVITWLRNGERLQATPRVRILSGGRYLQINNADLGDTANYTCVASNIAGKTTREFILTVNVPPNIKGGPQSLVILLNKSTVLECIAEGVPTPRITWRKDGAVLAGNHARYSILENGFLHIQSAHVTDTGRYLCMATNAAGTDRRRIDLQVHVPPSIAPGPTNMTVIVNVQTTLACEATGIPKPSINWRKNGHLLNVDQNQNSYRLLSSGSLVIISPSVDDTATYECTVTNGAGDDKRTVDLTVQVPPSIADEPTDFLVTKHAPAVITCTASGVPFPSIHWTKNGIRLLPRGDGYRILSSGAIEILATQLNHAGRYTCVARNAAGSAHRHVTLHVHEPPVIQPQPSELHVILNNPILLPCEATGTPSPFITWQKEGINVNTSGRNHAVLPSGGLQISRAVREDAGTYMCVAQNPAGTALGKIKLNVQVPPVISPHLKEYVIAVDKPITLSCEADGLPPPDITWHKDGRAIVESIRQRVLSSGSLQIAFVQPGDAGHYTCMAANVAGSSSTSTKLTVHVPPRIRSTEGHYTVNENSQAILPCVADGIPTPAINWKKDNVLLANLLGKYTAEPYGELILENVVLEDSGFYTCVANNAAGEDTHTVSLTVHVLPTFTELPGDVSLNKGEQLRLSCKATGIPLPKLTWTFNNNIIPAHFDSVNGHSELVIERVSKEDSGTYVCTAENSVGFVKATGFVYVKEPPVFKGDYPSNWIEPLGGNAILNCEVKGDPTPTIQWNRKGVDIEISHRIRQLGNGSLAIYGTVNEDAGDYTCVATNEAGVVERSMSLTLQSPPIITLEPVETVINAGGKIILNCQATGEPQPTITWSRQGHSISWDDRVNVLSNNSLYIADAQKEDTSEFECVARNLMGSVLVRVPVIVQVHGGFSQWSAWRACSVTCGKGIQKRSRLCNQPLPANGGKPCQGSDLEMRNCQNKPCPVDGSWSEWSLWEECTRSCGRGNQTRTRTCNNPSVQHGGRPCEGNAVEIIMCNIRPCPVHGAWSAWQPWGTCSESCGKGTQTRARLCNNPPPAFGGSYCDGAETQMQVCNERNCPIHGKWATWASWSACSVSCGGGARQRTRGCSDPVPQYGGRKCEGSDVQSDFCNSDPCPTHGNWSPWSGWGTCSRTCNGGQMRRYRTCDNPPPSNGGRACGGPDSQIQRCNTDMCPVDGSWGSWHSWSQCSASCGGGEKTRKRLCDHPVPVKGGRPCPGDTTQVTRCNVQACPGGPQRARGSVIGNINDVEFGIAFLNATITDSPNSDTRIIRAKITNVPRSLGSAMRKIVSILNPIYWTTAKEIGEAVNGFTLTNAVFKRETQVEFATGEILQMSHIARGLDSDGSLLLDIVVSGYVLQLQSPAEVTVKDYTEDYIQTGPGQLYAYSTRLFTIDGISIPYTWNHTVFYDQAQGRMPFLVETLHASSVESDYNQIEETLGFKIHASISKGDRSNQCPSGFTLDSVGPFCADEDECAAGNPCSHSCHNAMGTYYCSCPKGLTIAADGRTCQDIDECALGRHTCHAGQDCDNTIGSYRCVVRCGSGFRRTSDGLSCQDINECQESSPCHQRCFNAIGSFHCGCEPGYQLKGRKCMDVNECRQNVCRPDQHCKNTRGGYKCIDLCPNGMTKAENGTCIDIDECKDGTHQCRYNQICENTRSSYRCVCPRGYRSQGVGRPCMDIDECEQVPKPCAHQCSNTPGSFKCICPPGQHLLGDGKSCAGLERLPNYGTQYSSYNLARFSPVRNNYQPQQHYRQYSHLYSSYSEYRNSRTSLSRTRRTIRKTCPEGSEASHDTCVDIDECENTDACQHECKNTFGSYQCICPPGYQLTHNGKTCQDIDECLEQNVHCGPNRMCFNMRGSYQCIDTPCPPNYQRDPVSGFCLKNCPPNDLECALSPYALEYKLVSLPFGIATNQDLIRLVAYTQDGVMHPRTTFLMVDEEQTVPFALRDENLKGVVYTTRPLREAETYRMRVRASSYSANGTIEYQTTFIVYIAVSAYPY

SEQ ID NO: 6362 - protein, 473 aa, Homo sapiens
MRAGPGPTVTLALVLAVAWAMELKPTAPPIFTGRPFVVAWDVPTQDCGPRLKVPLDLNAFDVQASPNEGFVNQNITIFYRDRLGLYPRFDSAGRSVHGGVPQNVSLWAHRKMLQKRVEHYIRTQESAGLAVIDWEDWRPVWVRNWQDKDVYRRLSRQLVASRHPDWPPDRIVKQAQYEFEFAAQQFMLETLRYVKAVRPRHLWGFYLFPDCYNHDYVQNWESYTGRCPDVEVARNDQLAWLWAESTALFPSVYLDETLASSRHGRNFVSFRVQEALRVARTHHANHALPVYVFTRPTYSRRLTGLSEMDLISTIGESAALGAAGVILWGDAGYTTSTETCQYLKDYLTRLLVPYVVNVSWATQYCSRAQCHGHGRCVRRNPSASTFLHLSTNSFRLVPGHAPGEPQLRPVGELSWADIDHLQTHFRCQCYLGWSGEQCQWDHRQAAGGASEAWAGSHLTSLLALAALAFTWTL

SEQ ID NO: 6363 - protein, 1691 aa, Homo sapiens
MASWTSPWWVLIGMVFMHSPLPQTTAEKSPGAYFLPEFALSPQGSFLEDTTGEQFLTYRYDDQTSRNTRSDEDKDGNWDAWGDWSDCSRTCGGGASYSLRRCLTGRNCEGQNIRYKTCSNHDCPPDAEDFRAQQCSAYNDVQYQGHYYEWLPRYNDPAAPCALKCHAQGQNLVVELAPKVLDGTRCNTDSLDMCISGICQAVGCDRQLGSNAKEDNCGVCAGDGSTCRLVRGQSKSHVSPEKREENVIAVPLGSRSVRITVKGPAHLFIESKTLQGSKGEHSFNSPGVFLVENTTVEFQRGSERQTFKIPGPLMADFIFKTRYTAAKDSVVQFFFYQPISHQWRQTDFFPCTVTCGGGYQLNSAECVDIRLKRVVPDHYCHYYPENVKPKPKLKECSMDPCPSSDGFKEIMPYDHFQPLPRWEHNPWTACSVSCGGGIQRRSFVCVEESMHGEILQVEEWKCMYAPKPKVMQTCNLFDCPKWIAMEWSQCTVTCGRGLRYRVVLCINHRGEHVGGCNPQLKLHIKEECVIPIPCYKPKEKSPVEAKLPWLKQAQELEETRIATEEPTFIPEPWSACSTTCGPGVQVREVKCRVLLTFTQTETELPEEECEGPKLPTERPCLLEACDESPASRELDIPLPEDSETTYDWEYAGFTPCTATCVGGHQEAIAVCLHIQTQQTVNDSLCDMVHRPPAMSQACNTEPCPPRWHVGSWGPCSATCGVGIQTRDVYCLHPGETPAPPEECRDEKPHALQACNQFDCPPGWHIEEWQQCSRTCGGGTQNRRVTCRQLLTDGSFLNLSDELCQGPKASSHKSCARTDCPPHLAVGDWSKCSVSCGVGIQRRKQVCQRLAAKGRRIPLSEMMCRDLPGLPLVRSCQMPECSKIKSEMKTKLGEQGPQILSVQRVYIQTREEKRINLTIGSRAYLLPNTSVIIKCPVRRFQKSLIQWEKDGRCLQNSKRLGITKSGSLKIHGLAAPDIGVYRCIAGSAQETVVLKLIGTDNRLIARPALREPMREYPGMDHSEANSLGVTWHKMRQMWNNKNDLYLDDDHISNQPFLRALLGHCSNSAGSTNSWELKNKQFEAAVKQGAYSMDTAQFDELIRNMSQLMETGEVSDDLASQLIYQLVAELAKAQPTHMQWRGIQEETPPAAQLRGETGSVSQSSHAKNSGKLTFKPKGPVLMRQSQPPSISFNKTINSRIGNTVYITKRTEVINILCDLITPSEATYTWTKDGTLLQPSVKIILDGTGKIQIQNPTRKEQGIYECSVANHLGSDVESSSVLYAEAPVILSVERNITKPEHNHLSVVVGGIVEAALGANVTIRCPVKGVPQPNITWLKRGGSLSGNVSLLFNGSLLLQNVSLENEGTYVCIATNALGKAVATSVLHLLERRWPESRIVFLQGHKKYILQATNTRTNSNDPTGEPPPQEPFWEPGNWSHCSATCGHLGARIQRPQCVMANGQEVSEALCDHLQKPLAGFEPCNIRDCPARWFTSVWSQCSVSCGEGYHSRQVTCKRTKANGTVQVVSPRACAPKDRPLGRKPCFGHPCVQWEPGNRCPGRCMGRAVRMQQRHTACQHNSSDSNCDDRKRPTLRRNCTSGACDVCWHTGPWKPCTAACGRGFQSRKVDCIHTRSCKPVAKRHCVQKKKPISWRHCLGPSCDRDCTDTTHYCMFVKHLNLCSLDRYKQRCCQSCQEG

SEQ ID NO: 6364 - protein, 866 aa, Homo sapiens
MFSMRIVCLVLSVVGTAWTADSGEGDFLAEGGGVRGPRVVERHQSACKDSDWPFCSDEDWNYKCPSGCRMKGLIDEVNQDFTNRINKLKNSLFEYQKNNKDSHSLTTNIMEILRGDFSSANNRDNTYNRVSEDLRSRIEVLKRKVIEKVQHIQLLQKNVRAQLVDMKRLEVDIDIKIRSCRGSCSRALAREVDLKDYEDQQKQLEQVIAKDLLPSRDRQHLPLIKMKPVPDLVPGNFKSQLQKVPPEWKALTDMPQMRMELERPGGNEITRGGSTSYGTGSETESPRNPSSAGSWNSGSSGPGSTGNRNPGSSGTGGTATWKPGSSGPGSTGSWNSGSSGTGSTGNQNPGSPRPGSTGTWNPGSSERGSAGHWTSESSVSGSTGQWHSESGSFRPDSPGSGNARPNNPDWGTFEEVSGNVSPGTRREYHTEKLVTSKGDKELRTGKEKVTSGSTTTTRRSCSKTVTKTVIGPDGHKEVTKEVVTSEDGSDCPEAMDLGTLSGIGTLDGFRHRHPDEAAFFDTASTGKTFPGFFSPMLGEFVSETESRGSESGIFTNTKESSSHHPGIAEFPSRGKSSSYSKQFTSSTSYNRGDSTFESKSYKMADEAGSEADHEGTHSTKRGHAKSRPVRDCDDVLQTHPSGTQSGIFNIKLPGSSKIFSVYCDQETSLGGWLLIQQRMDGSLNFNRTWQDYKRGFGSLNDEGEGEFWLGNDYLHLLTQRGSVLRVELEDWAGNEAYAEYHFRVGSEAEGYALQVSSYEGTAGDALIEGSVEEGAEYTSHNNMQFSTFDRDADQWEENCAEVYGGGWWYNNCQAANLNGIYYPGGSYDPRNNSPYEIENGVVWVSFRGADYSLRAVRMKIRPLVTQ

SEQ ID NO: 6365 - protein, 346 aa, Homo sapiens
MLKKPLSAVTWLCIFIVAFVSHPAWLQKLSKHKTPAQPQLKAANCCEEVKELKAQVANLSSLLSELNKKQERDWVSVVMQVMELESNSKRMESRLTDAESKYSEMNNQIDIMQLQAAQTVTQTSADAIYDCSSLYQKNYRISGVYKLPPDDFLGSPELEVFCDMETSGGGWTIIQRRKSGLVSFYRDWKQYKQGFGSIRGDFWLGNEHIHRLSRQPTRLRVEMEDWEGNLRYAEYSHFVLGNELNSYRLFLGNYTGNVGNDALQYHNNTAFSTKDKDNDNCLDKCAQLRKGGYWYNCCTDSNLNGVYYRLGEHNKHLDGITWYGWHGSTYSLKRVEMKIRPEDFKP

SEQ ID NO: 6366 - protein, 1390 aa, Homo sapiens [sequence omitted]

SEQ ID NO: 6367 - protein, 1408 aa, Homo sapiens
MKAPAVLAPGILVLLFTLVQRSNGECKEALAKSEMNVNMKYQLPNFTAETPIQNVILHEHHIFLGATNYIYVLNEEDLQKVAEYKTGPVLEHPDCFPCQDCSSKANLSGGVWKDNINMALVVDTYYDDQLISCGSVNRGTCQRHVFPHNHTADIQSEVHCIFSPQIEEPSQCPDCVVSALGAKVLSSVKDRFINFFVGNTINSSYFPDHPLHSISVRRLKETKDGFMFLTDQSYIDVLPEFRDSYPIKYVHAFESNNFIYFLTVQRETLDAQTFHTRIIRFCSINSGLHSYMEMPLECILTEKRKKRSTKKEVFNILQAAYVSKPGAQLARQIGASLNDDILFGVFAQSKPDSAEPMDRSAMCAFPIKYVNDFFNKIVNKNNVRCLQHFYGPNHEHCFNRTLLRNSSGCEARRDEYRTEFTTALQRVDLFMGQFSEVLLTSISTFIKGDLTIANLGTSEGRFMQVVVSRSGPSTPHVNFLLDSHPVSPEVIVEHTLNQNGYTLVITGKKITKIPLNGLGCRHFQSCSQCLSAPPFVQCGWCHDKCVRSEECLSGTWTQQICLPAIYKVFPNSAPLEGGTRLTICGWDFGFRRNNKFDLKKTRVLLGNESCTLTLSESTMNTLKCTVGPAMNKHFNMSIIISNGHGTTQYSTFSYVDPVITSISPKYGPMAGGTLLTLTGNYLNSGNSRHISIGGKTCTLKSVSNSILECYTPAQTISTEFAVKLKIDLANRETSIFSYREDPIVYEIHPTKSFISTWWKEPLNIVSFLFCFASGGSTITGVGKNLNSVSVPRMVINVHEAGRNFTVACQHRSNSEIICCTTPSLQQLNLQLPLKTKAFFMLDGILSKYFDLIYVHNPVFKPFEKPVMISMGNENVLEIKGNDIDPEAVKGEVLKVGNKSCENIHLHSEAVLCTVPNDLLKLNSELNIEWKQAISSTVLGKVIVQPDQNFTGLIAGVVSISTALLLLLGFFLWLKKRKQIKDLGSELVRYDARVHTPHLDRLVSARSVSPTTEMVSNESVDYRATFPEDQFPNSSQNGSCRQVQYPLTDMSPILTSGDSDISSPLLQNTVHIDLSALNPELVQAVQHVVIGPSSLIVHFNEVIGRGHFGCVYHGTLLDNDGKKIHCAVKSLNRITDIGEVSQFLTEGIIMKDFSHPNVLSLLGICLRSEGSPLVVLPYMKHGDLRNFIRNETHNPTVKDLIGFGLQVAKGMKYLASKKFVHRDLAARNCMLDEKFTVKVADFGLARDMYDKEYYSVHNKTGAKLPVKWMALESLQTQKFTTKSDVWSFGVVLWELMTRGAPPYPDVNTFDITVYLLQGRRLLQPEYCPDPLYEVMLKCWHPKAEMRPSFSELVSRISAIFSTFIGEHYVHVNATYVNVKCVAPYPSLLSSEDNADDEVDTRPASFWETS

SEQ ID NO: 6368 - protein, 1523 aa, Homo sapiens
MAPGWAGVGAAVRARLALALALASVLSGPPAVACPTKCTCSAASVDCHGLGLRAVPRGIPRNAERLDLDRNNITRITKMDFAGLKNLRVLHLEDNQVSVIERGAFQDLKQLERLRLNKNKLQVLPELLFQSTPKLTRLDLSENQIQGIPRKAFRGITDVKNLQLDNNHISCIEDGAFRALRDLEILTLNNNNISRILVTSFNHMPKIRTLRLHSNHLYCDCHLAWLSDWLRQRRTVGQFTLCMAPVHLRGFNVADVQKKEYVCPAPHSEPPSCNANSISCPSPCTCSNNIVDCRGKGLMEIPANLPEGIVEIRLEQNSIKAIPAGAFTQYKKLKRIDISKNQISDIAPDAFQGLKSLTSLVLYGNKITEIAKGLFDGLVSLQLLLLNANKINCLRVNTFQDLQNLNLLSLYDNKLQTISKGLFAPLQSIQTLHLAQNPFVCDCHLKWLADYLQDNPIETSGARCSSPRRLANKRISQIKSKKFRCSGSEDYRSRFSSECFMDLVCPEKCRCEGTIVDCSNQKLVRIPSHLPEYVTDLRLNDNEVSVLEATGIFKKLPNLRKINLSNNKIKEVREGAFDGAASVQELMLTGNQLETVHGRVFRGLSGLKTLMLRSNLIGCVSNDTFAGLSSVRLLSLYDNRITTITPGAFTTLVSLSTINLLSNPFNCNCHLAWLGKWLRKRRIVSGNPRCQKPFFLKEIPIQDVAIQDFTCDGNEESSCQLSPRCPEQCTCMETVVRCSNKGLRALPRGMPKDVTELYLEGNHLTAVPRELSALRHLTLIDLSNNSISMLTNYTFSNMSHLSTLILSYNRLRCIPVHAFNGLRSLRVLTLHGNDISSVPEGSFNDLTSLSHLALGTNPLHCDCSLRWLSEWVKAGYKEPGIARCSSPEPMADRLLLTTPTHRFQCKGPVDINIVAKCNACLSSPCKNNGTCTQDPVELYRCACPYSYKGKDCTVPINTCIQNPCQHGGTCHLSDSHKDGFSCSCPLGFEGQRCEINPDDCEDNDCENNATCVDGINNYVCICPPNYTGELCDEVIDHCVPELNLCQHEAKCIPLDKGFSCECVPGYSGKLCETDNDDCVAHKCRHGAQCVDTINGYTCTCPQGFSGPFCEHPPPMVLLQTSPCDQYECQNGAQCIVVQQEPTCRCPPGFAGPRCEKLITVNFVGKDSYVELASAKVRPQANISLQVATDKDNGILLYKGDNDPLALELYQGHVRLVYDSLSSPPTTVYSVETVNDGQFHSVELVTLNQTLNLVVDKGTPKSLGKLQKQPAVGINSPLYLGGIPTSTGLSALRQGTDRPLGGFHGCIHEVRINNELQDFKALPPQSLGVSPGCKSCTVCKHGLCRSVEKDSVVCECRPGWTGPLCDQEARDPCLGHRCHHGKCVATGTSYMCKCAEGYGGDLCDNKNDSANACSAFKCHHGQCHISDQGEPYCLCQPGFSGEHCQQENPCLGQVVREVIRRQKGYASCATASKVPIMECRGGCGPQCCQPTRSKRRKYVFQCTDGSSFVEEVERHLECGCLACS

SEQ ID NO: 6369 - protein, 850 aa, Homo sapiens
EGAFDGAASVQELMLTGNQLETVHGRVFRGLSGLKTLMLRSNLIGCVSNDTFAGLSSVRLLSLYDNRITTITPGAFTTLVSLSTINLLSNPFNCNCHLAWLGKWLRKRRIVSGNPRCQKPFFLKEIPIQDVAIQDFTCDGNEESSCQLSPRCPEQCTCMETVVRCSNKGLRALPRGMPKDVTELYLEGNHLTAVPRELSALRHLTLIDLSNNSISMLTNYTFSNMSHLSTLILSYNRLRCIPVHAFNGLRSLRVLTLHGNDISSVPEGSFNDLTSLSHLALGTNPLHCDCSLRWLSEWVKAGYKEPGIARCSSPEPMADRLLLTTPTHRFQCKGPVDINIVAKCNACLSSPCKNNGTCTQDPVELYRCACPYSYKGKDCTVPINTCIQNPCQHGGTCHLSDSHKDGFSCSCPLGFEGQRCEINPDDCEDNDCENNATCVDGINNYVCICPPNYTGELCDEVIDHCVPELNLCQHEAKCIPLDKGFSCECVPGYSGKLCETDNDDCVAHKCRHGAQCVDTINGYTCTCPQGFSGPFCEHPPPMVYDSLSSPPTTVYSVETVNDGQFHSVELVTLNQTLNLVVDKGTPKSLGKLQKQPAVGINSPLYLGGIPTSTGLSALRQGTDRPLGGFHGCIHEVRINNELQDFKALPPQSLGVSPGCKSCTVCKHGLCRSVEKDSVVCECRPGWTGPLCDQEARDPCLGHRCHHGKCVATGTSYMCKCAEGYGGDLCDNKNDSANACSAFKCHHGQCHISDQGEPYCLCQPGFSGEHCQQENPCLGQVVREVIRRQKGYASCATASKVPIMECRGGCGPQCCQPTRSKRRKYVFQCTDGSSFVEEVERHLECGCLACS

SEQ ID NO: 6370 - protein, 810 aa, Homo sapiens
MEHKEVVLLLLLFLKSGQGEPLDDYVNTQGASLFSVTKKQLGAGSIEECAAKCEEDEEFTCRAFQYHSKEQQCVIMAENRKSSIIIRMRDVVLFEKKVYLSECKTGNGKNYRGTMSKTKNGITCQKWSSTSPHRPRFSPATHPSEGLEENYCRNPDNDPQGPWCYTTDPEKRYDYCDILECEEECMHCSGENYDGKISKTMSGLECQAWDSQSPHAHGYIPSKFPNKNLKKNYCRNPDRELRPWCFTTDPNKRWELCDIPRCTTPPPSSGPTYQCLKGTGENYRGNVAVTVSGHTCQHWSAQTPHTHNRTPENFPCKNLDENYCRNPDGKRAPWCHTTNSQVRWEYCKIPSCDSSPVSTEQLAPTAPPELTPVVQDCYHGDGQSYRGTSSTTTTGKKCQSWSSMTPHRHQKTPENYPNAGLTMNYCRNPDADKGPWCFTTDPSVRWEYCNLKKCSGTEASVVAPPPVVLLPDVETPSEEDCMFGNGKGYRGKRATTVTGTPCQDWAAQEPHRHSIFTPETNPRAGLEKNYCRNPDGDVGGPWCYTTNPRKLYDYCDVPQCAAPSFDCGKPQVEPKKCPGRVVGGCVAHPHSWPWQVSLRTRFGMHFCGGTLISPEWVLTAAHCLEKSPRPSSYKVILGAHQEVNLEPHVQEIEVSRLFLEPTRKDIALLKLSSPAVITDKVIPACLPSPNYVVADRTECFITGWGETQGTFGAGLLKEAQLPVIENKVCNRYEFLNGRVQSTELCAGHLAGGTDSCQGDSGGPLVCFEKDKYILQGVTSWGLGCARPNKPGVYVRVSRFVTWIEGVMRNN

SEQ ID NO: 6371 - protein, 732 aa, Homo sapiens
MMWTWALWMLPSLCKFSLAALPAKPENISCVYYYRKNLTCTWSPGKETSYTQYTVKRTYAFGEKHDNCTTNSSTSENRASCSFFLPRITIPDNYTIEVEAENGDGVIKSHMTYWRLENIAKTEPPKIFRVKPVLGIKRMIQIEWIKPELAPVSSDLKYTLRFRTVNSTSWMEVNFAKNRKDKNQTYNLTGLQPFTEYVIALRCAVKESKFWSDWSQEKMGMTEEEAPCGLELWRVLKPAEADGRRPVRLLWKKARGAPVLEKTLGYNIWYYPESNTNLTETMNTTNQQLELHLGGESFWVSMISYNSLGKSPVATLRIPAIQEKSFQCIEVMQACVAEDQLVVKWQSSALDVNTWMIEWFPDVDSEPTTLSWESVSQATNWTIQQDKLKPFWCYNISVYPMLHDKVGEPYSIQAYAKEGVPSEGPETKVENIGVKTVTITWKEIPKSERKGIICNYTIFYQAEGGKGFSKTVNSSILQYGLESLKRKTSYIVQVMASTSAGGTNGTSINFKTLSFSVFEIILITSLIGGGLLILIILTVAYGLKKPNKLTHLCWPTVPNPAESSIATWHGDDFKDKLNLKESDDSVNTEDRILKPCSTPSDKLVIDKLVVNFGNVLQEIFTDEARTGQENNLGGEKNGYVTCPFRPDCPLGKSFEELPVSPEIPPRKSQYLRSRMPEGTRPEAKEQLLFSGQSLVPDHLCEEGAPNPYLKNSVTAREFLVSEKLPEHTKGEV

SEQ ID NO: 6372 - protein, 1103 aa, Homo sapiens
MTACARRAGGLPDPGLCGPAWWAPSLPRLPRALPRLPLLLLLLLLQPPALSAVFTVGVLGPWACDPIFSRARPDLAARLAAARLNRDPGLAGGPRFEVALLPEPCRTPGSLGAVSSALARVSGLVGPVNPAACRPAELLAEEAGIALVPWGCPWTQAEGTTAPAVTPAADALYALLRAFGWARVALVTAPQDLWVEAGRSLSTALRARGLPVASVTSMEPLDLSGAREALRKVRDGPRVTAVIMVMHSVLLGGEEQRYLLEAAEELGLTDGSLVFLPFDTIHYALSPGPEALAALANSSQLRRAHDAVLTLTRHCPSEGSVLDSLRRAQERRELPSDLNLQQVSPLFGTIYDAVFLLARGVAEARAAAGGRWVSGAAVARHIRDAQVPGFCGDLGGDEEPPFVLLDTDAAGDRLFATYMLDPARGSFLSAGTRMHFPRGGSAPGPDPSCWFDPNNICGGGLEPGLVFLGFLLVVGMGLAGAFLAHYVRHRLLHMQMVSGPNKIILTVDDITFLHPHGGTSRKVAQGSRSSLGARSMSDIRSGPSQHLDSPNIGVYEGDRVWLKKFPGDQHIAIRPATKTAFSKLQELRHENVALYLGLFLARGAEGPAALWEGNLAVVSEHCTRGSLQDLLAQREIKLDWMFKSSLLLDLIKGIRYLHHRGVAHGRLKSRNCIVDGRFVLKITDHGHGRLLEAQKVLPEPPRAEDQLWTAPELLRDPALERRGTLAGDVFSLAIIMQEVVCRSAPYAMLELTPEEVVQRVRSPPPLCRPLVSMDQAPVECILLMKQCWAEQPELRPSMDHTFDLFKNINKGRKTNIIDSMLRMLEQYSSNLEDLIRERTEELELEKQKTDRLLTQMLPPSVAEALKTGTPVEPEYFEQVTLYFSDIVGFTTISAMSEPIEVVDLLNDLYTLFDAIIGSHDVYKVETIGDAYMVASGLPQRNGQRHAAEIANMSLDILSAVGTFRMRHMPEVPVRIRIGLHSGPCVAGVVGLTMPRYCLFGDTVNTASRMESTGLPYRIHVNLSTVGILRALDSGYQVELRGRTELKGKGAEDTFWLVGRRGFNKPIPKPPDLQPGSSNHGISLQEIPPERRRKLEKARPGQFS

SEQ ID NO: 6373 - protein, 1416 aa, Homo sapiens
MKSLKSRLRRQDVPGPASSGAAAASAHAADWNKYDDRLMKAAERGDVEKVTSILAKKGVNPGKLDVEGRSVFHVVTSKGNLECLNAILIHGVDITTSDTAGRNALHLAAKYGHALCLQKLLQYNCPTEHADLQGRTALQKKAMADCPSSIQLLCDHGASVNAKDVKGRTPLVLATQMSRPTICQLLIDRGADVNSRDKQNRTALMLGCEYGCRDAVEVLIKNGADISLLDALGHDSSYYARIGDNLDILTLLKTASENTNKGRELWKKGPSLQQRNLTHMQDEVNVKSHQREHQNIQDLEIENEDLKERLRKIQQEQRILLDKVNGLQLQLNEEVMVADDLESEREKLKSLLAAKEKQHEESLRTIEALKNRFKYFESDHLGSGSHFSNRKEDMLLKQGQMYMADSQCTSPGIPAHMQSRSMLRPLELSLPSQTSYSENEILKKELEAMRTFCESAKQDRLKLQNELAHKVAECKALALECERVKEDSDEQIKQLEDALKDVQKRMYESEGKVKQMQTHFLALKEHLTSEAASGNHRLTEELKDQLKDLKVKYEGASAEVGKLRNQIKQNEMIVEEFKRDEGKLIEENKRLQKELSMCEMEREKKGRKVTEMEGQAKELSAKLALSIPAEKFENMKSSLSNEVNEKAKKLVEMEREHEKSLSEIRQLKRELENVKAKLAQHVKPEEHEQVKSRLEQKSGELGKKITELTLKNQTLQKEIEKVYLDNKLLKEQAHNLTIEMKNHYVPLKVSEDMKKSHDAIIDDLNRKLLDVTQKYTEKKLEMEKLLLENDSLSKDVSRLETVFVPPEKHEKEIIALKSNIVELKKQLSELKKKCGEDQEKIHALTSENTNLKKMMSNQYVPVKTHEEVKMTLNDTLAKTNRELLDVKKKFEDINQEFVKIKDKNEILKRNLENTQNQIKAEYISLAEHEAKMSSLSQSMRKVQDSNAEILANYRKGQEEIVTLHAEIKAQKKELDTIQECIKVKYAPIVSFEECERKFKATEKELKDQLSEQTQKYSVSEEEVKKNKQENDKLKKEIFTLQKDLRDKTVLIEKSHEMERALSRKTDELNKQLKDLSQKYTEVKNVKEKLVEENAKQTSEILAVQNLLQKQHVPLEQVEALKKSLNGTIENLKEELKSMQRCYEKEQQTVTKLHQLLENQKNSSVPLAEHLQIKEAFEKEVGIIKASLREKEEESQNKMEEVSKLQSEVQNTKQALKKLETREVVDLSKYKATKSDLETQISSLNEKLANLNRKYEEVCEEVLHAKKKEISAKDEKELLHFSIEQEIKDQKERCDKSLTTITELQRRIQESAKQIEAKDNKITELLNDVERLKQALNGLSQLTYTSGNPTKRQSQLIDTLQHQVKSLEQQLADADRQHQEVIAIYRTHLLSAAQGHMDEDVQEALLQIIQMRQGLVC

SEQ ID NO: 6374 - protein, 784 aa, Homo sapiens
MPHTLWMVWVLGVIISLSKEESSNQASLSCDRNGICKGSSGSLNSIPSGLTEAVKSLDLSNNRITYISNSDLQRCVNLQALVLTSNGINTIEEDSFSSLGSLEHLDLSYNYLSNLSSSWFKPLSSLTFLNLLGNPYKTLGETSLFSHLTKLQILRVGNMDTFTKIQRKDFAGLTFLEELEIDASDLQSYEPKSLKSIQNVSHLILHMKQHILLLEIFVDVTSSVECLELRDTDLDTFHFSELSTGETNSLIKKFTFRNVKITDESLFQVMKLLNQISGLLELEFDDCTLNGVGNFRASDNDRVIDPGKVETLTIRRLHIPRFYLFYDLSTLYSLTERVKRITVENSKVFLVPCLLSQHLKSLEYLDLSENLMVEEYLKNSACEDAWPSLQTLILRQNHLASLEKTGETLLTLKNLTNIDISKNSFHSMPETCQWPEKMKYLNLSSTRIHSVTGCIPKTLEILDVSNNNLNLFSLNLPQLKELYISRNKLMTLPDASLLPMLLVLKISRNAITTFSKEQLDSFHTLKTLEAGGNNFICSCEFLSFTQEQQALAKVLIDWPANYLCDSPSHVRGQQVQDVRLSVSECHRTALVSGMCCALFLLILLTGVLCHRFHGLWYMKMMWAWLQAKRKPRKAPSRNICYDAFVSYSERDAYWVENLMVQELENFNPPFKLCLHKRDFIPGKWIIDNIIDSIEKSHKTVFVLSENFVKSEWCKYELDFSHFRLFDENNDAAILILLEPIEKKAIPQRFCKLRKIMNTKTYLEWPMDEAQREGFWVNLRAAIKS

SEQ ID NO: 6375 - protein, 348 aa, Homo sapiens [sequence omitted]

SEQ ID NO: 6376 - protein, 304 aa, Homo sapiens [sequence omitted]

SEQ ID NO: 6377 - protein, 1066 aa, Homo sapiens
MARQPPPPWVHAAFLLCLLSLGGAIEIPMDPSIQNELTQPPTITKQSAKDHIVDPRDNILIECEAKGNPAPSFHWTRNSRFFNIAKDPRVSMRRRSGTLVIDFRSGGRPEEYEGEYQCFARNKFGTALSNRIRLQVSKSPLWPKENLDPVVVQEGAPLTLQCNPPPGLPSPVIFWMSSSMEPITQDKRVSQGHNGDLYFSNVMLQDMQTDYSCNARFHFTHTIQQKNPFTLKVLTTRGVAERTPSFMYPQGTASSQMVLRGMDLLLECIASGVPTPDIAWYKKGGDLPSDKAKFENFNKALRITNVSEEDSGEYFCLASNKMGSIRHTISVRVKAAPYWLDEPKNLILAPGEDGRLVCRANGNPKPTVQWMVNGEPLQSAPPNPNREVAGDTIIFRDTQISSRAVYQCNTSNEHGYLLANAFVSVLDVPPRMLSPRNQLIRVILYNRTRLDCPFFGSPIPTLRWFKNGQGSNLDGGNYHVYENGSLEIKMIRKEDQGIYTCVATNILGKAENQVRLEVKDPTRIYRMPEDQVARRGTTVQLECRVKHDPSLKLTVSWLKDDEPLYIGNRMKKEDDSLTIFGVAERDQGSYTCVASTELDQDLAKAYLTVLADQATPTNRLAALPKGRPDRPRDLELTDLAERSVRLTWIPGDANNSPITDYVVQFEEDQFQPGVWHDHPKYPGSVNSAVLRLSPYVNYQFRVIAINEVGSSHPSLPSERYRTSGAPPESNPGDVKGEGTRKNNMEITWTPMNATSAFGPNLRYIVKWRRRETREAWNNVTVWGSRYVVGQTPVYVPYEIRVQAENDFGKGPEPESVIGYSGEDLPSAPRRFRVRQPNLETINLEWDHPEHPNGIMIGYTLKYVAFNGTKVGKQIVENFSPNQTKFTVQRTDPVSRYRFTLSARTQVGSGEAVTEESPAPPNEAYTNNQADIATQGWFIGLMCAIALLVLILLIVCFIKRSRGGKYPVREKKDVPLGPEDPKEEDGSFDYSDEDNKPLQGSQTSLDGTIKQQESDDSLVDYGEGGEGQFNEDGSFIGQYTVKKDKEETEGNESSEATSPVNAIYSLA

SEQ ID NO: 6378 - protein, 1240 aa, Homo sapiens
MARQPPPPWVHAAFLLCLLSLGGAIEIPMDPSIQNELTQPPTITKQSAKDHIVDPRDNILIECEAKGNPAPSFHWTRNSRFFNIAKDPRVSMRRRSGTLVIDFRSGGRPEEYEGEYQCFARNKFGTALSNRIRLQVSKSPLWPKENLDPVVVQEGAPLTLQCNPPPGLPSPVIFWMSSSMEPITQDKRVSQGHNGDLYFSNVMLQDMQTDYSCNARFHFTHTIQQKNPFTLKVLTTRGVAERTPSFMYPQGTASSQMVLRGMDLLLECIASGVPTPDIAWYKKGGDLPSDKAKFENFNKALRITNVSEEDSGEYFCLASNKMGSIRHTISVRVKAAPYWLDEPKNLILAPGEDGRLVCRANGNPKPTVQWMVNGEPLQSAPPNPNREVAGDTIIFRDTQISSRAVYQCNTSNEHGYLLANAFVSVLDVPPRMLSPRNQLIRVILYNRTRLDCPFFGSPIPTLRWFKNGQGSNLDGGNYHVYENGSLEIKMIRKEDQGIYTCVATNILGKAENQVRLEVKDPTRIYRMPEDQVARRGTTVQLECRVKHDPSLKLTVSWLKDDEPLYIGNRMKKEDDSLTIFGVAERDQGSYTCVASTELDQDLAKAYLTVLADQATPTNRLAALPKGRPDRPRDLELTDLAERSVRLTWIPGDANNSPITDYVVQFEEDQFQPGVWHDHPKYPGSVNSAVLRLSPYVNYQFRVIAINEVGSSHPSLPSERYRTSGAPPESNPGDVKGEGTRKNNMEITWTPMNATSAFGPNLRYIVKWRRRETREAWNNVTVWGSRYVVGQTPVYVPYEIRVQAENDFGKGPEPESVIGYSGEDLPSAPRRFRVRQPNLETINLEWDHPEHPNGIMIGYTLKYVAFNGTKVGKQIVENFSPNQTKFTVQRTDPVSRYRFTLSARTQVGSGEAVTEESPAPPNEATPTAAPPTLPPTTVGATGAVSSTDATAIAATTEATTVPIIPTVAPTTIATTTTVATTTTTTAAATTTTESPPTTTSGTKIHESAPDEQSIWNVTVLPNSKWANITWKHNFGPGTDFVVEYIDSNHTKKTVPVKAQAQPIQLTDLYPGMTYTLRVYSRDNEGISSTVITFMTSTAYTNNQADIATQGWFIGLMCAIALLVLILLIVCFIKRSRGGKYPVREKKDVPLGPEDPKEEDGSFDYSDEDNKPLQGSQTSLDGTIKQQESDDSLVDYGEGGEGQFNEDGSFIGQYTVKKDKEETEGNESSEATSPVNAIYSLA

SEQ ID NO: 6379 - protein, 1071 aa, Homo sapiens
MARQPPPPWVHAAFLLCLLSLGGAIEIPMDPSIQNELTQPPTITKQSAKDHIVDPRDNILIECEAKGNPAPSFHWTRNSRFFNIAKDPRVSMRRRSGTLVIDFRSGGRPEEYEGEYQCFARNKFGTALSNRIRLQVSKSPLWPKENLDPVVVQEGAPLTLQCNPPPGLPSPVIFWMSSSMEPITQDKRVSQGHNGDLYFSNVMLQDMQTDYSCNARFHFTHTIQQKNPFTLKVLTTRGVAERTPSFMYPQGTASSQMVLRGMDLLLECIASGVPTPDIAWYKKGGDLPSDKAKFENFNKALRITNVSEEDSGEYFCLASNKMGSIRHTISVRVKAAPYWLDEPKNLILAPGEDGRLVCRANGNPKPTVQWMVNGEPLQSAPPNPNREVAGDTIIFRDTQISSRAVYQCNTSNEHGYLLANAFVSVLDVPPRMLSPRNQLIRVILYNRTRLDCPFFGSPIPTLRWFKNGQGSNLDGGNYHVYENGSLEIKMIRKEDQGIYTCVATNILGKAENQVRLEVKDPTRIYRMPEDQVARRGTTVQLECRVKHDPSLKLTVSWLKDDEPLYIGNRMKKEDDSLTIFGVAERDQGSYTCVASTELDQDLAKAYLTVLADQATPTNRLAALPKGRPDRPRDLELTDLAERSVRLTWIPGDANNSPITDYVVQFEEDQFQPGVWHDHPKYPGSVNSAVLRLSPYVNYQFRVIAINEVGSSHPSLPSERYRTSGAPPESNPGDVKGEGTRKNNMEITWTPMNATSAFGPNLRYIVKWRRRETREAWNNVTVWGSRYVVGQTPVYVPYEIRVQAENDFGKGPEPESVIGYSGEDLPSAPRRFRVRQPNLETINLEWDHPEHPNGIMIGYTLKYVAFNGTKVGKQIVENFSPNQTKFTVQRTDPVSRYRFTLSARTQVGSGEAVTEESPAPPNEATPTAAYTNNQADIATQGWFIGLMCAIALLVLILLIVCFIKRSRGGKYPVREKKDVPLGPEDPKEEDGSFDYSDEDNKPLQGSQTSLDGTIKQQESDDSLVDYGEGGEGQFNEDGSFIGQYTVKKDKEETEGNESSEATSPVNAIYSLA

SEQ ID NO: 6380 - protein, 796 aa, Homo sapiens
MLRGGRRGQLGWHSWAAGPGSLLAWLILASAGAAPCPDACCPHGSSGLRCTRDGALDSLHHLPGAENLTELYIENQQHLQHLELRDLRGLGELRNLTIVKSGLRFVAPDAFHFTPRLSRLNLSFNALESLSWKTVQGLSLQELVLSGNPLHCSCALRWLQRWEEEGLGGVPEQKLQCHGQGPLAHMPNASCGVPTLKVQVPNASVDVGDDVLLRCQVEGRGLEQAGWILTELEQSATVMKSGGLPSLGLTLANVTSDLNRKNLTCWAENDVGRAEVSVQVNVSFPASVQLHTAVEMHHWCIPFSVDGQPAPSLRWLFNGSVLNETSFIFTEFLEPAANETVRHGCLRLNQPTHVNNGNYTLLAANPFGQASASIMAAFMDNPFEFNPEDPIPVSFSPVDTNSTSGDPVEKKDETPFGVSVAVGLAVFACLFLSTLLLVLNKCGRRNKFGINRPAVLAPEDGLAMSLHFMTLGGSSLSPTEGKGSGLQGHIIENPQYFSDACVHHIKRRDIVLKWELGEGAFGKVFLAECHNLLPEQDKMLVAVKALKEASESARQDFQREAELLTMLQHQHIVRFFGVCTEGRPLLMVFEYMRHGDLNRFLRSHGPDAKLLAGGEDVAPGPLGLGQLLAVASQVAAGMVYLAGLHFVHRDLATRNCLVGQGLVVKIGDFGMSRDIYSTDYYRVGGRTMLPIRWMPPESILYRKFTTESDVWSFGVVLWEIFTYGKQPWYQLSNTEAIDCITQGRELERPRACPPEVYAIMRGCWQREPQQRHSIKDVHARLQALAQAPPVYLDVLG

SEQ ID NO: 6381 - protein, 882 aa, Homo sapiens
MGPWSRSLSALLLLLQVSSWLCQEPEPCHPGFDAESYTFTVPRRHLERGRVLGRVNFEDCTGRQRTAYFSLDTRFKVGTDGVITVKRPLRFHNPQIHFLVYAWDSTYRKFSTKVTLNTVGHHHRPPPHQASVSGIQAELLTFPNSSPGLRRQKRDWVIPPISCPENEKGPFPKNLVQIKSNKDKEGKVFYSITGQGADTPPVGVFIIERETGWLKVTEPLDRERIATYTLFSHAVSSNGNAVEDPMEILITVTDQNDNKPEFTQEVFKGSVMEGALPGTSVMEVTATDADDDVNTYNAAIAYTILSQDPELPDKNMFTINRNTGVISVVTTGLDRESFPTYTLVVQAADLQGEGLSTTATAVITVTDTNDNPPIFNPTTYKGQVPENEANVVITTLKVTDADAPNTPAWEAVYTILNDDGGQFVVTTNPVNNDGILKTAKGLDFEAKQQYILHVAVTNVVPFEVSLTTSTATVTVDVLDVNEAPIFVPPEKRVEVSEDFGVGQEITSYTAQEPDTFMEQKITYRIWRDTANWLEINPDTGAISTRAELDREDFEHVKNSTYTALIIATDNGSPVATGTGTLLLILSDVNDNAPIPEPRTIFFCERNPKPQVINIIDADLPPNTSPFTAELTHGASANWTIQYNDPTQESIILKPKMALEVGDYKINLKLMDNQNKDQVTTLEVSVCDCEGAAGVCRKAQPVEAGLQIPAILGILGGILALLILILLLLLFLRRRAVVKEPLLPPEDDTRDNVYYYDEEGGGEEDQDFDLSQLHRGLDARPEVTRNDVAPTLMSVPRYLPRPANPDEIGNFIDENLKAADTDPTAPPYDSLLVFDYEGSGSEAASLSSLNSSESDKDQDYDYLNEWGNRFKKLADMYGGGEDD

SEQ ID NO: 6382 - protein, 821 aa, Homo sapiens
MGPWSRSLSALLLLLQVSSWLCQEPEPCHPGFDAESYTFTVPRRHLERGRVLGRVNFEDCTGRQRTAYFSLDTRFKVGTDGVITVKRPLRFHNPQIHFLVYAWDSTYRKFSTKVTLNTVGHHHRPPPHQASVSGIQAELLTFPNSSPGLRRQKRDWVIPPISCPENEKGPFPKNLVQIKSNKDKEGKVFYSITGQGADTPPVGVFIIERETGWLKVTEPLDRERIATYTLFSHAVSSNGNAVEDPMEILITVTDQNDNKPEFTQEVFKGSVMEGALPGTSVMEVTATDADDDVNTYNAAIAYTILSQDPELPDKNMFTINRNTGVISVVTTGLDRESFPTYTLVVQAADLQGEGLSTTATAVITVTDTNDNPPIFNPTTGLDFEAKQQYILHVAVTNVVPFEVSLTTSTATVTVDVLDVNEAPIFVPPEKRVEVSEDFGVGQEITSYTAQEPDTFMEQKITYRIWRDTANWLEINPDTGAISTRAELDREDFEHVKNSTYTALIIATDNGSPVATGTGTLLLILSDVNDNAPIPEPRTIFFCERNPKPQVINIIDADLPPNTSPFTAELTHGASANWTIQYNDPTQESIILKPKMALEVGDYKINLKLMDNQNKDQVTTLEVSVCDCEGAAGVCRKAQPVEAGLQIPAILGILGGILALLILILLLLLFLRRRAVVKEPLLPPEDDTRDNVYYYDEEGGGEEDQDFDLSQLHRGLDARPEVTRNDVAPTLMSVPRYLPRPANPDEIGNFIDENLKAADTDPTAPPYDSLLVFDYEGSGSEAASLSSLNSSESDKDQDYDYLNEWGNRFKKLADMYGGGEDD

SEQ ID NO: 6383 - protein, 961 aa, Homo sapiens
MLAPRGAAVLLLHLVLQRWLAAGAQATPQVFDLLPSSSQRLNPGALLPVLTDPALNDLYVISTFKLQTKSSATIFGLYSSTDNSKYFEFTVMGRLSKAILRYLKNDGKVHLVVFNNLQLADGRRHRILLRLSNLQRGAGSLELYLDCIQVDSVHNLPRAFAGPSQKPETIELRTFQRKPQDFLEELKLVVRGSLFQVASLQDCFLQQSEPLAATGTGDFNRQFLGQMTQLNQLLGEVKDLLRQQVKETSFLRNTIAECQACGPLKFQSPTPSTVVAPAPPAPPTRPPRRCDSNPCFRGVQCTDSRDGFQCGPCPEGYTGNGITCIDVDECKYHPCYPGVHCINLSPGFRCDACPVGFTGPMVQGVGISFAKSNKQVCTDIDECRNGACVPNSICVNTLGSYRCGPCKPGYTGDQIRGCKVERNCRNPELNPCSVNAQCIEERQGDVTCVCGVGWAGDGYICGKDVDIDSYPDEELPCSARNCKKDNCKYVPNSGQEDADRDGIGDACDEDADGDGILNEQDNCVLIHNVDQRNSDKDIFGDACDNCLSVLNNDQKDTDGDGRGDACDDDMDGDGIKNILDNCPKFPNRDQRDKDGDGVGDACDSCPDVSNPNQSDVDNDLVGDSCDTNQDSDGDGHQDSTDNCPTVINSAQLDTDKDGIGDECDDDDDNDGIPDLVPPGPDNCRLVPNPAQEDSNSDGVGDICESDFDQDQVIDRIDVCPENAEVTLTDFRAYQTVGLDPEGDAQIDPNWVVLNQGMEIVQTMNSDPGLAVGYTAFNGVDFEGTFHVNTQTDDDYAGFIFGYQDSSSFYVVMWKQTEQTYWQATPFRAVAEPGIQLKAVKSKTGPGEHLRNSLWHTGDTSDQVRLLWKDSRNVGWKDKVSYRWFLQHRPQVGYIRVRFYEGSELVADSGVTIDTTMRGGRLGVFCFSQENIIWSNLKYRCNDTIPEDFQEFQTQNFDRFDN

SEQ ID NO: 6384 - protein, 961 aa, Homo sapiens
MLAPRGAAVLLLHLVLQRWLAAGAQATPQVFDLLPSSSQRLNPGALLPVLTDPALNDLYVISTFKLQTKSSATIFGLYSSTDNSKYFEFTVMGRLNKAILRYLKNDGKVHLVVFNNLQLADGRRHRILLRLSNLQRGAGSLELYLDCIQVDSVHNLPRAFAGPSQKPETIELRTFQRKPQDFLEELKLVVRGSLFQVASLQDCFLQQSEPLAATGTGDFNRQFLGQMTQLNQLLGEVKDLLRQQVKETSFLRNTIAECQACGPLKFQSPTPSTVVPPAPPAPPTRPPRRCDSNPCFRGVQCTDSRDGFQCGPCPEGYTGNGITCIDVDECKYHPCYPGVHCINLSPGFRCDACPVGFTGPMVQGVGISFAKSNKQVCTDIDECRNGACVPNSICVNTLGSYRCGPCKPGYTGDQIRGCKAERNCRNPELNPCSVNAQCIEERQGDVTCVCGVGWAGDGYICGKDVDIDSYPDEELPCSARNCKKDNCKYVPNSGQEDADRDGIGDACDEDADGDGILNEQDNCVLIHNVDQRNSDKDIFGDACDNCLSVLNNDQKDTDGDGRGDACDDDMDGDGIKNILDNCPKFPNRDQRDKDGDGVGDACDSCPDVSNPNQSDVDNDLVGDSCDTNQDSDGDGHQDSTDNCPTVINSAQLDTDKDGIGDECDDDDDNDGIPDLVPPGPDNCRLVPNPAQEDSNSDGVGDICESDFDQDQVIDRIDVCPENAEVTLTDFRAYQTVVLDPEGDAQIDPNWVVLNQGMEIVQTMNSDPGLAVGYTAFNGVDFEGTFHVNTQTDDDYAGFIFGYQDSSSFYVVMWKQTEQTYWQATPFRAVAEPGIQLKAVKSKTGPGEHLRNSLWHTGDTSDQVRLLWKDSRNVGWKDKVSYRWFLQHRPQVGYIRVRFYEGSELVADSGVTIDTTMRGGRLGVFCFSQENIIWSNLKYRCNDTIPEDFQEFQTQNFDRFDN

SEQ ID NO: 6385 - protein, 626 aa, Homo sapiens
MPLLLLLLLLPSPLHPHPICEVSKVASHLEVNCDKRNLTALPPDLPKDTTILHLSENLLYTFSLATLMPYTRLTQLNLDRCELTKLQVDGTLPVLGTLDLSHNQLQSLPLLGQTLPALTVLDVSFNRLTSLPLGALRGLGELQELYLKGNELKTLPPGLLTPTPKLEKLSLANNNLTELPAGLLNGLENLDTLLLQENSLYTIPKGFFGSHLLPFAFLHGNPWLCNCEILYFRRWLQDNAENVYVWKQGVDVKAMTSNVASVQCDNSDKFPVYKYPGKGCPTLGDEGDTDLYDYYPEEDTEGDKVRATRTVVKFPTKAHTTPWGLFYSWSTASLDSQMPSSLHPTQESTKEQTTFPPRWTPNFTLHMESITFSKTPKSTTEPTPSPTTSEPVPEPAPNMTTLEPTPSPTTPEPTSEPAPSPTTPEPTPIPTIATSPTILVSATSLITPKSTFLTTTKPVSLLESTKKTIPELDQPPKLRGVLQGHLESSRNDPFLHPDFCCLLPLGFYVLGLFWLLFASVVLILLLSWVGHVKPQALDSGQGAALTTATQTTHLELQRGRQVTVPRAWLLFLRGSLPTFRSSLFLWVRPNGRVGPLVAGRRPSALSQGRGQDLLSTVSIRYSGHSL

SEQ ID NO: 6386 - protein, 1052 aa, Homo sapiens
ILITRRSAQGPAPSLQCPPLSAARRSLLALGLAMGKKSRAVPGRRPILQLSPPGPRGSTPGRDPEPEPDTEPDSTAAVPSQPAPSAATTTTTAVTAAAASDDSPSEGKDEQEAVQEVPRVVQNPPKPVMTTRPTAVKATGGLCLLGAYADSDDDDNDVSEKLAQSKETNGNQSTDIDSTLANFLAEIDAITAPQPAAPVGASAPPPTPPRPEPKEAATSTLSSSTSNGTDSTQTSGWQYDTQCSLAGVGIEMGDWQEVWDENTGCYYYWNTQTNEVTWELPQYLATQVQGLQHYQPSSVPGAETSFVVNTDIYSKEKTISVSSSKSGPVIAKREVKKEVNEGIQALSNSEEEKKGVAASLLAPLLPEGIKEEEERWRRKVICKEEPVSEVKETSTTVEEATTIVKPQEIMLDNIEDPSQEDLCSVVQSGESEEEEEQDTLELELVLERKKAELRALEEGDGSVSGSSPRSDISQPASQDGMRRLMSKRGKWKMFVRATSPESTSRSSSKTGRDTPENGETAIGAENSEKIDENSDKEMEVEESPEKIKVQTTPKVEEEQDLKFQIGELANTLTSKFEFLGINRQSISNFHVLLLQTETRIADWREGALNGNYLKRKLQDAAEQLKQYEINATPKGWSCHWDRDHRRYFYVNEQSGESQWEFPDGEEEEEESQAQENRDETLAKQTLKDKTGTDSNSTESSETSTGSLCKESFSGQVSSSSLMPLTPFWTLLQSNVPVLQPPLPLEMPPPPPPPPESPPPPPPPPPPAEDGEIQEVEMEDEGSEEPPAPGTEEDTPLKPSAQTTVVTSQSSVDSTISSSSSTKGIKRKATEISTAVVQRSATIGSSPVLYSQSAIATGHQAAGIGNQATGIGHQTIPVSLPAAGMGHQARGMSLQSNYLGLAAAPAIMSYAECSVPIGVTAPSLQPVQARGAVPTATIIEPPPPPPPPPPPPPPAPKMPPPEKTKKGRKDKAKKSKTKMPSLVKKWQSIQRELDEEDNSSSSEEDRESTAQKRIEEWKQQQLVSGMAERNANFEALPEDWRARLKRRKMAPNT

SEQ ID NO: 6387 - protein, 1050 aa, Homo sapiens
ILITRRSAQGPAPSLQCPPLSAARRSLLALGLAMGKKSRAVPGRRPILQLSPPGPRGSTPGRDPEPEPDTEPDSTAAVPSQPAPSAATTTAVTAAAASDDSPSEGKDEQEAVQEVPRVVQNPPKPVMTTRPTAVKATGGLCLLGAYADSDDDDNDVSEKLAQSKETNGNQSTDIDSTLANFLAEIDAITAPQPAAPVGASAPPPTPPRPEPKEAATSTLSSSTSNGTDSTQTSGWQYDTQCSLAGVGIEMGDWQEVWDENTGCYYYWNTQTNEVTWELPQYLATQVQGLQHYQPSSVPGAETSFVVNTDIYSKEKTISVSSSKSGPVIAKREVKKEVNEGIQALSNSEEEKKGVAASLLAPLLPEGIKEEEERWRRKVICKEEPVSEVKETSTTVEEATTIVKPQEIMLDNIEDPSQEDLCSVVQSGESEEEEEQDTLELELVLERKKAELRALEEGDGSVSGSSPRSDISQPASQDGMRRLMSKRGKWKMFVRATSPESTSRSSSKTGRDTPENGETAIGAENSEKIDENSDKEMEVEESPEKIKVQTTPKVEEEQDLKFQIGELANTLTSKFEFLGINRQSISNFHVLLLQTETRIADWREGALNGNYLKRKLQDAAEQLKQYEINATPKGWSCHWDRDHRRYFYVNEQSGESQWEFPDGEEEEEESQAQENRDETLAKQTLKDKTGTDSNSTESSETSTGSLCKESFSGQVSSSSLMPLTPFWTLLQSNVPVLQPPLPLEMPPPPPPPPESPPPPPPPPPPAEDGEIQEVEMEDEGSEEPPAPGTEEDTPLKPSAQTTVVTSQSSVDSTISSSSSTKGIKRKATEISTAVVQRSATIGSSPVLYSQSAIATGHQAAGIGNQATGIGHQTIPVSLPAAGMGHQARGMSLQSNYLGLAAAPAIMSYAECSVPIGVTAPSLQPVQARGAVPTATIIEPPPPPPPPPPPPPPAPKMPPPEKTKKGRKDKAKKSKTKMPSLVKKWQSIQRELDEEDNSSSSEEDRESTAQKRIEEWKQQQLVSGMAERNANFEALPEDWRARLKRRKMAPNT

SEQ ID NO: 6388 - protein, 1253 aa, Homo sapiens
MKIITYFCIWAVAWAIPVPQSKPLERHVEKSMNLHLLARSNVSVQDELNASGTIKESGVLVHEGDRGRQENTQDGHKGEGNGSKWAEVGGKSFSTYSTLANEEGNIEGWNGDTGKAETYGHDGIHGKEENITANGIQGQVSIIDNAGATNRSNTNGNTDKNTQNGDVGDAGHNEDVAVVQEDGPQVAGSNNSTDNEDEIIENSCRNEGNTSEITPQINSKRNGTKEAEVTPGTGEDAGLDNSDGSPSGNGADEDEDEGSGDDEDEEAGNGKDSSNNSKGQEGQDHGKEDDHDSSIGQNSDSKEYYDPEGKEDPHNEVDGDKTSKSEENSAGIPEDNGSQRIEDTQKLNHRESKRVENRITKESETHAVGKSQDKGIEIKGPSSGNRNITKEVGKGNEGKEDKGQHGMILGKGNVKTQGEVVNIEGPGQKSEPGNKVGHSNTGSDSNSDGYDSYDFDDKSMQGDDPNSSDESNGNDDANSESDNNSSSRGDASYNSDESKDNGNGSDSKGAEDDDSDSTSDTNNSDSNGNGNNGNDDNDKSDSGKGKSDSSDSDSSDSSNSSDSSDSSDSDSSDSNSSSDSDSSDSDSSDSSDSDSSDSSNSSDSSDSSDSSDSSDSSDSSDSKSDSSKSESDSSDSDSKSDSSDSNSSDSSDNSDSSDSSNSSNSSDSSDSSDSSDSSSSSDSSSSSDSSNSSDSSDSSDSSNSSESSDSSDSSDSDSSDSSDSSNSNSSDSDSSNSSDSSDSSDSSDSSNSSDSSDSSDSSNSSDSSDSSDSSDSSDSSNSSDSNDSSNSSDSSDSSNSSDSSNSSDSSDSSDSSDSDSSNSSDSSNSSDSSDSSNSSDSSDSSDSSDSSDSDSSNRSDSSNSSDSSDSSDSSNSSDSSDSSDSSDSNESSNSSDSSDSSNSSDSDSSDSSNSSDSSDSSNSSDSSESSNSSDNSNSSDSSNSSDSSDSSDSSNSSDSSNSGDSSNSSDSSDSNSSDSSDSSNSSDSSDSSDSSDSSDSSDSSNSSDSSDSSDSSDSSNSSDSSNSSDSSDSSDSSDSSDSSDSSNSSDSSDSSDSSDSSDSSGSSDSSDSSDSSDSSDSSDSSDSSDSSDSSESSDSSDSSDSSDSSDSSDSSDSSDSSDSSDSSDSSNSSDSSDSSDSSDSSDSSDSSDSSDSSDSSDSSDSSDSSDSSDSSDSSDSSDSNESSDSSDSSDSSDSSNSSDSSDSSDSSDSTSDSNDESDSQSKSGNGNNNGSDSDSDSEGSDSNHSTSDD

SEQ ID NO: 6389 - protein, 306 aa, Homo sapiens
MAAAAAAAAAAGAAGGRGSGPGRRRHLVPGAGGEAGEGAPGGAGDYGNGLESEELEPEELLLEPEPEPEPEEEPPRPRAPPGAPGPGPGSGAPGSQEEEEEPGLVEGDPGDGAIEDPELEAIKARVREMEEEAEKLKELQNEVEKQMNMSPPPGNAGPVIMSIEEKMEADARSIYVGNVDYGATAEELEAHFHGCGSVNRVTILCDKFSGHPKGFAYIEFSDKESVRTSLALDESLFRGRQIKVIPKRTNRPGISTTDRGFPRARYRARTTNYNSSRSRFYSGFNSRPRGRVYRGRARATSWYSPY

SEQ ID NO: 6390 - protein, 385 aa, Homo sapiens
MSRPQLRRWRLVSSPPSGVPGLALLALLALLALRLAAGTDCPCPEPELCRPIRHHPDFEVFVFDVGQKTWKSYDWSQITTVATFGKYDSELMCYAHSKGARVVLKGDVSLKDIIDPAFRASWIAQKLNLAKTQYMDGINIDIEQEVNCLSPEYDALTALVKETTDSFHREIEGSQVTFDVAWSPKNIDRRCYNYTGIADACDFLFVMSYDEQSQIWSECIAAANAPYNQTLTGYNDYIKMSINPKKLVMGVPWYGYDYTCLNLSEDHVCTIAKVPFRGAPCSDAAGRQVPYKTIMKQINSSISGNLWDKDQRAPYYNYKDPAGHFHQVWYDNPQSISLKATYIQNYRLRGIGMWNANCLDYSGDAVAKQQTEEMWEVLKPKLLQR

SEQ ID NO: 6391 - protein, 215 aa, Homo sapiens
MHRDAWLPRPAFSLTGLSLFFSLVPPGRSMEVTVPATLNVLNGSDARLPCTFNSCYTVNHKQFSLNWTYQECNNCSEEMFLQFRMKIINLKLERFQDRVEFSGNPSKYDVSVMLRNVQPEDEGIYNCYIMNPPDRHRGHGKIHLQVLMEEPPERDSTVAVIVGASVGGFLAVVILVLMVVKCVRRKKEQKLSTDDLKTEEEGKTDGEGNPDDGAK

SEQ ID NO: 6392 - protein, 508 aa, Homo sapiens
MWELVALLLLTLAYLFWPKRRCPGAKYPKSLLSLPLVGSLPFLPRHGHMHNNFFKLQKKYGPIYSVRMGTKTTVIVGHHQLAKEVLIKKGKDFSGRPQMATLDIASNNRKGIAFADSGAHWQLHRRLAMATFALFKDGDQKLEKIICQEISTLCDMLATHNGQSIDISFPVFVAVTNVISLICFNTSYKNGDPELNVIQNYNEGIIDNLSKDSLVDLVPWLKIFPNKTLEKLKSHVKIRNDLLNKILENYKEKFRSDSITNMLDTLMQAKMNSDNGNAGPDQDSELLSDNHILTTIGDIFGAGVETTTSVVKWTLAFLLHNPQVKKKLYEEIDQNVGFSRTPTISDRNRLLLLEATIREVLRLRPVAPMLIPHKANVDSSIGEFAVDKGTEVIINLWALHHNEKEWHQPDQFMPERFLNPAGTQLISPSVSYLPFGAGPRSCIGEILARQELFLIMAWLLQRFDLEVPDDGQLPSLEGIPKVVFLIDSFKVKIKVRQAWREAQAEGST

SEQ ID NO: 6393 - protein, 811 aa, Homo sapiens
MRLIRNIYIFCSIVMTAEGDAPELPEERELMTNCSNMSLRKVPADLTPATTTLDLSYNLLFQLQSSDFHSVSKLRVLILCHNRIQQLDLKTFEFNKELRYLDLSNNRLKSVTWYLLAGLRYLDLSFNDFDTMPICEEAGNMSHLEILGLSGAKIQKSDFQKIAHLHLNTVFLGFRTLPHYEEGSLPILNTTKLHIVLPMDTNFWVLLRDGIKTSKILEMTNIDGKSQFVSYEMQRNLSLENAKTSVLLLNKVDLLWDDLFLILQFVWHTSVEHFQIRNVTFGGKAYLDHNSFDYSNTVMRTIKLEHVHFRVFYIQQDKIYLLLTKMDIENLTISNAQMPHMLFPNYPTKFQYLNFANNILTDELFKRTIQLPHLKTLILNGNKLETLSLVSCFANNTPLEHLDLSQNLLQHKNDENCSWPETVVNMNLSYNKLSDSVFRCLPKSIQILDLNNNQIQTVPKETIHLMALRELNIAFNFLTDLPGCSHFSRLSVLNIEMNFILSPSLDFVQSCQEVKTLNAGRNPFRCTCELKNFIQLETYSEVMMVGWSDSYTCEYPLNLRGIRLKDVHLHELSCNTALLIVTIVVIMLVLGLAVAFCCLHFDLPWYLRMLGQCTQTWHRVRKTTQEQLKRNVRFHAFISYSEHDSLWVKNELIPNLEKEDGSILICLYESYFDPGKSISENIVSFIEKSYKSIFVLSPNFVQNEWCHYEFYFAHHNLFHENSDHIILILLEPIPFYCIPTRYHKLKALLEKKAYLEWPKDRRKCGLFWANLRAAINVNVLATREMYELQTFTELNEESRGSTISLMRTDCL

SEQ ID NO: 6394 - protein, 352 aa, Homo sapiens
MLLFSVLLLLSLVTGTQLGPRTPLPEAGVAILGRARGAHRPQPRHPPSPVSECGDRSIFEGRTRYSRITGGMEAEVGEFPWQVSIQARSEPFCGGSILNKWWILTAAHCLYSEELFPEELSVVLGTNDLTSPSMEIKEVASIILHKDFKRANMDNDIALLLLASPIKLDDLKVPICLPTQPGPATWRECWVAGWGQTNAADKNSVKTDLMKVPMVIMDWEECSKMFPKLTKNMLCAGYKNESYDACKGDSGGPLVCTPEPGEKWYQVGIISWGKSCGEKNTPGIYTSLVNYNLWIEKVTQLEGRPFNAEKRRTSVKQKPMGSPVSGVPEPGSPRSWLLLCPLSHVLFRAILY

SEQ ID NO: 6395 - protein, 417 aa, Homo sapiens
MRCLCAAVPETKQPEKKSSWLQSEFLAPQPIVTSLGGSGSELEALSLTASALASVTPGPTAQPRAMLLFSVLLLLSLVTGTQLGPRTPLPEAGVAILGRARGAHRPQPPHPPSPVSECGDRSIFEGRTRYSRITGGMEAEVGEFPWQVSIQARSEPFCGGSILNKWWILTAAHCLYSEELFPEELSVVLGTNDLTSPSMEIKEVASIILHKDFKRANMDNDIALLLLASPIKLDDLKVPICLPTQPGPATWRECWVAGWGQTNAADKNSVKTDLMKAPMVIMDWEECSKMFPKLTKNMLCAGYKNESYDACKGDSGGPLVCTPEPGEKWYQVGIISWGKSCGEKNTPGIYTSLVNYNLWIEKVTQLEGRPFNAEKRRTSVKQKPMGSPVSGVPEPGSPRSWLLLCPLSHVLFRAILY

SEQ ID NO: 6396 - protein, 474 aa, Homo sapiens
MAAASVSAASGSHLSNSFAEPSRSNGSMVRHSSSPYVVYPSDKPFLNSDLRRSPSKPTLAYPESNSRAIFSALKNLQDKIRRLELERIQAEESVKTLSRETIEYKKVLDEQIQERENSKNEESKHNQELTSQLLAAENKCNLLEKQLEYMRNMIKHAEMERTSVLEKQVSLERERQHDQTHVQSQLEKLDLLEQEYNKLTTMQALAEKKMQELEAKLHEEEQERKRMQAKAAELQTGLETNRLIFEDKATPCVPNARRIKKKKSKPPEKSTSPSHAVVANVQLVLHLMKQHSKALCNDRVINSIPLAKQVSSRGGKSKKLSVTPPSSNGINEELSEVLQTLQDEFGQMSFDHQQLAKLIQESPTVELKDKLECELEALVGRMEAKANQITKVRKYQAQLEKQKLEKQKKELKATKKTLDEERNSSSRSGITGTTNKKDFMKQRPGEKRRKNLQLLKDMQSIQNSLQSSSLCWDY

SEQ ID NO: 6397 - protein, 500 aa, Homo sapiens
MAAASVSAASGSHLSNSFAEPSRSNGSMVRHSSSPYVVYPSDKPFLNSDLRRSPSKPTLAYPESNSRAIFSALKNLQDKIRRLELERIQAEESVKTLSRETIEYKKVLDEQIQERENSKNEESKHNQELTSQLLAAENKCNLLEKQLEYMRNMIKHAEMERTSVLEKQVSLERERQHDQTHVQSQLEKLDLLEQEYNKLTTMQALAEKKMQELEAKLHEEEQERKRMQAKAAELQTGLETNRLIFEDKATPCVPNARRIKKKKSKPPEKKSSRNYFGAQPHYRLCLGDMPFVAGKSTSPSHAVVANVQLVLHLMKQHSKALCNDRVINSIPLAKQVSSRGGKSKKLSVTPPSSNGINEELSEVLQTLQDEFGQMSFDHQQLAKLIQESPTVELKDKLECELEALVGRMEAKANQITKVRKYQAQLEKQKLEKQKKELKATKKTLDEERNSSSRSGITGTTNKKDFMKLRPGEKRRKNLQLLKDMQSIQNSLQSSSLCWDY

SEQ ID NO: 6398 - protein, 467 aa, Homo sapiens
MLGIWIVAFLFFGTSRGKEVCYERLGCFKDGLPWTRTFSTELVGLPWSPEKINTRFLLYTIHNPNAYQEISAVNSSTIQASYFGTDKITRINIAGWKTDGKWQRDMCNVLLQLEDINCINLDWINGSREYIHAVNNLRVVGAEVAYFIDVLMKKFEYSPSKVHLIGHSLGAHLAGEAGSRIPGLGRITGLDPAGPFFHNTPKEVRLDPSDANFVDVIHTNAARILFELGVGTIDACGHLDFYPNGGKHMPGCEDLITPLLKFNFNAYKKEMASFFDCNHARSYQFYAESILNPDAFIAYPCRSYTSFKAGNCFFCSKEGCPTMGHFADRFHFKNMKTNGSHYFLNTGSLSPFARWRHKLSVKLSGSEVTQGTVFLRVGGAVRKTGEFAIVSGKLEPGMTYTKLIDADVNVGNITSVQFIWKKHLFEDSQNKLGAEMVINTSGKYGYKSTFCSQDIMGPNILQNLKPC

SEQ ID NO: 6399 - protein, 1214 aa, Homo sapiens
EIRSWEKRKRLVLCLLEAADMKCFFPVLSCLAVLGVVSAQRQVTVQEGPLYRTEGSHITIWCNVSGYQGPSEQNFQWSIYLPSSPEREVQIVSTMDSSFPYAIYTQRVRGGKIFIERVQGNSTLLHITDLQARDAGEYECHTPSTDKQYFGSYSAKMNLVVIPDSLQTTAMPQTLHRVEQDPLELTCEVASETIQHSHLSVAWLRQKVGEKPVEVISLSRDFMLHSSSEYAQRQSLGEVRLDKLGRTTFRLTIFHLQPSDQGEFYCEAAEWIQDPDGSWYAMTRKRSEGAVVNVQPTDKEFTVRLETEKRLHTVGEPVEFRCILEAQNVPDRYFAVSWAFNSSLIATMGPNAVPVLNSEFAHREARGQLKVAKESDSVFVLKIYHLRQEDSGKYNCRVTEREKTVTGEFIDKESKRPKNIPIIVLPLKSSISVEVASNASVILEGEDLRFSCSVRTAGRPQGRFSVIWQLVDRQNRRSNIMWLDRDGTVQPGSSYWERSSFGGVQMEQVQPNSFSLGIFNSRKEDEGQYECHVTEWVRAVDGEWQIVGERRASTPISITALEMGFAVTAISRTPGVTYSDSFDLQCIIKPHYPAWVPVSVTWRFQPVGTVEFHDLVTFTRDGGVQWGDRSSSFRTRTAIEKAESSNNVRLSISRASDTEAGKYQCVAELWRKNYNNTWTRLAERTSNLLEIRVLQPVTKLQVSKSKRTLTLVENKPIQLNCSVKSQTSQNSHFAVLWYVHKPSDADGKLILKTTHNSAFEYGTYAEEEGLRARLQFERHVSGGLFSLTVQRAEVSDSGSYYCHVEEWLLSPNYAWYKLAEEVSGRTEVTVKQPDSRLRLSQAQGNLSVLETRQVQLECVVLNRTSITSQLMVEWFVWKPNHPERETVARLSRDATFHYGEQAAKNNLKGRLHLESPSPGVYRLFIQNVAVQDSGTYSCHVEEWLPSPSGMWYKRAEDTAGQTALTVMRPDASLQVDTVVPNATVSEKAAFQLDCSIVSRSSQDSRFAVAWYSLRTKAGGKRSSPGLEEQEEEREEEEEEDDDDDDDPTERTALLSVGPDAVFGPEGSPWEGRLRFQRLSPVLYRLTVLQASPQDTGNYSCHVEEWLPSPQKEWYRLTEEESAPIGIRVLDTSPTLQSIICSNDALFYFVFFYPFPIFGILIITILLVRFKSRNSSKNSDGKNGVPLLWIKEPHLNYSPTCLEPPVLSIHPGAID

SEQ ID NO: 6400 - protein, 1215 aa, Homo sapiens
MKCFFPVLSCLAVLGVVSAQRQVTVQEGPLYRTEGSHITIWCNVSGYQGPSEQNFQWSIYLPSSPEREVQIVSTMDSSFPYAIYTQRVRGGKIFIERVQGNSTLLHITDLQARDAGEYECHTPSTDKQYFGSYSAKMNLVVIPDSLQTTAMPQTLHRVEQDPLELTCEVASETIQHSHLSVAWLRQKVGEKPVEVISLSRDFMLHSSSEYAQRQSLGEVRLDKLGRTTFRLTIFHLQPSDQGEFYCEAAEWIQDPDGSWYAMTRKRSEGAVVNVQPTDKEFTVRLETEKRLHTVGEPVEFRCILEAQNVPDRYFAVSWAFNSSLIATMGPNAVPVLNSEFAHREARGQLKVAKESDSVFVLKIYHLRQEDSGKYNCRVTEREKTVTGEFIDKESKRPKNIPIIVLPLTDNWVVKVPQHHQLLSQGHLESSISVEVASNASVILEGEDLRFSCSVRTAGRPQGRFSVIWQLVDRQNRRSNIMWLDRDGTVQPGSSYWERSSFGGVQMEQVQPNSFSLGIFNSRKEDEGQYECHVTEWVRAVDGEWQIVGERRASTPISITALEMGFAVTAISRTPGVTYSDSFDLQCIIKPHYPAWVPVSVTWRFQPVGTVEFHDLVTFTRDGGVQWGDRSSSFRTRTAIEKAESSNNVRLSISRASDTEAGKYQCVAELWRKNYNNTWTRLAERTSNLLEIRVLQPVTKLQVSKSKRTLTLVENKPIQLNCSVKSQTSQNSHFAVLWYVHKPSDADGKLILKTTHNSAFEYGTYAEEEGLRARLQFERHVSGGLFSLTVQRAEVSDSGSYYCHVEEWLLSPNYAWYKLAEEVSGRTEVTVKQPDSRLRLSQAQGNLSVSGDPAGTAGVCGSQPHQHNLPAHGGMVCMEAQPPERETVARLSRDATFHYGEQAAKNNLKGRLHLESPSPGVYRLFIQNVAVQDSGTYSCHVEEWLPSPSGMWSKRAEDTAGQTALTVMRPDASLQVDTVVPNATVSEKAAFQLDCSIVSRSSQDSRFAVAWYSLRTKAGGKRSSPGLEEQEEEREEEEEEEEDDDDDDPTERTALLSVGPDAVFGPEGNPWEGRLRFQRLSPVLYRLTVLQASPQDTGNYSCHVEEWLPSPQKEWYRLTEEESAPIGIRVLDTSPTLQSIICSNDALFYFVFFYPFPIFGILIITILLVRFKSRNSSKNSDGKNGVPLLWIKEPHLNYSPTCLEPPVLSIHPGAID

SEQ ID NO: 6401 - protein, 649 aa, Homo sapiens
MISAAWSIFLIGTKIGLFLQVAPLSVMAKSCPSVCRCDAGFIYCNDRFLTSIPTGIPEDATTLYLQNNQINNAGIPSDLKNLLKVERIYLYHNSLDEFPTNLPKYVKELHLQENNIRTITYDSLSKIPYLEELHLDDNSVSAVSIEEGAFRDSNYLRLLFLSRNHLSTIPWGLPRTIEELRLDDNRISTISSPSLQGLTSLKRLVLDGNLLNNHGLGDKVFFNLVNLTELSLVRNSLTAAPVNLPGTNLRKLYLQDNHINRVPPNAFSYLRQLYRLDMSNNNLSNLPQGIFDDLDNITQLILRNNPWYCGCKMKWVRDWLQSLPVKVNVRGLMCQAPEKVRGMAIKDLNAELFDCKDSGIVSTIQITTAIPNTVYPAQGQWPAPVTKQPDIKNPKLTKDHQTTGSPSRKTITITVKSVTSDTIHISWKLALPMTALRLSWLKLGHSPAFGSITETIVTGERSEYLVTALEPDSPYKVCMVPMETSNLYLFDETPVCIETETAPLRMYNPTTTLNREQEKEPYKNPNLPLAAIIGGAVALVTIALLALVCWYVHRNGSLFSRNCAYSKGRRRKDDYAEAGTKKDNSILEIRETSFQMLPISNEPISKEEFVIHTIFPPNGMNLYKNNHSESSSNRSYRDSGIPDSDHSHS

SEQ ID NO: 6402 - protein, 3259 aa, Homo sapiens
MLSRLSGLANVVLHELSGDDDTDQNMRAPLDPELHQESDMEFNNTTQEDVQERLAYAEQLVVELKDIIRQKDVQLQQKDEALQEERKAADNKIKKLKLHAKAKLTSLNKYIEEMKAQGGTVLPTEPQSEEQLSKHDKSSTEEEMEIEKIKHKLQEKEELISTLQAQLTQAQAEQPAQSSTEMEEFVMMKQQLQEKEEFISTLQAQLSQTQAEQAAQQVVREKDARFETQVRLHEDELLQLVTQADVETEMQQKLRVLQRKLEEHEESLVGRAQVVDLLQQELTAAEQRNQILSQQLQQMEAEHNTLRNTVETEREESKILLEKMELEVAERKLSFHNLQEEMHHLLEQFEQAGQAQAELESRYSALEQKHKAEMEEKTSHILSLQKTGQELQSACDALKDQNSKLLQDKNEQAVQSAQTIQQLEDQLQQKSKEISQFLNRLPLQQHETASQTSFPDVYNEGTQAVTEENIASLQKRVVELENEKGALLLSSIELEELKAENEKLSSQITLLEAQNRTGEADREVSEISIVDIANKRSSSAEESGQDVLENTFSQKHKELSVLLLEMKEAQEEIAFLKLQLQGKRAEEADHEVLDQKEMKQMEGEGIAPIKMKVFLEDTGQDFPLMPNEESSLPAVEKEQASTEHQSRTSEEISLNDAGVELKSTKQDGDKSLSAVPDIGQCHQDELERLKSQILELELNFHKAQEIYEKNLDEKAKEISNLNQLIEEFKKNADNNSSAFTALSEERDQLLSQVKELSMVTELRAQVKQLEMNLAEAERQRRLDYESQTAHDNLLTEQIHSLSIEAKSKDVKIEVLQNELDDVQLQFSEQSTLIRSLQSQLQNKESEVLEGAERVRHISSKVEELSQALSQKELEITKMDQLLLEKKRDVETLQQTIEEKDQQVTEISFSMTEKMVQLNEEKFSLGVEIKTLKEQLNLLSRAEEAKKEQVEEDNEVSSGLKQNYDEMSPAGQISKEELQHEFDLLKKENEQRKRKLQAALINRKELLQRVSRLEEELANLKDESKKEIPLSETERGEVEEDKENKEYSEKCVTSKCQEIEIYLKQTISEKEVELQHIRKDLEEKLAAEEQFQALVKQMNQTLQDKTNQIDLLQAEISENQAIIQKLITSNTDASDGDSVALVKETVVISPPCTGSSEHWKPELEEKILALEKEKEQLQKKLQEALTSRKAILKKAQEKERHLREELKQQKDDYNRLQEQFDEQSKENENIGDQLRQLQIQVRESIDGKLPSTDQQESCSSTPGLEEPLFKATEQHHTQPVLESNLCPDWPSHSEDASALQGGTSVAQIKAQLKEIEAEKVELELKVSSTTSELTKKSEEVFQLQEQINKQGLEIESLKTVSHEAEVHAESLQQKLESSQLQIAGLEHLRELQPKLDELQKLISKKEEDVSYLSGQLSEKEAALTKIQTEIIEQEDLIKALHTQLEMQAKEHDERIKQLQVELCEMKQKPEEIGEESRAKQQIQRKLQAALISRKEALKENKSLQEELSLARGTIERLTKSLADVESQVSAQNKEKDTVLGRLALLQEERDKLITEMDRSLLENQSLSSSCESLKLALEGLTEDKEKLVKEIESLKSSKIAESTEWQEKHKELQKEYEILLQSYENVSNEAERIQHVVEAVRQEKQELYGKLRSTEANKKETEKQLQEAEQEMEEMKEKMRKFAKSKQQKILELEEENDRLRAEVHPAGDTAKECMETLLSSNASMKEELERVKMEYETLSKKFQSLMSEKDSLSEEVQDLKHQIEDNVSKQANLEATEKHDNQTNVTEEGTQSIPGETEEQDSLSMSTRPTCSESVPSAKSANPAVSKDFSSHDEINNYLQQIDQLKERIAGLEEEKQKNKEFSQTLENEKNTLLSQISTKDGELKMLQEEVTKMNLLNQQIQEELSRVTKLKETAEEEKDDLEERLMNQLAELNGSIGNYCQDVTDAQIKNELLESEMKNLKKCVSELEEEKQQLVKEKTKVESEIRKEYLEKIQGAQKEPGNKSHAKELQELLKEKQQEVKQLQKDCIRYQEKISALERTVKALEFVQTESQKDLEITKENLAQAVEHRKKAQAELASFKVLLDDTQSEAARVLADNLKLKKELQSNKESVKSQMKQKDEDLERRLEQAEEKHLKEKKNMQEKLDALRREKVHLEETIGEIQVTLNKKDKEVQQLQENLDSTVTQLAAFTKSMSSLQDDRDRVIDEAKKWERKFSDAIQSKEEEIRLKEDNCSVLKDQLRQMSIHMEELKINISRLEHDKQIWESKAQTEVQLQQKVCDTLQGENKELLSQLEETRHLYHSSQNELAKLESELKSLKDQLTDLSNSLEKCKEQKGNLEGIIRQQEADIQNSKFSYEQLETDLQASRELTSRLHEEINMKEQKIISLLSGKEEAIQVAIAELRQQHDKEIKELENLLSQEEEENIVLEEENKKAVDKTNQLMETLKTIKKENIQQKAQLDSFVKSMSSLQNDRDRIVGDYQQLEERHLSIILEKDQLIQEAAAENNKLKEEIRGLRSHMDDLNSENAKLDAELIQYREDLNQVITIKDSQQKQLLEVQLQQNKELENKYAKLEEKLKESEEANEDLRRSFNALQEEKQDLSKEIESLKVSISQLTRQVTALQEEGTLGLYHAQLKVKEEEVHRLSALFSSSQKRIAELEEELVCVQKEAAKKVGEIEDKLKKELKHLHHDAGIMRNETETAEERVAELARDLVEMEQKLLMVTKENKGLTAQIQSFGRSMSSLQNSRDHANEELDELKRKYDASLKELAQLKEQGLLNRERDALLSETAFSMNSTEENSLSHLEKLNQQLLSKDEQLLHLSSQLEDSYNQVQSFSKAMASLQNERDHLWNELEKFRKSEEGKQRSAAQPSTSPAEVQSLKKAMSSLQNDRDRLLKELKNLQQQYLQINQEITELHPLKAQLQEYQDKTKAFQIMQEELRQENLSWQHELHQLRMEKSSWEIHERRMKEQYLMAISDKDQQLSHLQNLIRELRSSSSQTQPLKVQYQRQASPETSASPDGSQNLVYETELLRTQLNDSLKEIHQKELRIQQLNSNFSQLLEEKNTLSIQLCDTSQSLRENQQHYGDLLNHCAVLEKQVQELQAGPLNIDVAPGAPQEKNGVHRKSDPEELREPQQSFSEAQQQLCNTRQEVNELRKLLEEERDQRVAAENALSVAEEQIRRLEHSEWDSSRTPIIGSCGTQEQALLIDLTSNSCRRTRSGVGWKRVLRSLCHSRTRVPLLAAIYFLMIHVLLILCFTGHL

SEQ ID NO: 6403 - protein, 228 aa, Homo sapiens
MAGSPTCLTLIYILWQLTEHLSKPKVTMGLQSNKNGTCVTNLTCCMEHGEEDVIYTWKALGQAANESHNGSILPISWRWGESDMTFICVARNPVSRNFSSPILARKLCEGAADDPDSSMVLLCLLLVPLLLSLFVLGLFLWFLKRERQEEYIEEKKRVDICRETPNICPHSGENTEYDTIPHTNRTILKEDPANTVYSTVEIPKKMENPHSLLTMPDTPRLFAYENVI

SEQ ID NO: 6404 - protein, 335 aa, Homo sapiens
MAGSPTCLTLIYILWQLTGSAASGPVKELVGSVGGAVTFPLKSKVKQVDSIVWTFNTTPLVTIQPEGGTIIVTQNRNRERVDFPDGGYSLKLSKLKKNDSGIYYVGIYSSSLQQPSTQEYVLHVYEHLSKPKVTMGLQSNKNGTCVTNLTCCMEHGEEDVIYTWKALGQAANESHNGSILPISWRWGESDMTFICVARNPVSRNFSSPILARKLCEGAADDPDSSMVLLCLLLVPLLLSLFVLGLFLWFLKRERQEEYIEEKKRVDICRETPNICPHSGENTEYDTIPHTNRTILKEDPANTVYSTVEIPKKMENPHSLLTMPDTPRLFAYENVI

SEQ ID NO: 6405 - protein, 1603 aa, Homo sapiens
MWVSWAPGLWLLGLWATFGHGANTGAQCPPSQQEGLKLEHSSSLPANVTGFNLIHRLSLMKKSAIKKIRNPKGPLILRLGAAPVTQPTRRVFPRGLPEEFALVLTLLLKKHTHQKTWYLFQVTDANGYPQISLEVNSQERSLELRAQGQDGDFVSCIFPVPQLFDLRWHKLMLSVAGRVASVHVDCSSASSQPLGPRRPMRPVGHVFLGLDAEQGKPVSFDLQQVHIYCDPELVLEEGCCEILPAGCPPETSKARRDTQSNELIEINPQSEGKVYTRCFCLEEPQNSEVDAQLTGRISQKAERGAKVHQETAADECPPCVHGARDSNVTLAPSGPKGGKGERGLPGPPGSKGEKGARGNDCVRISPDAPLQCAEGPKGEKGESGALGPSGLPGSTGEKGQKGEKGDGGIKGVPGKPGRDAPGEICVIGPKGQKGDPGFVGPEGLAGEPGPPGLPGPPGIGLPGTPGDPGGPPGPKGDKGSSGIPGKEGPGGKPGKPGVKGEKGDPCEVCPTLPEGFQNFVGLPGKPGPKGEPGDPVRARGDPGIQGIKGEKGEPCLSCSSVVGAQHLVSSTGASGDVGSPGFGLPGLPGRAGVPGLKGEKGNFGEAGPAGSPGPPGPVGPAGIKGAKGEPCEPCPALSNLQDGDVRVVALPGPSGEKGEPGPPGFGLPGKQGKAGERGLKGQKGDAGNPGDPGTPGTTGRPGLSGEPGVQGPAGPKGEKGDGCTACPSLQGTVTDMAGRPGQPGPKGEQGPEGVGRPGKPGQPGLPGVQGPPGLKGVQGEPGPPGRGVQGPQGEPGAPGLPGIQGLPGPRGPPGPTGEKGAQGSPGVKGATGPVGPPGASVSGPPGRDGQQGQTGLRGTPGEKGPRGEKGEPGECSCPSQGDLIFSGMPGAPGLWMGSSWQPGPQGPPGIPGPPGPPGVPGLQGVPGNNGLPGQPGLTAELGSLPIEQHLLKSICGDCVQGQRAHPGYLVEKGEKGDQGIPGVPGLDNCAQCFLSLERPRAEEARGDNSEGDPGCVGSPGLPGPPGLPGQRGEEGPPGMRGSPGPPGPIGPPGFPGAVGSPGLPGLQGERGLTGLTGDKGEPGPPGQPGYPGATGPPGLPGIKGERGYTGSAGEKGEPGPPGSEGLPGPPGPAGPRGERGPQGNSGEKGDQGFQGQPGFTGPTGSPGFPGKVGSPGPPGPQAEKGSEGIRGPSGLPGSPGPPGPPGIQGPAGLDGLDGKDGKPGLRGDPGPAGPPGLMGPPGFKGKTGHPGLPGPKGDCGKPGPPGSTGRPGAEGEPGAMGPQGRPGPPGHVGPPGPPGQPGPAGISAVGLKGDRGATGERGLAGLPGQPGPPGHPGPPGEPGTDGAAGKEGPPGKQGFYGPPGPKGDPGAAGQKGQAGEKGRAGMPGGPGKSGSMGPVGPPGPAGERGHPGAPGPSGSPGLPGVPGSMGDMVNYDEIKRFIRQEIIKMFDERMAYYTSRMQFPMEMAAAPGRPGPPGKDGAPGRPGAPGSPGLPGQIGREGRQGLPGVRGLPGTKGEKGDIGIGIAGENGLPGPPGPQGPPGYGKMGATGPMGQQGIPGIPGPPGPMGQPGKAGHCNPSDCFGAMPMEQQYPPMKTMKGPFG

SEQ ID NO: 6406 - protein, 638 aa, Homo sapiens
MGRYSAVGSVTERIFTLYYDHLGFLHKLTLGRFEASGPPTAFGNSRNLFGQPPDMGFETALAPQHTSLDEIIFFAYVPENEPQETIYSKKFGNIHYGKVIHSGKTGRAYIRKVLQHTTPKGFLSSVIAEMKEPFGLEEVNESSCLSSSLLINKAGNVYKLTLDSQVVQALFEDTDIEKTVVLPGYSSFLITSILDNKNALAIATMPESAPNNMTFLKSTWFLYNFGQRNGRTWKIYSKPCNYWFQHDDSPSLNIVKYIDLGNSYVLKAKVIRNAKGFRMLEIPLLTVFVGNPNLLEVTAEVTFDDTDSYVITISAASKVLHQGSTSLAFIMWSASTECFVTTMVPTLKSSCSYLRSMHHIPSKFIPFEDWISGVHKDSQGFNLIKTLPINYRPPSNMGIAIPLTDNFYHADPSKPIPRNMFHMSKKTGKFKQCANVSTREECNCTKDQKFSHAVAFSDCREKVPRFKFPITQYPVSLEIINEDGRVPLQSPYLVTVTEVNMRHNWKLKHTVPENIKRMKQLVEPILGAAVYNPSGLNLSIKGSELFHFRVTVISGVTFCNLIEEFQIYVDEAPLPFPGHTLIAVATAVVLGGLIFIAFMFQLQGIHPWRTFQRWIRRNQEKFSSISLSELIHRSKSEE

SEQ ID NO: 6407 - protein, 906 aa, Homo sapiens
MEHGTLLAQPGLWTRDTSWALLYFLCYILPQTAPQVLRIGGIFETVENEPVNVEELAFKFAVTSINRNRTLMPNTTLTYDIQRINLFDSFEASRRACDQLALGVAALFGPSHSSSVSAVQSICNALEVPHIQTRWKHPSVDNKDLFYINLYPDYAAISRAILDLVLYYNWKTVTVVYEDSTGLIRLQELIKAPSRYNIKIKIRQLPSGNKDAKPLLKEMKKGKEFYVIFDCSHETAAEILKQILFMGMMTEYYHYFFTTLDLFALDLELYRYSGVNMTGFRLLNIDNPHVSSIIEKWSMERLQAPPRPETGLLDGMMTTEAALMYDAVYMVAIASHRASQLTVSSLQCHRHKPWRLGPRFMNLIKEASRWDGLTGHITFNKTNGLRKDFDLDIISLKEEGTEKIGIWNSNSGLNMTDSNKDKSSNITDSLANRTLIVTTILEEPYVMYRKSDKPLYGNDRFEGYCLDLLKELSNILGFIYDVKLVPDGKYGAQNDKGEWNGMVKELIDHRADLAVAPLTITYVREKVIDFSKPFMTLGISILYRKPNGTNPGVFSFLNPLSPDIWMYVLLACLGVSCVLFVIARFTPYEWYNPHPCNPDSDVVENNFTLLNSFWFGVGALMQQGSELMPKALSTRIVGGIWWFFTLIIISSYTANLAAFLTVERMESPIDSADDLAKQTKIEYGAVRDGSTMTFFKKSKISTYEKMWAFMSSRQQTALVRNSDEGIQRVLTTDYALLMESTSIEYVTQRNCNLTQIGGLIDSKGYGVGTPIGSPYRDKITIAILQLQEEGKLHMMKEKWWRGNGCPEEDNKEASALGVENIGGIFIVLAAGLVLSVFVAIGEFIYKSRKNNDIEQCLSFNAIMEELGISLKNQKKIKKKSRTKGKSSFTSILTCHQRRTQRKETVA

SEQ ID NO: 6408 - protein, 353 aa, Homo sapiens [sequence omitted]

SEQ ID NO: 6409 - protein, 919 aa, Homo sapiens
MEHGTLLAQPGLWTRDTSWALLYFLCYILPQTAPQVLRIGGIFETVENEPVNVEELAFKFAVTSINRNRTLMPNTTLTYDIQRINLFDSFEASRRACDQLALGVAALFGPSHSSSVSAVQSICNALEVPHIQTRWKHPSVDNKDLFYINLYPDYAAISRAILDLVLYYNWKTVTVVYEDSTGLIRLQELIKAPSRYNIKIKIRQLPSGNKDAKPLLKEMKKGKEFYVIFDCSHETAAEILKQILFMGMMTEYYHYFFTTLDLFALDLELYRYSGVNMTGFRLLNIDNPHVSSIIEKWSMERLQAPPRPETGLLDGMMTTEAALMYDAVYMVAIASHRASQLTVSSLQCHRHKPWRLGPRFMNLIKEASRWDGLTGHITFNKTNGLRKDFDLDIISLKEEGTEKAAGEVSKHLYKVWKKIGIWNSNSGLNMTDSNKDKSSNITDSLANRTLIVTTILEEPYVMYRKSDKPLYGNDRFEGYCLDLLKELSNILGFIYDVKLVPDGKYGAQNDKGEWNGMVKELIDHRADLAVAPLTITYVREKVIDFSKPFMTLGISILYRKPNGTNPGVFSFLNPLSPDIWMYVLLACLGVSCVLFVIARFTPYEWYNPHPCNPDSDVVENNFTLLNSFWFGVGALMQQGSELMPKALSTRIVGGIWWFFTLIIISSYTANLAAFLTVERMESPIDSADDLAKQTKIEYGAVRDGSTMTFFKKSKISTYEKMWAFMSSRQQTALVRNSDEGIQRVLTTDYALLMESTSIEYVTQRNCNLTQIGGLIDSKGYGVGTPIGSPYRDKITIAILQLQEEGKLHMMKEKWWRGNGCPEEDNKEASALGVENIGGIFIVLAAGLVLSVFVAIGEFIYKSRKNNDIEQAFCFFYGLQCKQTHPTNSTSGTTLSTDLECGKLIREERGIRKQSSVHTV

SEQ ID NO: 6410 - protein, 869 aa, Homo sapiens
MKIIFPILSNPVFRRTVKLLLCLLWIGYSQGTTHVLRFGGIFEYVESGPMGAEELAFRFAVNTINRNRTLLPNTTLTYDTQKINLYDSFEASKKACDQLSLGVAAIFGPSHSSSANAVQSICNALGVPHIQTRWKHQVSDNKDSFYVSLYPDFSSLSRAILDLVQFFKWKTVTVVYDDSTGLIRLQELIKAPSRYNLRLKIRQLPADTKDAKPLLKEMKRGKEFHVIFDCSHEMAAGILKQALAMGMMTEYYHYIFTTLDLFALDVEPYRYSGVNMTGFRILNTENTQVSSIIEKWSMERLQAPPKPDSGLLDGFMTTDAALMYDAVHVVSVAVQQFPQMTVSSLQCNRHKPWRFGTRFMSLIKEAHWEGLTGRITFNKTNGLRTDFDLDVISLKEEGLEKIGTWDPASGLNMTESQKGKPANITDSLSNRSLIVTTILEEPYVLFKKSDKPLYGNDRFEGYCIDLLRELSTILGFTYEIRLVEDGKYGAQDDANGQWNGMVRELIDHKADLAVAPLAITYVREKVIDFSKPFMTLGISILYRKPNGTNPGVFSFLNPLSPDIWMYILLAYLGVSCVLFVIARFSPYEWYNPHPCNPDSDVVENNFTLLNSFWFGVGALMQQGSELMPKALSTRIVGGIWWFFTLIIISSYTANLAAFLTVERMESPIDSADDLAKQTKIEYGAVEDGATMTFFKKSKISTYDKMWAFMSSRRQSVLVKSNEEGIQRVLTSDYAFLMESTTIEFVTQRNCNLTQIGGLIDSKGYGVGTPMGSPYRDKITIAILQLQEEGKLHMMKEKWWRGNGCPEEESKEASALGVQNIGGIFIVLAAGLVLSVFVAVGEFLYKSKKNAQLEKESSIWLVPPYHPDTV

SEQ ID NO: 6411 - protein, 908 aa, Homo sapiens
MKIIFPILSNPVFRRTVKLLLCLLWIGYSQGTTHVLRFGGIFEYVESGPMGAEELAFRFAVNTINRNRTLLPNTTLTYDTQKINLYDSFEASKKACDQLSLGVAAIFGPSHSSSANAVQSICNALGVPHIQTRWKHQVSDNKDSFYVSLYPDFSSLSRAILDLVQFFKWKTVTVVYDDSTGLIRLQELIKAPSRYNLRLKIRQLPADTKDAKPLLKEMKRGKEFHVIFDCSHEMAAGILKQALAMGMMTEYYHYIFTTLDLFALDVEPYRYSGVNMTGFRILNTENTQVSSIIEKWSMERLQAPPKPDSGLLDGFMTTDAALMYDAVHVVSVAVQQFPQMTVSSLQCNRHKPWRFGTRFMSLIKEAHWEGLTGRITFNKTNGLRTDFDLDVISLKEEGLEKIGTWDPASGLNMTESQKGKPANITDSLSNRSLIVTTILEEPYVLFKKSDKPLYGNDRFEGYCIDLLRELSTILGFTYEIRLVEDGKYGAQDDANGQWNGMVRELIDHKADLAVAPLAITYVREKVIDFSKPFMTLGISILYRKPNGTNPGVFSFLNPLSPDIWMYILLAYLGVSCVLFVIARFSPYEWYNPHPCNPDSDVVENNFTLLNSFWFGVGALMQQGSELMPKALSTRIVGGIWWFFTLIIISSYTANLAAFLTVERMESPIDSADDLAKQTKIEYGAVEDGATMTFFKKSKISTYDKMWAFMSSRRQSVLVKSNEEGIQRVLTSDYAFLMESTTIEFVTQRNCNLTQIGGLIDSKGYGVGTPMGSPYRDKITIAILQLQEEGKLHMMKEKWWRGNGCPEEESKEASALGVQNIGGIFIVLAAGLVLSVFVAVGEFLYKSKKNAQLEKRSFCSAMVEELRMSLKCQRRLKHKPQAPVIVKTEEVINMHTFNDRRLPGKETMA

SEQ ID NO: 6412 - protein, 302 aa, Homo sapiens
MRRNTQDENMRKWFKVTICIFVSHFTAPYSVKNKLKPGQMEMLKLTMNKRYNVSQQALDLQNLRFDPDLMGRDIDIILNRRNCMAATLKITERNFPELLSLNLCNNKLYQLDGLSDITEKAPKVKTLNLSKNKLESAWELGKVKGLKLEELWLEGNPLCSTFSDQSAYVSAIRDCFPKLLRLDGRELSAPVIVDIDSSETMKPCKENFTGSETLKHLVLQFLQQSNLCKYFKDSRNIKILKDPYLQRKLLKHTKCPRNVDSLSALPETQHDFTSILVDMWYQTVNTCFLPRAGPESQRWVGG

SEQ ID NO: 6413 - protein, 368 aa, Homo sapiens
MRRNTQDENMRKWFKVTIPYGIKYDKAWLMNSIQSNCSVPFTPVDFHYIRNRACFFVQVASAASALKDVSYKIYDDENQKICIFVSHFTAPYSVKNKLKPGQMEMLKLTMNKRYNVSQQALDLQNLRFDPDLMGRDIDIILNRRNCMAATLKITERNFPELLSLNLCNNKLYQLDGLSDITEKAPKVKTLNLSKNKLESAWELGKVKGLKLEELWLEGNPLCSTFSDQSAYVSAIRDCFPKLLRLDGRELSAPVIVDIDSSETMKPCKENFTGSETLKHLVLQFLQQSNLCKYFKDSRNIKILKDPYLQRKLLKHTKCPRNVDSLSALPETQHDFTSILVDMWYQTVNTCFLPRAGPESQSGRMVSGF

SEQ ID NO: 6414 - protein, 397 aa, Homo sapiens
MRRNTQDENMRKWFKVTIPYGIKYDKAWLMNSIQSNCSVPFTPVDFHYIRNRACFFVQVASAASALKDVSYKIYDDENQKICIFVSHFTAPYSVKNKLKPGQMEMLKLTMNKRYNVSQQALDLQNLRFDPDLMGRDIDIILNRRNCMAATLKITERNFPELLSLNLCNNKLYQLDGLSDITEKAPKVKTLNLSKNKLESAWELGKVKGLKLEELWLEGNPLCSTFSDQSAYVSAIRDCFPKLLRLDGRELSAPVIVDIDSSETMKPCKENFTGSETLKHLVLQFLQQSNLCKYFKDSRNIKILKDPYLQRKLLKHTKCPRNVDSLSALPETQHDFTSILVDMWYQTVNTCFLPRAGPESQRWWCLLSLKWKDGLRVLILPSCGPSSLPLAAIPVCAS

SEQ ID NO: 6415 - protein, 626 aa, Homo sapiens
MCSTLKKCGTYRTEVAECHDHGSTFQGRKKGGSSFRDNFDKRSCHYEHGGYERPPSHCQENDGSVEMRDVHKDQQLRHTPYSIRCERRMKWHSEDEIRITTWRNRKPPERKMSQNTQDGYTRNWFKVTIPYGIKYDKAWLMNSIQSHCSDRFTPVDFHYVRNRACFFVQDASAASALKDVSYKIYDDENQKICIFVNHSTAPYSVKNKLKPGQMEMLKLTMNKRYNVSQQALDLQNLRFDPDLMGRDIDIILNRRNCMAATLKIIERNFPELLSLNLCNNKLYQLDGLSDITEKAPKVKTLNLSKNKLESAWELGKVKGLKLEELWLEGNPLCSTFSDQSAYVSAIRDCFPKLLRLDGRELSAPVIVDIDSSETMKPCKENFTGSETLKHLVLQFLQQYYSIYDSGDRQGLLGAYHDEACFSLAIPFDPKDSAPSSLCKYFEDSRNMKTLKDPYLKGELLRRTKRDIVDSLSALPKTQHDLSSILVDVWCQTERMLCFSVNGVFKEVEGQSQGSVLAFTRTFIATPGSSSSLCIVNDELFVRDASPQETQSAFSIPVSTLSSSSEPSLSQEQQEMVQAFSAQSGMKLEWSQKCLQDNEWNYTRAGQAFTMLQTEGKIPAEAFKQIS

SEQ ID NO: 6416 - protein, 305 aa, Homo sapiens
MRRNTQDENMRKWFKVTICIFVSHFTAPYSVKNKLKPGQMEMLKLTMNKRYNVSQQALDLQNLRFDPDLMGRDIDIILNRRNCMAATLKITERNFPELLSLNLCNNKLYQLDGLSDITEKAPKVKTLNLSKNKLESAWELGKVKGLKLEELWLEGNPLCSTFSDQSAYVSAIRDCFPKLLRLDGRELSAPVIVDIDSSETMKPCKENFTGSETLKHLVLQFLQQSNLCKYFKDSRNIKILKDPYLQRKLLKHTKCPRNVDSLSALPETQHDFTSILVDMWYQTVNTCFLPRAGPESQSGRMVSGF

SEQ ID NO: 6417 - protein, 168 aa, Homo sapiens
MRRNTQDENMRKWFKVTIPYGIKYDKAWLMNSIQSNCSVPFTPVDFHYIRNRACFFVQVASAASALKDVSYKIYDDENQKICIFVSHFTAPYSVKNKLKPGQMEMLKLTMNKRYNVSQQALDLQNLRFDPDLMGRDIDIILNRRNCMAATLKITERNFPERRLPKSRP

SEQ ID NO: 6418 - protein, 793 aa, Homo sapiens
MDSWFILVLLGSGLICVSANNATTVAPSVGITRLINSSTAEPVKEEAKTSNPTSSLTSLSVAPTFSPNITLGPTYLTTVNSSDSDNGTTRTASTNSIGITISPNGTWLPDNQFTDARTEPWEGNSSTAATTPETFPPSDETPIIAVMVALSSLLVIVFIIIVLYMLRFKKYKQAGSHSNSFRLSNGRTEDVEPQSVPLLARSPSTNRKYPPLPVDKLEEEINRRMADDNKLFREEFNALPACPIQATCEAASKEENKEKNRYVNILPYDHSRVHLTPVEGVPDSDYINASFINGYQEKNKFIAAQGPKEETVNDFWRMIWEQNTATIVMVTNLKERKECKCAQYWPDQGCWTYGNIRVSVEDVTVLVDYTVRKFCIQQVGDMTNRKPQRLITQFHFTSWPDFGVPFTPIGMLKFLKKVKACNPQYAGAIVVHCSAGVGRTGTFVVIDAMLDMMHTERKVDVYGFVSRIRAQRCQMVQTDMQYVFIYQALLEHYLYGDTELEVTSLETHLQKIYNKIPGTSNNGLEEEFKKLTSIKIQNDKMRTGNLPANMKKNRVLQIIPYEFNRVIIPVKRGEENTDYVNASFIDGYRQKDSYIASQGPLLHTIEDFWRMIWEWKSCSIVMLTELEERGQEKCAQYWPSDGLVSYGDITVELKKEEECESYTVRDLLVTNTRENKSRQIRQFHFHGWPEVGIPSDGKGMISIIAAVQKQQQQSGNHPITVHCSAGAGRTGTFCALSTVLERVKAEGILDVFQTVKSLRLQRPHMVQTLEQYEFCYKVVQEYIDAFSDYANFK

SEQ ID NO: 6419 - protein, 802 aa, Homo sapiens
MDSWFILVLLGSGLICVSANNATTVAPSVGITRLINSSTAEPVKEEAKTSNPTSSLTSLSVAPTFSPNITLGPTYLTTVNSSDSDNGTTRTASTNSIGITISPNGTWLPDNQFTDARTEPWEGNSSTAATTPETFPPSDETPIIAVMVALSSLLVIVFIIIVLYMLRFKKYKQAGSHSNSKQAGSHSNSFRLSNGRTEDVEPQSVPLLARSPSTNRKYPPLPVDKLEEEINRRMADDNKLFREEFNALPACPIQATCEAASKEENKEKNRYVNILPYDHSRVHLTPVEGVPDSDYINASFINGYQEKNKFIAAQGPKEETVNDFWRMIWEQNTATIVMVTNLKERKECKCAQYWPDQGCWTYGNIRVSVEDVTVLVDYTVRKFCIQQVGDMTNRKPQRLITQFHFTSWPDFGVPFTPIGMLKFLKKVKACNPQYAGAIVVHCSAGVGRTGTFVVIDAMLDMMHTERKVDVYGFVSRIRAQRCQMVQTDMQYVFIYQALLEHYLYGDTELEVTSLETHLQKIYNKIPGTSNNGLEEEFKKLTSIKIQNDKMRTGNLPANMKKNRVLQIIPYEFNRVIIPVKRGEENTDYVNASFIDGYRQKDSYIASQGPLLHTIEDFWRMIWEWKSCSIVMLTELEERGQEKCAQYWPSDGLVSYGDITVELKKEEECESYTVRDLLVTNTRENKSRQIRQFHFHGWPEVGIPSDGKGMISIIAAVQKQQQQSGNHPITVHCSAGAGRTGTFCALSTVLERVKAEGILDVFQTVKSLRLQRPHMVQTLEQYEFCYKVVQEYIDAFSDYANFK

SEQ ID NO: 6420 - protein, 802 aa, Homo sapiens
MDSWFILVLLGSGLICVSANNATTVAPSVGITRLINSSTAEPVKEEAKTSNPTSSLTSLSVAPTFSPNITLGPTYLTTVNSSDSDNGTTRTASTNSIGITISPNGTWLPDNQFTDARTEPWEGNSSTAATTPETFPPSGNSDSKDRRDETPIIAVMVALSSLLVIVFIIIVLYMLRFKKYKQAGSHSNSFRLSNGRTEDVEPQSVPLLARSPSTNRKYPPLPVDKLEEEINRRMADDNKLFREEFNALPACPIQATCEAASKEENKEKNRYVNILPYDHSRVHLTPVEGVPDSDYINASFINGYQEKNKFIAAQGPKEETVNDFWRMIWEQNTATIVMVTNLKERKECKCAQYWPDQGCWTYGNIRVSVEDVTVLVDYTVRKFCIQQVGDMTNRKPQRLITQFHFTSWPDFGVPFTPIGMLKFLKKVKACNPQYAGAIVVHCSAGVGRTGTFVVIDAMLDMMHTERKVDVYGFVSRIRAQRCQMVQTDMQYVFIYQALLEHYLYGDTELEVTSLETHLQKIYNKIPGTSNNGLEEEFKKLTSIKIQNDKMRTGNLPANMKKNRVLQIIPYEFNRVIIPVKRGEENTDYVNASFIDGYRQKDSYIASQGPLLHTIEDFWRMIWEWKSCSIVMLTELEERGQEKCAQYWPSDGLVSYGDITVELKKEEECESYTVRDLLVTNTRENKSRQIRQFHFHGWPEVGIPSDGKGMISIIAAVQKQQQQSGNHPITVHCSAGAGRTGTFCALSTVLERVKAEGILDVFQTVKSLRLQRPHMVQTLEQYEFCYKVVQEYIDAFSDYANFK

SEQ ID NO: 6421 - protein, 793 aa, Homo sapiens
MDSWFILVLLGSGLICVSANNATTVAPSVGITRLINSSTAEPVKEEAKTSNPTSSLTSLSVAPTFSPNITLGPTYLTTVNSSDSDNGTTRTASTNSIGITISPNGTWLPDNQFTDARTEPWEGNSSTAATTPETFPPSVALSSLLVIVFIIIVLYMLRFKKYKQAGSHSNSKQAGSHSNSFRLSNGRTEDVEPQSVPLLARSPSTNRKYPPLPVDKLEEEINRRMADDNKLFREEFNALPACPIQATCEAASKEENKEKNRYVNILPYDHSRVHLTPVEGVPDSDYINASFINGYQEKNKFIAAQGPKEETVNDFWRMIWEQNTATIVMVTNLKERKECKCAQYWPDQGCWTYGNIRVSVEDVTVLVDYTVRKFCIQQVGDMTNRKPQRLITQFHFTSWPDFGVPFTPIGMLKFLKKVKACNPQYAGAIVVHCSAGVGRTGTFVVIDAMLDMMHTERKVDVYGFVSRIRAQRCQMVQTDMQYVFIYQALLEHYLYGDTELEVTSLETHLQKIYNKIPGTSNNGLEEEFKKLTSIKIQNDKMRTGNLPANMKKNRVLQIIPYEFNRVIIPVKRGEENTDYVNASFIDGYRQKDSYIASQGPLLHTIEDFWRMIWEWKSCSIVMLTELEERGQEKCAQYWPSDGLVSYGDITVELKKEEECESYTVRDLLVTNTRENKSRQIRQFHFHGWPEVGIPSDGKGMISIIAAVQKQQQQSGNHPITVHCSAGAGRTGTFCALSTVLERVKAEGILDVFQTVKSLRLQRPHMVQTLEQYEFCYKVVQEYIDAFSDYANFK

SEQ ID NO: 6422 - protein, 1099 aa, Homo sapiens
MGKLIRMGPQERWLLRTKRLHWSRLLFLLGMLIIGSTYQHLRRPRGLSSLWAAVSSHQPIKLASRDLSSEEMMMMSSSPSKPSSEMGGKMLVPQASVGSDEATLSMTVENIPSMPKRTAKMIPTTTKNNYSPTAAGTERRKEDTPTSSRTLTYYTSTSSRQIVKKYTPTPRGEMKSYSPTQVREKVKYTPSPRGRRVGTYVPSTFMTMETSHAITPRTTVKDSDITATYKILETNSLKRIMEETTPTTLKGMFDSTPTFLTHEVEANVLTSPRSVMEKNNLFPPRRVESNSSAHPWGLVGKSNPKTPQGTVLLHTPATSEGQVTISTMTGSSPAETKAFTAAWSLRNPSPRTSVSAIKTAPAIVWRLAKKPSTAPSTSTTPTVRAKLTMQVHHCVVVKPTPAMLTTPSPSLTTALLPEELSPSPSVLPPSLPDLHPKGEYPPDLFSVEERRQGWVVLHVFGMMYVFVALAIVCDEYFVPALGVITDKLQISEDVAGATFMAAGGSAPELFTSLIGVFISHSNVGIGTIVGSAVFNILFVIGTCSLFSREILNLTWWPLFRDVSFYILDLIMLILFFLDSLIAWWESLLLLLAYAFYVFTMKWNKHIEVWVKEQLSRRPVAKVMALEDLSKPGDGAIAVDELQDNKKLKLPSLLTRGSSSTSLHNSTIRSTIYQLMLHSLDPLREVRLAKEKEEESLNQGARAQPQAKAESKPEEEEPAKLPAVTVTPAPVPDIKGDQKENPGGQEDVAEAESTGEMPGEEGETAGEGETEEKSGGETQPEGEGETETQGKGEECEDENEAEGKGDNEGEDEGEIHAEDGEMKGNEGETESQELSAENHGEAKNDEKGVEDGGGSDGGDSEEEEEEEEEQEEEEEEEEQEEEEEEEEEEEEKGNEEPLSLDWPETRQKQAIYLFLLPIVFPLWLTVPDVRRQESRKFFVFTFLGSIMWIAMFSYLMVWWAHQVGETIGISEEIMGLTILAAGTSIPDLITSVIVARKGLGDMAVSSSVGSNIFDITVGLPVPWLLFSLINGLQPVPVSSNGLFCAIVLLFLMLLFVISSIASCKWRMNKILGFTMFLLYFVFLIISVMLEDRIISCPVSV

SEQ ID NO: 6423 - protein, 1081 aa, Homo sapiens
MGKLIRMGPQERWLLRTKRLHWSRLLFLLGMLIIGSTYQHLRRPRGLSSLWAAVSSHQPIKLASRDLSSEEMMMMSSSPSKPSSEMGGKMLVPQASVGSDEATLSMTVENIPSMPKRTAKMIPTTTKNNYSPTAAGTERRKEDTPTSSRTLTYYTSTSSRQIVKKYTPTPRGEMKSYSPTQVREKVKYTPSPRGRRVGTYVPSTFMTMETSHAITPRTTVKDSDITATYKILETNSLKRIMEETTPTTLKGMFDSTPTFLTHEVEANVLTSPRSVMEKNNLFPPRRVESNSSAHPWGLVGKSNPKTPQGTVLLHTPATSEGQVTISTMTGSSPAETKAFTAAWSLRNPSPRTSVSAIKTAPAIVWRLAKKPSTAPSTSTTPTVRAKLTMQVHHCVVVKPTPAMLTTPSPSLTTALLPEELSPSPSVLPPSLPDLHPKGEYPPDLFSVEERRQGWVVLHVFGMMYVFVALAIVCDEYFVPALGVITDKLQISEDVAGATFMAAGGSAPELFTSLIGVFISHSNVGIGTIVGSAVFNILFVIGTCSLFSREILNLTWWPLFRDVSFYILDLIMLILFFLDSLIAWWESLLLLLAYAFYVFTMKWNKHIEVWVKEQLSRRPVAKVMALEDLSKLPSLLTRGSSSTSLHNSTIRSTIYQLMLHSLDPLREVRLAKEKEEESLNQGARAQPQAKAESKPEEEEPAKLPAVTVTPAPVPDIKGDQKENPGGQEDVAEAESTGEMPGEEGETAGEGETEEKSGGETQPEGEGETETQGKGEECEDENEAEGKGDNEGEDEGEIHAEDGEMKGNEGETESQELSAENHGEAKNDEKGVEDGGGSDGGDSEEEEEEEEEQEEEEEEEEQEEEEEEEEEEEEKGNEEPLSLDWPETRQKQAIYLFLLPIVFPLWLTVPDVRRQESRKFFVFTFLGSIMWIAMFSYLMVWWAHQVGETIGISEEIMGLTILAAGTSIPDLITSVIVARKGLGDMAVSSSVGSNIFDITVGLPVPWLLFSLINGLQPVPVSSNGLFCAIVLLFLMLLFVISSIASCKWRMNKILGFTMFLLYFVFLIISVMLEDRIISCPVSV

SEQ ID NO: 6424 - protein, 224 aa, Homo sapiens
MRLWKARVLKLVLKTAKDSRLGLNSKWLSLKLGDAGNPRSLAIRFILTNYNKLSIQSWFSLRRVEIISNNSIQAVFNPTGVYAPSGYSYRCQRVGSLQQDQALLLPSDTDDGSSLWEVTFIDFQIQGFAIKGGRFTKAQDCASSFSPAFLIGLAMSLILLLVLAYALHMLIYLRYLDQQYDLIASPAHFSQLKARDTAEEKELLRSQGAECYKLRSQQISKIYV

SEQ ID NO: 6425 - protein, 2050 aa, Homo sapiens
MLRVIVESASNIPKTKFGKPDPIVSVIFKDEKKKTKKVDNELNPVWNEILEFDLRGIPLDFSSSLGIIVKDFETIGQNKLIGTATVALKDLTGDQSRSLPYKLISLLNEKGQDTGATIDLVIGYDPPSAPHPNDLSGPSVPGMGGDGEEDEGDEDRLDNAVRGPGPKGPVGTVSEAQLARRLTKVKNSRRMLSNKPQDFQIRVRVIEGRQLSGNNIRPVVKVHVCGQTHRTRIKRGNNPFFDELFFYNVNMTPSELMDEIISIRVYNSHSLRADCLMGEFKIDVGFVYDEPGHAVMRKWLLLNDPEDTSSGSKGYMKVSMFVLGTGDEPPPERRDRDNDSDDVESNLLLPAGIALRWVTFLLKIYRAEDIPQMDDAFSQTVKEIFGGNADKKNLVDPFVEVSFAGKKVCTNIIEKNANPEWNQVVNLQIKFPSVCEKIKLTIYDWDRLTKNDVVGTTYLHLSKIAASGGEVEDFSSSGTGAASYTVNTGETEVGFVPTFGPCYLNLYGSPREYTGFPDPYDELNTGKGEGVAYRGRILVELATFLEKTPPDKKLEPISNDDLLVVEKYQRRRKYSLSAVFHSATMLQDVGEAIQFEVSIGNYGNKFDTTCKPLASTTQYSRAVFDGNYYYYLPWAHTKPVVTLTSYWEDISHRLDAVNTLLAMAERLQTNIEALKSGIQGKIPANQLAELWLKLIDEVIEDTRYTLPLTEGKANVTVLDTQIRKLRSRSLSQIHEAAVRMRSEATDVKSTLAEIEDWLDKLMQLTEEPQNSMPDIIIWMIRGEKRLAYARIPAHQVLYSTSGENASGKYCGKTQTIFLKYPQEKNNGPKVPVELRVNIWLGLSAVEKKFNSFAEGTFTVFAEMYENQALMFGKWGTSGLVGRHKFSDVTGKIKLKREFFLPPKGWEWEGEWIVDPERSLLTEADAGHTEFTDEVYQNESRYPGGDWKPAEDTYTDANGDKAASPSELTCPPGWEWEDDAWSYDINRAVDEKGWEYGITIPPDHKPKSWVAAEKMYHTHRRRRLVRKRKKDLTQTASSTARAMEELQDQEGWEYASLIGWKFHWKQRSSDTFRRRRWRRKMAPSETHGAAAIFKLEGALGADTTEDGDEKSLEKQKHSATTVFGANTPIVSCNFDRVYIYHLRCYVYQARNLLALDKDSFSDPYAHICFLHRSKTTEIIHSTLNPTWDQTIIFDEVEIYGEPQTVLQNPPKVIMELFDNDQVGKDEFLGRSIFSPVVKLNSEMDITPKLLWHPVMNGDKACGDVLVTAELILRGKDGSNLPILPPQRAPNLYMVPQGIRPVVQLTAIEILAWGLRNMKNFQMASITSPSLVVECGGERVESVVIKNLKKTPNFPSSVLFMKVFLPKEELYMPPLVIKVIDHRQFGRKPVVGQCTIERLDRFRCDPYAGKEDIVPQLKASLLSAPPCRDIVIEMEDTKPLLASKCLSSMSTALSKMASPATVHLTEKEEEIVDWWSKFYASSGEHEKCGQYIQKGYSKLKIYNCELENVAEFEGLTDFSDTFKLYRGKSDENEDPSVVGEFKGSFRIYPLPDDPSVPAPPRQFRELPDSVPQECTVRIYIVRGLELQPQDNNGLCDPYIKITLGKKVIEDRDHYIPNTLNPVFGRMYELSCYLPQEKDLKISVYDYDTFTRDEKVGETIIDLENRFLSRFGSHCGIPEEYCVSGVNTWRDQLRPTQLLQNVARFKGFPQPILSEDGSRIRYGGRDYSLDEFEANKILHQHLGAPEERLALHILRTQGLVPEHVETRTLHSTFQPNISRYYLRVIIWNTKDVILDEKSITGEEMSDIYVKGWIPGNEENKQKTDVHYRSLDGEGNFNWRFVFPFDYLPAEQLCIVAKKEHFWSIDQTEFRIPPRLIIQIWDNDKFSLDDYLGFLELDLRHTIIPAKSPEKCRLDMIPDLKAMNPLKAKTASLFEQKSMKGWWPCYAEKDGARVMAGKVEMTLEILNEKEADERPAGKGRDEPNMNPKLDLPNRPETSFLWFTNPCKTMKFIVWRRFKWVIIGLLFLLILLLFVAVLLYSLPNYLSMKIVKPNV

SEQ ID NO: 6426 - protein, 311 aa, Homo sapiens
MKIFNSPSNSSTFTGFILLGFPCPREGQILLFVLFTVVYLLTLMGNGSIICAVHWDQRLHAPMYILLANFSFLEICYVTSTVPSMLANFLSDTKIISFSGCFLQFYFFFSLGSTECFFLAVMAFDRYLAICRPLRYPTIMTRRLCTNLVVNCWVLGFIWFLIPIVNISQMSFCGSRIIDHFLCDPAPLLTLTCKKGPVIELVFSVLSPLPVFMLFLFIVGSYALVVRAVLRVPSAAGRRKAFSTCGSHLAVVSLFYGSVLVMYGSPPSKNEAGKQKTVTLFYSVVTPLLNPVIYSLRNKDMRKALKKFWGT

SEQ ID NO: 6427 - protein, 927 aa, Homo sapiens
MQRAREAEMMKSQVLFPFLLSLFCGAISQQIRYTIPEELANGSRVGKLAKDLGLSVRELPTRKLRVSAEDYFNVSLESGDLLVNGRIDREKICGRKLECALEFETVAENPMNVFHVVVVIQDINDNAPRFVAKGIDLEICESALPGVKFSLDSAQDADVEGNSLKLYTINPNQYFSLSTKESPDGSKYPVLLLEKPLDREHQSSHRLILTAMDGGDPPLSGTTHIWIRVTDANDNAPVFSQEVYRVSLQENVPWGTSVLRVMATDQDEGINAEITYAFLNSPISTSLFNLNPNTGDITTNGTLDFEETSRYVLSVEAKDGGVHTAHCNVQIEIVDENDNAPEVTFMSFSNQIPEDSDLGTVIALIKVRDKDSGQNGMVTCYTQEEVPFKLESTSKNYYKLVIAGALNREQTADYNVTIIATDKGKPALSSRTSITLHISDINDNAPVFHQASYVVHVSENNPPGASIAQVSASDPDLGPNGRVSYSILASDLEPRELLSYVSVSPQSGVVFAQRAFDHEQLRAFELTLQARDQGSPALSANVSLRVLVGDLNDNAPRVLYPALGPDGSALFDMVPRAAEPGYLVTKVVAVDADSGHNAWLSYHVLQASEPGLFSLGLRTGEVRTARALGDRDAARQRLLVAVRDGGQPPLSATATLHLIFADSLQEVLPDLSDRPEPSDPQTELQFYLVVALALISVLFLLAVILAIALRLRRSSSLDTEGCFQTGLCSKSGPGVPPNHSEGTLPYSYNLCIASHSAKTEFNSLNLTPEMAPPQDLLCDDPSMVVCASNEDHKIAYDPSLSSHQAPPNTDWRFSQAQRPGTSGSQNGDDTGTWPNNQFDTEMLQAMILASASEAADGSSTLGGGAGTMGLSARYGPQFTLQHVPDYRQNVYIPGSNATLTNAAGKRDGKAPAGGNGNKKKSGKKEKK

SEQ ID NO: 6428 - protein, 935 aa, Homo sapiens
MANRLQRGDRSRLLLLLCIFLGTLRGFRARQIRYSVPEETEKGSFVGNISKDLGLEPRELAKRGVRIVSRGKTQLFAVNPRSGSLITAGRIDREELCETVSSCFLNMELLVEDTLKIYGVEVEIIDINDNAPSFQEDEVEIKVSEHAIPGARFALPNARDPDVGVNSLQSYQLSPNNYFSLQLRGRTDGAKNPELVLEGSLDREKEAAHLLLLTALDGGDPIRKGAVPIRVVVLDVNDHIPMFTQSVYRVSVPENISSGTRVLMVNATDPDEGINGEVMYSFRNMESKASEIFQLDSQTGEVQVRGSLDFEKYRFYEMEIQGQDGGGLFTTTTMLITVVDVNDNAPEITITSSINSILENSPPGTVIALLNVQDQDSGENGQVSCFIPNHLPFKLEKTYGNYYKLITSRVLDRELVQSYNITLTATDQGSPPLSAETHVWLNVADDNDNPPVFPHSSYSAYIPENNPRGASIFSVTALDPDSKQNALVTYSLTDDTVQGVPLSSYVSINSNTGVLYALQSFDYEQFRDLELRVIARDSGDPPLSSNVSLSLFVLDQNDNAPEILYPALPTDGSTGVELAPRSAEPGYLVTKVVAVDKDSGQNAWLSYRLLKASEPGLFAVGEHTGEVRTARALLDRDALKQSLVVAVQDHGQPPLSATVTLTVAVADSIPEVLADLGSLESLANSETSDLSLYLVVAVAAVSCIFLVFVIVLLALRLWRWHKSRLLQASEGGLAGMPTSHFVGVDGVQAFLQTYSHEVSLIADSQKSHLIFPQPNYGDTLISQESCEKSEPLLIAEDSAIILGKCDPTSNQQAPPNTDWRFSQAQRPGTSGSQNGDDTGTWPNNQFDTEMLQAMILASASEAADGSSTLGGGAGTMGLSARYGPQFTLQHVPDYRQNVYIPGSNATLTNAAGKRDGKAPAGGNGNKKKSGKKEKK

SEQ ID NO: 6429 - protein, 923 aa, Homo sapiens
MGSGAGELGRAERLPVLFLFLLSLFCPALCEQIRYRIPEEMPKGSVVGNLATDLGFSVQELPTRKLRVSSEKPYFTVSAESGELLVSSRLDREEICGKKPACALEFEAVAENPLNFYHVNVEIEDINDHTPKFTQNSFELQISESAQPGTRFILGSAHDADIGSNTLQNYQLSPSDHFSLINKEKSDGSKYPEMVLKTPLDREKQKSYHLTLTALDFGAPPLSSTAQIHVLVTDANDNAPVFSQDVYRVSLSENVYPGTTVLQVTATDQDEGVNAEITFSFSEASQITQFDLNSNTGEITVLNTLDFEEVKEYSIVLEARDGGGMIAQCTVEVEVIDENDNAPEVIFQSLPNLIMEDAELGTHIALLKVRDKDSRHNGEVTCKLEGDVPFKILTSSRNTYKLVTDAVLDREQNPEYNITVTATDRGKPPLSSSSSITLHIGDVNDNAPVFSQSSYIVHVAENNPPGASISQVRASDPDLGPNGQVSYCIMASDLEQRELSSYVSISAESGVVFAQRAFDHEQLRAFELTLQARDQGSPALSANVSLRVLVDDRNDNAPRVLYPALGPDGSALFDMVPHAAEPGYLVTKVVAVDADSGHNAWLSYHVLQASEPGLFSLGLRTGEVRTARALGDRDAVRQRLLVAVRDGGQPPLSATATLHLVFADSLQEVLPDITDRPDPSDLQAELQFYLVVALALISVLFLVAMILAIALRLRRSSSPASWSCFQPGLCVKSESVVPPNYSEGTLPYSYNLCVAHTGKTEFNFLKCSEQLSSGQDILCGDSSGALFPLCNSSELTSHQQAPPNTDWRFSQAQRPGTSGSQNGDDTGTWPNNQFDTEMLQAMILASASEAADGSSTLGGGAGTMGLSARYGPQFTLQHVPDYRQNVYIPGSNATLTNAAGKRDGKAPAGGNGNKKKSGKKEKK

SEQ ID NO: 6430 - protein, 932 aa, Homo sapiens
MAAQPRGGDYRGFFLLSILLGTPWEAWAGRILYSVSEETDKGSFVGDIAKDLGLEPRELAERGVRIISRGRTQLFALNQRSGSLVTAGRIDREEICAQSARCLVNFNILMEDKMNLYPIDVEIIDINDNVPRFLTEEINVKIMENTAPGVRFPLSEAGDPDVGTNSLQSYQLSPNRHFSLAVQSGDDETKYPELVLERVLDREEERVHHLVLTASDGGDPPRSSTAHIQVTVVDVNDHTPVFSLPQYQVTVPENVPVGTRLLTVHAIDLDEGVNGEVTYSFRKITPKLPKMFHLNSLTGEISTLEGLDYEETAFYEMEVQAQDGPGSLTKAKVLITVLDVNDNAPEVTMTSLSSSIPEDTPLGTVIALFYLQDRDSGKNGEVTCTIPENLPFKLEKSIDNYYRLVTTKNLDRETLSLYNITLKATDGGTPPLSRETHIFMQVADTNDNPPTFPHSSYSVYIAENNPRGASIFLVTAQDHDSEDNAQITYSLAEDTIQGAPVSSYVSINSDTGVLYALQSFDYEQLRELQLRVTAHDSGDPPLSSNMSLSLFVLDQNDNPPEILYPALPTDGSTGMELAPRSAEPGYLVTKVVAVDKDSGQNAWLSYLLLKASEPGLFAVGLYTGEVRTARALLDRDALKQSLVVAVQDHGQPPLSATVTLTVAVADSIPEVLADLGSLEPSDGPYNYDLTLYLVVAVATVSCVFLAFVLVLLALRLRRWHKSRLLQASEGGLANVPTSHFVGMDGVQAFLQTYSHEVSLTADSRKSHLIFPQPNYVDMLISQESCEKNDSLLTSVDFQECKENLPSIQQAPPNTDWRFSQAQRPGTSGSQNGDDTGTWPNNQFDTEMLQAMILASASEAADGSSTLGGGAGTMGLSARYGPQFTLQHVPDYRQNVYIPGSNATLTNAAGKRDGKAPAGGNGNKKKSGKKEKK

SEQ ID NO: 6431 - protein, 931 aa, Homo sapiens
MKIQKKLTGCSRLMLLCLSLELLLEAGAGNIHYSVPEETDKGSFVGNIAKDLGLQPQELADGGVRIVSRGRMPLFALNPRSGSLITARRIDREELCAQSMPCLVSFNILVEDKMKLFPVEVEIIDINDNTPQFQLEELEFKMNEITTPGTRVSLPFGQDLDVGMNSLQSYQLSSNPHFSLDVQQGADGPQHPEMVLQSPLDREEEAVHHLILTASDGGEPVRSGTLRIYIQVVDANDNPPAFTQAQYHINVPENVPLGTQLLMVNATDPDEGANGEVTYSFHNVDHRVAQIFRLDSYTGEISNKEPLDFEEYKMYSMEVQAQDGAGLMAKVKVLIKVLDVNDNAPEVTITSVTTAVPENFPPGTIIALISVHDQDSGDNGYTTCFIPGNLPFKLEKLVDNYYRLVTERTLDRELISGYNITITAIDQGTPALSTETHISLLVTDINDNSPVFHQDSYSAYIPENNPRGASIFSVRAHDLDSNENAQITYSLIEDTIQGAPLSAYLSINSDTGVLYALRSFDYEQFRDMQLKVMARDSGDPPLSSNVSLSLFLLDQNDNAPEILYPALPTDGSTGVELAPLSAEPGYLVTKVVAVDRDSGQNAWLSYRLLKASEPGLFSVGLHTGEVRTARALLDRDALKQSLVVAVQDHGQPPLSATVTLTVAVADRISDILADLGSLEPSAKPNDSDLTLYLVVAAAAVSCVFLAFVIVLLAHRLRRWHKSRLLQASGGGLASMPGSHFVGVDGVRAFLQTYSHEVSLTADSRKSHLIFPQPNYADTLISQESCEKKGFLSAPQSLLEDKKEPFSQQAPPNTDWRFSQAQRPGTSGSQNGDDTGTWPNNQFDTEMLQAMILASASEAADGSSTLGGGAGTMGLSARYGPQFTLQHVPDYRQNVYIPGSNATLTNAAGKRDGKAPAGGNGNKKKSGKKEKK

SEQ ID NO: 6432 - protein, 932 aa, Homo sapiens [sequence omitted]

SEQ ID NO: 6433 - protein, 923 aa, Homo sapiens
MGSGAGELGRAERLPVLFLFLLSLFCPALCEQIRYRIPEEMPKGSVVGNLATDLGFSVQELPTRKLRVSSEKPYFTVSAESGELLVSSRLDREEICGKKPACALEFEAVAENPLNFYHVNVEIEDINDHTPKFTQNSFELQISESAQPGTRFILEVAEDADIGLNSLQKYKLSLNPSFSLIIKEKQDGSKYPELALEKTLDREQQSYHRLVLTALDGGHPPLSGTTELRIQVTDANDNPPVFNRDVYRVSLRENVPPGTTVLQVSATDQDEGINSEITYSFYRTGQIFSLNSKSGEITTQKKLDFEETKEYSMVVEGRDGGGLVAQCTVEINIQDENDNSPEVTFHSLLEMILENAVPGTLIALIKIHDQDSGENGEVNCQLQGEVPFKIISSSKNSYKLVTDGTLDREQTPEYNVTITATDRGKPPLSSSISVILHIRDVNDNAPVFHQASYLVSVPENNPPGASIAQVCASDLDLGLNGQVSYSIMASDLEPLALASYVSMSAQSGVVFAQRAFDYEQLRTFELTLQARDQGSPALSANVSLRVLVGDRNDNAPRVLYPALGPDGSALFDMVPRAAEPGYLVTKVVAVDADSGHNAWLSYHVLQASEPGLFSLGLRTGEVRTARALGDRDAARQRLLVAVRDGGQPPLSATATLHLVFADSLQEVLPDITDRPVPSDPQAELQFYLVVALALISVLFLLAVILAVALRLRRSSSPAAWSCFQPGLCVKSGPVVPPNYSQGTLPYSYNLCVAHTGKTEFNFLKCSEQLSSGQDILCGDSSGALFPLCNSSESTSHPELQAPPNTDWRFSQAQRPGTSGSQNGDDTGTWPNNQFDTEMLQAMILASASEAADGSSTLGGGAGTMGLSARYGPQFTLQHVPDYRQNVYIPGSNATLTNAAGKRDGKAPAGGNGNKKKSGKKEKK

SEQ ID NO: 6434 - protein, 936 aa, Homo sapiens
MAAQRNRSKESKDCSGLVLLCLFFGIPWEAGARQISYSIPEELEKGSFVGNISKDLGLAPRELAERGVRIVSRGRTQLFSLNPRSGSLITAGRIDREELCAQSARCVVSFNILVEDRVKLFGIEIEVTDINDNAPKFQAENLDVKINENVAAGMRFPLPEAIDPDVGVNSLQSYQLSPNKHFSLRVQSRANGVKYPELVLEHSLDREEEAIHHLVLTASDGGDPLRSGTVLVSVTVFDANDNAPVFTLPEYRVSVPENLPVGTQLLTVTATDRDEGANGEVTYSFRKLPDTQLLKFQLNKYTGEIKISENLDYEETGFYEIEIQAEDGGAYLATAKVLITVEDVNDNSPELTITSLFSPVTEDSPLGTVVALLNVHDLDSEQNGQVTCSILAYLPFKLEKSIDSYYRLVIHRALDREQVSSYNITVTATDGGSPPLSTEAHFMLQVADINDNPPTFSQVSYFTYIPENNARGASIFSVTALDPDSKENAQIIYSLAEDTIQGVPLSSYISINSDTGVLYALRSFDYEQFHELQMQVTASDSGDPPLSSNVSLSLFVLDQNDNAPEILYPALPTDGSTGVELAPRSAEPGYLVTKVVAVDRDSGQNAWLSYRLLKASEPGLFAVGEHTGEVRTARALLDRDALKQSLVVAVQDHGQPPLSATVTLTVAVADSIPQVLADLGSFESPANSETSDLTLYLVVAVAAVSCVFLAFVIVLLAHRLRRWHKSRLLQASGGGLTGVSGSHFVGVDGVRAFLQTYSHEVSLTADSRKSHLIFPQPNYADTLISQESCEKNDPLSLLDDSKFPIEDTPLVPQAPPNTDWRFSQAQRPGTSGSQNGDDTGTWPNNQFDTEMLQAMILASASEAADGSSTLGGGAGTMGLSARYGPQFTLQHVPDYRQNVYIPGSNATLTNAAGKRDGKAPAGGNGNKKKSGKKEKK

SEQ ID NO: 6435 - protein, 932 aa, Homo sapiens
MIPARLHRDYKGLVLLGILLGTLWETGCTQIRYSVPEELEKGSRVGDISRDLGLEPRELAERGVRIIPRGRTQLFALNPRSGSLVTAGRIDREELCMGAIKCQLNLDILMEDKVKIYGVEVEVRDINDNAPYFRESELEIKISENAATEMRFPLPHAWDPDIGKNSLQSYELSPNTHFSLIVQNGADGSKYPELVLKRALDREEKAAHHLVLTASDGGDPVRTGTARIRVMVLDANDNAPAFAQPEYRASVPENLALGTQLLVVNATDPDEGVNAEVRYSFRYVDDKAAQVFKLDCNSGTISTIGELDHEESGFYQMEVQAMDNAGYSARAKVLITVLDVNDNAPEVVLTSLASSVPENSPRGTLIALLNVNDQDSEENGQVICFIQGNLPFKLEKSYGNYYSLVTDIVLDREQVPSYNITVTATDRGTPPLSTETHISLNVADTNDNPPVFPQASYSAYIPENNPRGVSLVSVTAHDPDCEENAQITYSLAENTIQGASLSSYVSINSDTGVLYALSSFDYEQFRDLQVKVMARDNGHPPLSSNVSLSLFVLDQNDNAPEILYPALPTDGSTGVELAPRSAEPGYLVTKVVAVDRDSGQNAWLSYRLLKASEPGLFSVGLHTGEVRTARALLDRDALKQSLVVAVQDHGQPPLSATVTLTVAVADSIPQVLADLGSLESPANSETSDLTLYLVVAVAAVSCVFLAFVILLLALRLRRWHKSRLLQASGGGLTGAPASHFVGVDGVQAFLQTYSHEVSLTTDSRKSHLIFPQPNYADMLVSQESFEKSEPLLLSGDSVFSKDSHGLIEQAPPNTDWRFSQAQRPGTSGSQNGDDTGTWPNNQFDTEMLQAMILASASEAADGSSTLGGGAGTMGLSARYGPQFTLQHVPDYRQNVYIPGSNATLTNAAGKRDGKAPAGGNGNKKKSGKKEKK

SEQ ID NO: 6436 - protein, 930 aa, Homo sapiens
MGGSCAQRRRAGPRQVLFPLLLPLFYPTLSEPIRYSIPEELAKGSVVGNLAKDLGLSVLDVSARKLRVSAEKLHFSVDAESGDLLVKNRIDREQICKERRRCELQLEAVVENPLNIFHVIVVIEDVNDHAPQFDKKEIHLEIFESASAGTRLSLDPATDPDININSIKDYKINSNPYFSLMVRVNSDGGKYPELSLEKLLDREEQRSHSLILTALDGGDPPRSATAHIEISVKDTNDNPPVFSRDEYRISLSENLPPGSPVLQVTATDQDEGVNAEINYYFRSTAQSTKHMFSLDEKTGMIKNNQSFDFEDVERYTMEVEAKDGGGLSTQCKVIIEILDENDNSPEIIITSLSDQILENSPPGMVVALFKTRDLDFGGNGEVRCNIETDIPFKIYSSSNNYYKLVTDGALDREQTPEYNVTIVATDRGKPPLSSSRSITLYVADINDNAPVFDQTSYVVHVAENNPPGASIAQVSASDPDLGLNGHISYSIVASDLEPLAVSSYVSVSAQSGVVFAQRAFDHEQLRAFALTLQARDHGSPTLSANVSLRVLVGDRNDNAPRVLYPALGPDGSAFFDMVPRSAEPGYLVTKVVAVDADSGHNAWLSYHVLQASEPGLFSLGLRTGEVRTARALGDRDAARQRLLVAVRDGGQPPLSATATLHLVFADNLQEILPDLSDRPVLSDPQAELQFYLVVALALISVLFLLAVILAIALRLRRSLSPATWDCFHPGLCVKSGPVVPPNYSEGTLPYSYNLCIAHTGTKEFNFLKCSVPLHSNEDMVCSVSPGALIPPHGGEDLTSHPETLTSQAPPNTDWRFSQAQRPGTSGSQNGDDTGTWPNNQFDTEMLQAMILASASEAADGSSTLGGGAGTMGLSARYGPQFTLQHVPDYRQNVYIPGSNATLTNAAGKRDGKAPAGGNGNKKKSGKKEKK

SEQ ID NO: 6437 - protein, 934 aa, Homo sapiens
MVPEAWRSGLVSTGRVVGVLLLLGALNKASTVIHYEIPEEREKGFAVGNVVANLGLDLGSLSARRFRVVSGASRRFFEVNRETGEMFVNDRLDREELCGTLPSCTVTLELVVENPLELFSVEVVIQDINDNNPAFPTQEMKLEISEAVAPGTRFPLESAHDPDVGSNSLQTYELSRNEYFALRVQTREDSTKYAELVLERALDREREPSLQLVLTALDGGTPALSASLPIHIKVLDANDNAPVFNQSLYRARVLEDAPSGTRVVQVLATDLDEGPNGEIIYSFGSHNRAGVRQLFALDLVTGMLTIKGRLDFEDTKLHEIYIQAKDKGANPEGAHCKVLVEVVDVNDNAPEITVTSVYSPVPEDAPLGTVIALLSVTDLDAGENGLVTCEVPPGLPFSLTSSLKNYFTLKTSADLDRETVPEYNLSITARDAGTPSLSALTIVRVQVSDINDNPPQSSQSSYDVYIEENNLPGAPILNLSVWDPDAPQNARLSFFLLEQGAETGLVGRYFTINRDNGIVSSLVPLDYEDRREFELTAHISDGGTPVLATNISVNIFVTDRNDNAPQVLYPRPGGSSVEMLPRGTSAGHLVSRVVGWDADAGHNAWLSYSLLGSPNQSLFAIGLHTGQISTARPVQDTDSPRQTLTVLIKDNGEPSLSTTATLTVSVTEDSPEARAEFPSGSAPREQKKNLTFYLLLSLILVSVGFVVTVFGVIIFKVYKWKQSRDLYRAPVSSLYRTPGPSLHADAVRGGLMSPHLYHQVYLTTDSRRSDPLLKKPGAASPLASRQNTLRSCDPVFYRQVLGAESAPPGQQAPPNTDWRFSQAQRPGTSGSQNGDDTGTWPNNQFDTEMLQAMILASASEAADGSSTLGGGAGTMGLSARYGPQFTLQHVPDYRQNVYIPGSNATLTNAAGKRDGKAPAGGNGNKKKSGKKEKK

SEQ ID NO: 6438 - protein, 932 aa, Homo sapiens
MAAPTKCQLRGRLVLLCSLLGMLWEARASQIRYSVPEETEKGYIVGNISKDLALEPRELAERRVRIVSRGRTQLFSLNPRSGTLVTAGRIDREELCAQSPRCLVNFKVLVEDRVKLYGIEIEVTDINDSAPKFQAESLEVKINEIAVPGARYPLPEAIDPDVGVNSLQSYQLSPNHHFSLNVQTGDNGAINPELVLERALDREEATAHHLVLTASDGGEPRRSSTVRIHVTVLDTNDNAPVFAQRIYRVKVLENVPPGTWLLTATASDLDEGINGKVAYKFWKINEKQSLLFQLNENTGEISTAKSLDYEECSFYEMEIQAEDGGGLKGWTKVLISVEDVNDNRPEVTITSLFSPVREDAPQGTVILLFNAHDRDSGKNGQVVCSIQENLSFTLENSEEDYYRLLTAQILDREKASEYNITVTATDRGTPPLSTEIHITLQVTDINDNPPAFSQASYSVYLPENNARGTSIFSVIAYDPDSNENSRVIYSLAEDTIQGSPLSTYVSINSDTGVLYALCSFDYEQFRDLQMQVTASDSGSPPLSSNVSLRLFVLDQNDNAPEILYPALPTDGSTGVELAPRSAEPGYLVTKVVAVDRDSGQNAWLSYRLFKASEPGLFSVGLHTGEVRTARALLDRDALKQSLVVAVQDHGQPPLSATVTLTVAIADSIPDILADLGSLQIPADLEASDLTLYLVVAVAVVSCVFLTFVITLLALRLRHWHSSHLLRATSDGLAGVPTSHFVGVDGVRAFLQTYSQEFSLTADSRKSHLIFPQPNYADTLISQQSCEKNEPLCVSVDSKFPIEDTPLVPQAPPNTDWRFSQAQRPGTSGSQNGDDTGTWPNNQFDTEMLQAMILASASEAADGSSTLGGGAGTMGLSARYGPQFTLQHVPDYRQNVYIPGSNATLTNAAGKRDGKAPAGGNGNKKKSGKKEKK

SEQ ID NO: 6439 - protein, 750 aa, Homo sapiens
MANRLQRGDRSRLLLLLCIFLGTLRGFRARQIRYSVPEETEKGSFVGNISKDLGLEPRELAKRGVRIVSRGKTQLFAVNPRSGSLITAGRIDREELCETVSSCFLNMELLVEDTLKIYGVEVEIIDINDNAPSFQEDEVEIKVSEHAIPGARFALPNARDPDVGVNSLQSYQLSPNNYFSLQLRGRTDGAKNPELVLEGSLDREKEAAHLLLLTALDGGDPIRKGAVPIRVVVLDVNDHIPMFTQSVYRVSVPENISSGTRVLMVNATDPDEGINGEVMYSFRNMESKASEIFQLDSQTGEVQVRGSLDFEKYRFYEMEIQGQDGGGLFTTTTMLITVVDVNDNAPEITITSSINSILENSPPGTVIALLNVQDQDSGENGQVSCFIPNHLPFKLEKTYGNYYKLITSRVLDRELVQSYNITLTATDQGSPPLSAETHVWLNVADDNDNPPVFPHSSYSAYIPENNPRGASIFSVTALDPDSKQNALVTYSLTDDTVQGVPLSSYVSINSNTGVLYALQSFDYEQFRDLELRVIARDSGDPPLSSNVSLSLFVLDQNDNAPEILYPALPTDGSTGVELAPRSAEPGYLVTKVVAVDKDSGQNAWLSYRLLKASEPGLFAVGEHTGEQAPPNTDWRFSQAQRPGTSGSQNGDDTGTWPNNQFDTEMLQAMILASASEAADGSSTLGGGAGTMGLSARYGPQFTLQHVPDYRQNVYIPGSNATLTNAAGKRDGKAPAGGNGNKKKSGKKEKK

SEQ ID NO: 6440 - protein, 931 aa, Homo sapiens
MKASSGRCGLVRWLQVLLPFLLSLFPGALPVQIRYSIPEELAKNSVVGNLAKDLGLSVRDLPARKLRVSAEKEYFTVNPESGDLLVSDRIDREQICGKQPLCVLDFDTVAENPLNIFYIAVIVQDINDNTPLFKQTKINLKIGESTKPGTTFPLDPALDSDVGPNSLQRYHLNDNEYFDLAEKQTPDGRKYPELILKHSLDREEHSLHQLVLTAVDGGDPPQSGTTQIRIKVTDANDNPPVFSQDVYRVTLREDVPPGFFVLQVTATDRDEGINAEITYSFHNVDEQVKHFFNLNEKTGEITTKDDLDFEIASSYTLSIEAKDPGDLAAHCSIQVEILDDNDCAPEVIVTSVSTPLPEDSPPGTVIALIKTRDRDSGENGEVYCQVLGNAKFILKSSSKNYYKLVTDGALDREEIPEYNLTITATDGGKPPLSSSIIVTLHISDVNDNAPVFQQTSYMVHVAENNPPGASIAQISASDPDLGPSGQVSYSIVASDLKPREILSYVSVSAQSGVVFAQRAFDHEQLRAFELTLQARDQGSPALSANVSLRVLVGDLNDNAPRVLYPALGPDGSALFDMVPRAAEPGYLVTKVVAVDADSGHNAWLSYHVLQASEPGLFSLGLRTGEVRTARALGDRDAARQRLLVAVRDGGQPPLSATATLHLIFADSLQEVLPDLSDRREPSDPQAKLQFYLVVALALISVLFFLAVILAISLRLRLSSRSDAWDCFQPGLSSKPGPGVLPNYSEGTLPYSYNLCVASQSAKTEFNFLNITPELVPAQDLVCDNASWEQNTNHGAAGVPFASDTILKQAPPNTDWRFSQAQRPGTSGSQNGDDTGTWPNNQFDTEMLQAMILASASEAADGSSTLGGGAGTMGLSARYGPQFTLQHVPDYRQNVYIPGSNATLTNAAGKRDGKAPAGGNGNKKKSGKKEKK

SEQ ID NO: 6441 - protein, 932 aa, Homo sapiens
MAALQKLPHCRKLVLLCFLLATLWEARAGQIRYSVREEIDRGSFVGNIAKDLGLEPLALAEQGVRIVSRGRSQLFALNPRSGSLVTANRIDREELCAQSAPCLLNFNILLEDKLTIYSVEVEITDINDNAPRFGVEELELKISETTTPGFRIPLKNAHDADVGENALQKYALNPNDHFSLDVRRGADGNKYPELVLERSLDREEEAVHHLVLVASDGGDPVLSGTSRICVKVLDANDNAPVFTQPEYRISIPENTLVGTRILTVTATDADEGYYAQVVYFLEKSPGETSEVFELKSTSGELTIIKDLDYEDATFHEIDIEAQDGPGLLTRAKVIVTVLDVNDNAPEFYMTSATSSVSEDSLPGTIIGLFNVHDRDSGQNAFTTCSLPEDLPFKLEKSVDNYYRLVTTRALDREQFSFYNITLTAKDGGNPSLSTDAHILLQVADINDNAPAFSRTSYSTYIPENNPRGASVFSVTAHDPDSNDNAHVTYSFAEDTVQGAPLSSYISINSDTGVLYALRSFDYEQLRDLQVWVIARDSGNPPLSSNVSLSLFVLDQNDNAPEILYPAFPTDGSTGVELAPRSAEPGYLVTKVVAVDRDSGQNAWLSYHLLKASEPGLFSVGLHTGEVRTARALLDRDALKQSLVVAIQDHGQPPLSATVTLTVAVADRIPDILADLGSLEPSAIPNDSDLTLYLVVAVAAVSCVFLAFVIVLLAHRLRRWHKSRLLQASGGSLTGMQSSHFVGVDGVRAFLQTYSHEVSLTADSRKSHLIFPQPNYADTLISQESCEKKDFLSAPQSLLEEEREETFSQQAPPNTDWRFSQAQRPGTSGSQNGDDTGTWPNNQFDTEMLQAMILASASEAADGSSTLGGGAGTMGLSARYGPQFTLQHVPDYRQNVYIPGSNATLTNAAGKRDGKAPAGGNGNKKKSGKKEKK

SEQ ID NO: 6442 - protein, 932 aa, Homo sapiens
MAPPQRHPQRSEQVLLLTLLGTLWGAAAAQIRYSIPEELEKGSFVGNIVKDLGLEPQELAEHGVRIVSRGRMQLFSLNPRNGSLVTAGRIDREELCAQSPRCLVSFNILVEDKLNLYPVEVEIVDINDNTPRFLKEELEVKILENAAPSSRFPLMEVYDPDVGMNSLQGFKLSGNSHFSVDVQSEAHGPKYPELVLEGTLDREGEAVYRLVLTAMDGGDPVRSSVAQILVTVLDVNDNTPMFTQPVYRVSVPENLPVGTPVLAVTATDQDEGVHGEVTYSFVKITEKISQIFCLNVLTGEISTSANLDYEDSSFYELGVEARDGPGLRDRAKVLITILDVNDNVPEVVVTSGSRTIAESAPPGTVIALFQVFDRDSGLNGLVTCSIPRSLPFELEKSVGNYYRLVTNAALDREEVFLYNITVTATDKGTPPLSTETIISLNVADTNDNPPTFPHSSYSVYVLENNPRGASIFSVNALDPDVDQNAQVSYSLAEDTLQGAPLSSYVSINSDTGILYALRSFDYEQLRDLQLWVTASDSGDPPLSSNVSLSLFVLDQNDNAPEILYPALPTDGSTGVELAPRSAEPGYLVTKVVAVDRDSGQNAWLSYRLLKASEPGLFSVGLHTGEVRTARALLDRDALKQSLVVAVQDHGQPPLSATVTLTVAVADRIPDILADLGSLEPSAKPNDSDLTLYLVVAVAAVSCVFLAFVIVLLALRLQRWHKSRLLQASGGGLASMPGSHFVGVEGVRAFLQTYSHEVSLTADSRKSHLIFPQPNYADTLINQESYEKSEPLLITQDLLETKGEPRQLQQAPPNTDWRFSQAQRPGTSGSQNGDDTGTWPNNQFDTEMLQAMILASASEAADGSSTLGGGAGTMGLSARYGPQFTLQHVPDYRQNVYIPGSNATLTNAAGKRDGKAPAGGNGNKKKSGKKEKK

SEQ ID NO: 6443 - protein, 938 aa, Homo sapiens
MLRKVRSWTEIWRWATLLFLFYHLGYVCGQIRYPVPEESQEGTFVGNVAQDFLLDTDSLSARRLQVAGEVNQRHFRVDLDSGALLIKNPIDREALCGLSASCIVPLEFVTEGPLEMYRAEVEIVDVNDHAPRFPRQQLDLEIGEAAPPGQRFPLEKAQDADVGSNSISSYRLSSNEHFALDVKKRSDGSLVPELLLEKPLDREKQSDYRLVLTAVDGGNPPRSGTAELRVSVLDVNDNAPAFQQSSYRISVLESAPAGMVLIQLNASDPDLGPSGNVTFYFSGHTPDRVRNLFSLHPTTGKLTLLGPLDFESENYYEFDVRARDGGSPAMEQHCSLRVDLLDVNDNAPYITVTSELGTLPESAEPGTVVALISVQDPDSGSNGDVSLRIPDHLPFALKSAFRNQFSLVTAGPLDREAKSSYDIMVTASDAGNPPLSTHRTIFLNISDVNDNPPSFFQRSHEVFVPENNRPGDLLCSLAASDPDSGLNALISYSLLEPRNRDVSASSFISLNPQTGAVHATRSFDYEQTQTLQFEVQARDRGNPPLSSTVTVRLFVLDLNDNAPAVLRPRARPGSLCPQALPPSVGAGHLITKVTAVDLDSGYNAWVSYQLLEAPDPSLFAVSRYAGEVRTAVPIPADLPPQKLVIVVKDSGSPPLSTSVTLLVSLEEDTHPVVPDLRESSAPREGESRLTLYLAVSLVAICFVSFGSFVALLSKCLRGAACGVTCFPAGTCACLTRSRRREGLPPSNGILRIQLGSDDPIKFVDVGGHSHGCTPLASAPTRSDSFMMVKSPSAPMAGEPVRPSCPPSDLLYGLEQAPPNTDWRFSQAQRPGTSGSQNGDDTGTWPNNQFDTEMLQAMILASASEAADGSSTLGGGAGTMGLSARYGPQFTLQHVPDYRQNVYIPGSNATLTNAAGKRDGKAPAGGNGNKKKSGKKEKK

SEQ ID NO: 6444 - protein, 931 aa, Homo sapiens
MAAPPARPDHTRLLQICLLLGVLVEIRAEQILYSVFEEQEEGSVVGNIAKDLGLAPRELAERGVRIVSRGRTQLFALNPRSGTLVTAGRIDREELCDRSPNCVTNLEILLEDTVKILRVEVEIIDVNDNPPSFGTEQREIKVAENENPGARFPLPEAFDPDVGVNSLQGYQLNSNGYFSLDVQSGADGIKYPELVLERALDREEEAVHHLVLTAFDGGDPVRSGTARILIILVDTNDNAPVFTQPEYHVSVRENVPVGTRLLTVKATDPDEGANGDVTYSFRKVRDKISQLFQLNSLSGDITILGGLDYEDSGFYDIDVEAHDGPGLRARSKVLVTVLDENDNAPEVTVTSLTSSVQESSSPGTVIALFNVHDSDSGGNGLVTCSIPDNLPFTLEKTYGNYYRLLTHRTLDREEVSEYNITVTATDQGTPPLSTETHISLQVMDINDNPPTFPHASYSAYIPENNPRGASILSMTAQDPDSGDNARITYSLAEDTFQGAPLSSYVSINSNTGILYALCSFDYEQFRDLQLLMTASDSGDPPLSSNVSLSLFVLDQNDNVPEILYPTFPTDGSTGVELAPRSADSGYLVTKVVAVDRDSGQNAWLSYSLLKSSEPGLFAVGLHTGEVRTARALLDRDALKQRLVVVVQDHGQPPLSATVTLTVAVADSIPDVLADLGSLKPSADPDDSGLTLYLVVAVAAVSCVFLAFVTVLLALKLRRWHKSRLLHAEGSRLAGVPASHFVGVDGVRAFLQTYSHEVSLTADSRKSHLIFSQPSYADTLISRESCEKSEPLLITQDLLETKGDPNLQQAPPNTDWRFSQAQRPGTSGSQNGDDTGTWPNNQFDTEMLQAMILASASEAADGSSTLGGGAGTMGLSARYGPQFTLQHVPDYRQNVYIPGSNATLTNAAGKRDGKAPAGGNGNKKKSGKKEKK

SEQ ID NO: 6445 - protein, 134 aa, Homo sapiens
MVPEAWRSGLQAPPNTDWRFSQAQRPGTSGSQNGDDTGTWPNNQFDTEMLQAMILASASEAADGSSTLGGGAGTMGLSARYGPQFTLQHVPDYRQNVYIPGSNATLTNAAGKRDGKAPAGGNGNKKKSGKKEKK

SEQ ID NO: 6446 - protein, 929 aa, Homo sapiens
MGGSCAQRRRAGPRQVLFPLLLPLFYPTLCEPIRYSIPEELAKGSVVGNLAKDLGLSVLDVSARELRVSAEKLHFSVDAQSGDLLVKDRIDREQICKERRRCELQLEAVVENPLNIFHVIVVIEDVNDHAPQFRKDEINLEISESVSLGMGTILESAEDPDISMNSLSKYQLSPNEYFSLVEKDNPDGGKYPELVLQKTLDRETQSAHHLVLTALDGGDPPRSGTAQIRILVIDANDNPPVFSQDVYRVSLREDVPPGTSILRVKATDQDEGINSEITYSFFGVADKAQHVFSLDYTTGNILTQQPLDFEEVERYTINIEAKDRGSLSTRCKVIVEVVDENDNSPEIIITSLSDQIMEDSPPGVVVALFKTRDQDSGENGEVRCSLSRGVPFKIHSSSNNYYKLVTDEALDREQTPEYNVTIAATDRGKPPLSSSKTITLHITDVNDNAPVFGQSAYLVHVPENNQPGASIAQVSASDPDFGLNGRVSYSLIASDLESRTLSSYVSVSAQSGVVFAQRAFDHEQLRTFELTLQARDQGSPALSANVSLRVLVGDRNDNAPRVLYPALGPDGSALFDTVPRAAQPGYLVTKVVAVDADSGHNAWLSYHVVQASEPGLFSLGLRTGEVRMVRALGDKDSVRQRLLVAVRDGGQPPLSATATLHLVFADSLQEVLPDFSDHPTPSDSQAEMQFYLVVALALISVLFLLAVILAIALRLRQSFSPTAGDCFESVLCSKSGPVGPPNYSEGTLPYAYNFCVPGDQMNPEFNFFTSVDHCPATQDNLNKDSMLLASILTPSVEADKKILKQQAPPNTDWRFSQAQRPGTSGSQNGDDTGTWPNNQFDTEMLQAMILASASEAADGSSTLGGGAGTMGLSARYGPQFTLQHVPDYRQNVYIPGSNATLTNAAGKRDGKAPAGGNGNKKKSGKKEKK

SEQ ID NO: 6447 - protein, 931 aa, Homo sapiens
MASPPRGWGCGELLLPFMLLGTLCEPGSGQIRYSMPEELDKGSFVGNIAKDLGLEPQELAERGVRIVSRGRTQLFALNPRSGSLVTAGRIDREELCAQSPLCVVNFNILVENKMKIYGVEVEIIDINDNFPRFRDEELKVKVNENAAAGTRLVLPFARDADVGVNSLRSYQLSSNLHFSLDVVSGTDGQKYPELVLEQPLDREKETVHDLLLTALDGGDPVLSGTTHIRVTVLDANDNAPLFTPSEYSVSVPENIPVGTRLLMLTATDPDEGINGKLTYSFRNEEEKISETFQLDSNLGEISTLQSLDYEESRFYLMEVVAQDGGALVASAKVVVTVQDVNDNAPEVILTSLTSSISEDCLPGTVIALFSVHDGDSGENGEIACSIPRNLPFKLEKSVDNYYHLLTTRDLDREETSDYNITLTVMDHGTPPLSTESHIPLKVADVNDNPPNFPQASYSTSVTENNPRGVSIFSVTAHDPDSGDNARVTYSLAEDTFQGAPLSSYVSINSDTGVLYALRSFDYEQLRDLQLWVTASDSGNPPLSSNVSLSLFVLDQNDNTPEILYPALPTDGSTGVELAPRSAEPGYLVTKVVAVDKDSGQNAWLSYRLLKASEPGLFAVGLHTGEVRTARALLDRDALKQSLVVAVEDHGQPPLSATFTVTVAVADRIPDILADLGSIKTPIDPEDLDLTLYLVVAVAAVSCVFLAFVIVLLVLRLRRWHKSRLLQAEGSRLAGVPASHFVGVDGVRAFLQTYSHEVSLTADSRKSHLIFPQPNYADTLLSEESCEKSEPLLMSDKVDANKEERRVQQAPPNTDWRFSQAQRPGTSGSQNGDDTGTWPNNQFDTEMLQAMILASASEAADGSSTLGGGAGTMGLSARYGPQFTLQHVPDYRQNVYIPGSNATLTNAAGKRDGKAPAGGNGNKKKSGKKEKK

SEQ ID NO: 6448 - protein, 929 aa, Homo sapiens
MGNSSGWRGPAGQRRMLFLFLLSLLDQVLSEPIRYAIPEELDRGSLVGNLAKDLGFGVGDLPTRNLRVIAEKKFFTVSPENGNLLVSDRIDREEICGKKSTCVLEFEMVAEKPLNFFHVTVLIQDINDNPPTFSQNITELEISELALTGATFALESAQDPDVGVNSLQQYYLSPDPHFSLIQKENLDGSRYPELVLKAPLDREEQPHHHLVLTAVDGGEPSRSCTTQIRVIVADANDNPPVFTQDMYRVNVAENLPAGSSVLKVMAIDMDEGINAEIIYAFINIGKEVRQLFKLDSKTGELTTIGELDFEERDSYTIGVEAKDGGHHTAYCKVQIDISDENDNAPEITLASESQHIQEDAELGTAVALIKTHDLDSGFNGEILCQLKGNFPFKIVQDTKNTYRLVTDGALDREQIPEYNVTITATDKGNPPLSSSKTITLHILDVNDNVPVFHQASYTVHVAENNPPGASIAHVRASDPDLGPNGLVSYYIVASDLEPRELSSYVSVSARSGVVFAQRAFDHEQLRAFELTLQARDQGSPTLSANVSLRVLVDDRNDNAPLVLYPALGPEGSALFDMVPRSAEPGYLVTKVVAVDADSGYNAWLSYHIVQASEPGLFSLGLRTGEVRTARTLGDREAARQRLLVTVRDGGQQPLSATVMLHLIFADSLQEIQPDLSDRPTPSDPQAELQFHLVVALALISVLFLLAVILAISLRLRCSSRPATEGYFQPGVCFKTVPGVLPTYSERTLPYSYNPCAASHSSNTEFKFLNIKAENAAPQDLLCDEASWFESNDNPEMPSNSGNLQKQAPPNTDWRFSQAQRPGTSGSQNGDDTGTWPNNQFDTEMLQAMILASASEAADGSSTLGGGAGTMGLSARYGPQFTLQHVPDYRQNVYIPGSNATLTNAAGKRDGKAPAGGNGNKKKSGKKEKK

SEQ ID NO: 6449 - protein, 932 aa, Homo sapiens
MAAPQSRPRRGELILLCALLGTLWEIGRGQIRYSVPEETDKGSFVGNISKDLGLDPRKLAKHGVRIVSRGRTQLFALNPRSGSLITAGRIDREELCAQSPRCLININTLVEDKGKLFGVEIEIIDINDNNPKFQVEDLEVKINEIAVPGARYPLPEAVDPDVGVNSLQSYQLSPNHHFSLDVQTGDNGAINPELVLERALDREEEAAHHLVLTASDGGKPPRSSTVRIHVTVLDTNDNAPVFPHPIYRVKVLENMPPGTRLLTVTASDPDEGINGKVAYKFRKINEKQTPLFQLNENTGEISIAKSLDYEECSFYEMEIQAEDVGALLGRTKLLISVEDVNDNRPEVIITSLFSPVLENSLPGTVIAFLSVHDQDSGKNGQVVCYTRDNLPFKLEKSIGNYYRLVTRKYLDRENVSIYNITVMASDLGTPPLSTETQIALHVADINDNPPTFPHASYSAYILENNLRGASIFSLTAHDPDSQENAQVTYSVTEDTLQGAPLSSYISINSDTGVLYALQSFDYEQIRDLQLLVTASDSGDPPLSSNMSLSLFVLDQNDNAPEILYPALPTDGSTGVELAPRSAERGYLVTKVVAVDRDSGQNAWLSYRLLKASEPGLFSVGLHTGEVRTARALLDRDALKQSLVVAVQDHGQPPLSATVTLTVAVADSIPEVLTELGSLKPSVDPNDSSLTLYLVVAVAAISCVFLAFVAVLLGLRLRRWHKSRLLQDSGGRLVGVPASHFVGVEEVQAFLQTYSQEVSLTADSRKSHLIFPQPNYADMLISQEGCEKNDSLLTSVDFHEYKNEADHGQQAPPNTDWRFSQAQRPGTSGSQNGDDTGTWPNNQFDTEMLQAMILASASEAADGSSTLGGGAGTMGLSARYGPQFTLQHVPDYRQNVYIPGSNATLTNAAGKRDGKAPAGGNGNKKKSGKKEKK

SEQ ID NO: 6450 - protein, 944 aa, Homo sapiens
MGPKTLPQLAGKWQVLCMLSLCCWGWVSGQLRYSVVEESEPGTLVGNVAQDLGLKMTDLLSRRLQLGSEENGRYFSLSLMSGALAVNQKIDRESLCGASTSCLLPVQVVTEHPLELIRVEVEILDLNDNSPSFATPEREMRISESAASGARFPLDSAQDPDVGTNTVSFYTLSPNSHFSLNVKTLKDGKPFPELVLEQQLDREAQARHQLVLTAVDGGTPARSGTTLISVIVLDINDNAPTFQSSVLRVGIPENAPIGTLLLRLNATDPDEGTNGQLDYSFGDHTSEAVRNLFGLDPSSGAIHVLGPIDFEESRFYEIHARARDQGQPAMEGHCVIQVDVGDVNDNAPEVLLASLANPVLESTPVGTVVGLFNVRDRDSGRNGEVSLDISPDLPFQIKPSENHYSLLTSQPLDREATSHYIIELLASDAGSPSLHKHLTIRLNISDVNDNAPRFNQQLYTAYILENRPPGSLLCTVAASDPDTGDNARLTYSIVGNQVQGAPASSFVYVNPEDGRIFAQRTFDYELLQMLQIVVGVRDSGSPPLHANTSLHVFVLDENDNAPAVLHPRPDWEHSAPQRLPRSAPPGSLVTKVTAVDADAGHNAWLSYSLLPQSTAPGLFLVSTHTGEVRTARALLEDDSDTQQVVVLVRDNGDPSLSSTATVLLVLEDEDPEEMPKSSDFLIHPPERSDLTLYLIVALATVSLLSLVTFTFLSAKCLQGNADGDGGGGQCCRRQDSPSPDFYKQSSPNLQVSSDGTLKYMEVTLRPTDSQSHCYRTCFSPASDGSDFTFLRPLSVQQPTALALEPDAIRSRSNTLRERSQQAPPNTDWRFSQAQRPGTSGSQNGDDTGTWPNNQFDTEMLQAMILASASEAADGSSTLGGGAGTMGLSARYGPQFTLQHVPDYRQNVYIPGSNATLTNAAGKRDGKAPAGGNGNKKKSGKKEKK

SEQ ID NO: 6451 - protein, 912 aa, Homo sapiens
MPGKRGLGWWWARLPLCLLLSLYGPWMPSSLGKPKGHPHMNSIRIDGDITLGGLFPVHGRGSEGKPCGELKKEKGIHRLEAMLFALDRINNDPDLLPNITLGARILDTCSRDTHALEQSLTFVQALIEKDGTEVRCGSGGPPIITKPERVVGVIGASGSSVSIMVANILRLFKIPQISYASTAPDLSDNSRYDFFSRVVPSDTYQAQAMVDIVRALKWNYVSTVASEGSYGESGVEAFIQKSREDGGVCIAQSVKIPREPKAGEFDKIIRRLLETSNARAVIIFANEDDIRRVLEAARRANQTGHFFWMGSDSWGSKIAPVLHLEEVAEGAVTILPKRMSVRGFDRYFSSRTLDNNRRNIWFAEFWEDNFHCKLSRHALKKGSHVKKCTNRERIGQDSAYEQEGKVQFVIDAVYAMGHALHAMHRDLCPGRVGLCPRMDPVDGTQLLKYIRNVNFSGIAGNPVTFNENGDAPGRYDIYQYQLRNDSAEYKVIGSWTDHLHLRIERMHWPGSGQQLPRSICSLPCQPGERKKTVKGMPCCWHCEPCTGYQYQVDRYTCKTCPYDMRPTENRTGCRPIPIIKLEWGSPWAVLPLFLAVVGIAATLFVVITFVRYNDTPIVKASGRELSYVLLAGIFLCYATTFLMIAEPDLGTCSLRRIFLGLGMSISYAALLTKTNRIYRIFEQGKRSVSAPRFISPASQLAITFSLISLQLLGICVWFVVDPSHSVVDFQDQRTLDPRFARGVLKCDISDLSLICLLGYSMLLMVTCTVYAIKTRGVPETFNEAKPIGFTMYTTCIVWLAFIPIFFGTSQSADKLYIQTTTLTVSVSLSASVSLGMLYMPKVYIILFHPEQNVPKRKRSLKAVVTAATMSNKFTQKGNFRPNGEAKSELCENLEAPALATKQTYVTYTNHAI

SEQ ID NO: 6452 - protein, 1220 aa, Homo sapiens
MPTTFPDADFQDRPPAHLVSSRRSAPPGSREPRGTGHLHPPLGVSGSSWCLACVSWMPCGFSPSPVAHHLVPGPPDTPAQQLRALTSAASRCSTHASVLLDVAGEPARCILVLNGMYDTCSGAEICKAAGIDSLLLPHLERSLTLLVSHLSSSQDVSSEPSSEQQLCALSKHPTVAFEDLQPWVSNFTYPGARDFSQLALDPSGNQLIVGARNYLFRLSLANVSLLQATEWASSEDTRRSCQSKGKTEEECQNYVRVLIVAGRKVFMCGTNAFSPMCTSRQVGNLSRTIEKINGVARCPYDPRHNSTAVISSQGELYAATVIDFSGRDPAIYRSLGSGPPLRTAQYNSKWLNEPNFVAAYDIGLFAYFFLRENAVEHDCGRTVYSRVARVCKNDVGGRFLLEDTWTTFMKARLNCSRPGEVPFYYNELQSAFHLPEQDLIYGVFTTNVNSIAASAVCAFNLSAISQAFNGPFRYQENPRAAWLPIANPIPNFQCGTLPETGPNENLTERSLQDAQRLFLMSEAVQPVTPEPCVTQDSVRFSHLVVDLVQAKDTLYHVLYIGTESGTILKALSTASRSLHGCYLEELHVLPPGRREPLRSLRILHSARALFVGLRDGVLRVPLERCAAYRSQGACLGARDPYCGWDGKQQRCSTLEDSSNMSLWTQNITACPVRNVTRDGGFGPWSPWQPCEHLDGDNSGSCLCRARSCDSPRPRCGGLDCLGPAIHIANCSRNGAWTPWSSWALCSTSCGIGFQVRQRSCSNPAPRHGGRICVGKSREERFCNENTPCPVPIFWASWGSWSKCSSNCGGGMQSRRRACENGNSCLGCGVEFKTCNPEGCPEVRRNTPWTPWLPVNVTQGGARQEQRFRFTCRAPLADPHGLQFGRRRTETRTCPADGSGSCDTDALVEVLLRSGSTSPHTVSGGWAAWGPWSSCSRDCELGFRVRKRTCTNPEPRNGGLPCVGDAAEYQDCNPQACPVRGAWSCWTSWSPCSASCGGGHYQRTRSCTSPAPSPGEDICLGLHTEEALCATQACPEGWSPWSEWSKCTDDGAQSRSRHCEELLPGSSACAGNSSQSRPCPYSEIPVILPASSMEEATDCAGFNLIHLVATGISCFLGSGLLTLAVYLSCQHCQRQSQESTLVHPATPNHLHYKGGGTPKNEKYTPMEFKTLNKNNLIPDDRANFYPLQQTNVYTTTYYPSPLNKHSFRPEASPGQRCFPNS

SEQ ID NO: 6453 - protein, 1092 aa, Homo sapiens
MPCGFSPSPVAHHLVPGPPDTPAQQLRCGWTVGGWLLSLVRGLLPCLPPGARTAEGPIMVLAGPLAVSLLLPSLTLLVSHLSSSQDVSSEPSSEQQLCALSKHPTVAFEDLQPWVSNFTYPGARDFSQLALDPSGNQLIVGARNYLFRLSLANVSLLQATEWASSEDTRRSCQSKGKTEEECQNYVRVLIVAGRKVFMCGTNAFSPMCTSRQVGNLSRTIEKINGVARCPYDPRHNSTAVISSQGELYAATVIDFSGRDPAIYRSLGSGPPLRTAQYNSKWLNEPNFVAAYDIGLFAYFFLRENAVEHDCGRTVYSRVARVCKNDVGGRFLLEDTWTTFMKARLNCSRPGEVPFYYNELQSAFHLPEQDLIYGVFTTNVNSIAASAVCAFNLSAISQAFNGPFRYQENPRAAWLPIANPIPNFQCGTLPETGPNENLTERSLQDAQRLFLMSEAVQPVTPEPCVTQDSVRFSHLVVDLVQAKDTLYHVLYIGTESGTILKALSTASRSLHGCYLEELHVLPPGRREPLRSLRILHSARALFVGLRDGVLRVPLERCAAYRSQGACLGARDPYCGWDGKQQRCSTLEDSSNMSLWTQNITACPVRNVTRDGGFGPWSPWQPCEHLDGDNSGSCLCRARSCDSPRPRCGGLDCLGPAIHIANCSRNGAWTPWSSWALCSTSCGIGFQVRQRSCSNPAPRHGGRIFVGKSREERFCNENTPCPVPIFWASWGSWSKCSSNCGGGMQSRRRACENGNSCLGCGEFKTCNPEGCPEVRRNTPWTPWLPVNVTQGGARQEQRFRFTCRAPLADPHGLQFGRRRTETRTCPADGSGSCDTDALVEVLLRSGSTSPHTVSGGWAAWGPWSSCSRDCELGFRVRKRTCTNPEPRNGGLPCVGDAAEYQDCNPQACPVRGAWSCWTSWSPCSASCGGGHYQRTRSCTSPAPSPGEDICLGLHTEEALCATQACPGWSPWSEWSKCTDDGAQSRSRHCEELLPGSSACAGNSSQSRPCPYSEIPVILPASSMEEATDCAGKRNRTYLMLRSSQPSSTPLQSLDSFHILLQTAKLCWGPHCFEMGSISSTWWPRASPASWALGS

SEQ ID NO: 6454 - protein, 266 aa, Homo sapiens
MPIWVVLLSRIIMKEKQSTKVYLSLIPIISGVLLATVTELSFDMWGLVSALAATLCFSLQNIFSKKVLRDSRIHHLRLLNILGCHAVFFMIPTWVLVDLSAFLVSSDLTYVYQWPWTLLLLAVSGFCNFAQNVIAFSILNLVSPLSYSVANATKRIMVITVSLIMLRNPVTSTNVLGMMTAILGVFLYNKTKYDANQQARKHLLPVTTADLSSKERHRSPLEKPHNGLLFPQHGDYQYGRNNILTDHFQYSRQSYPNSYSLNRYDV

SEQ ID NO: 6455 - protein, 423 aa, Homo sapiens
MPITCPTQNEPFLRTPRNSNYTYPIKPAIENWGSDFLCTEWKASNSVPTSVHQLRPADIKVVAALGDSLTTAVGARPNNSSDLPTSWRGLSWSIGGDGNLETHTTLPNILKKFNPYLLGFSTSTWEGTAGLNVAAEGARARDMPAQAWDLLERMKNSPDINLEKDWKLVTLFIGVNDLCHYCENPEAHLATEYVQHIQQALDILSEELPRAFVNVVEVMELASLYQGQGGKCAMLAAQNNCTCLRHSQSSLEKQELKKVNWNLQHGISSFSYWHQYTQREDFAVVVQPFFQNTLTPLNERGDTDLTFFSEDCFHFSDRGHAEMAIALWNNMLEPVGRKTTSNNFTHSRAKLKCPSPESPYLYTLRNSRLLPDQAEEAPEVLYWAVPVAAGVGLVVGIIGTVVWRCRRGGRREDPPMSLRTVAL

SEQ ID NO: 6456 - protein, 1841 aa, Homo sapiens
MFQCFARNAAGEVQTSTYLAVTSIAPNITRGPLDSTVIDGMSVVLACETSGAPRPAITWQKGERILASGSVQLPRFTPLESGSLLISPTHISDAGTYTCLATNSRGVDEASADLVVWARTRITKPPQDQSVIKGTQASMVCGVTHDPRVTIRYIWEKDGATLGTESHPRIRLDRNGSLHISQTWSGDIGTYTCRVISAGGNDSRSAHLRVRQLPHAPEHPVATLSTVERRAINLTWTKPFDGNSPLIRYILEMSENNAPWTVLLASVDPKATSVTVKGLVPARSYQFRLCAVNDVGKGQFSKDTERVSLPEEPPTAPPQNVIASGRTNQSIMIQWQPPPESHQNGILKGYIIRYCLAGLPVGYQFKNITDADVNNLLLEDLIIWTNYEIEVAAYNSAGLGVYSSKVTEWTLQGVPTVPPGNVHAEATNSTTIRFTWNAPSPQFINGINQGYKLIAWEPEQEEEVTMVTARPNFQDSIHVGFVSGLKKFTEYFTSVLCFTTPGDGPRSTPQLVRTHEDVPGPVGHLSFSEILDTSLKVSWQEPGEKNGILTGYRISWEEYNRTNTRVTHYLPNVTLEYRVTGLTALTTYTIEVAAMTSKGQGQVSASTISSGVPPELPGPPTNLGISNIGPRSVTLQFRPGYDGKTSISRWLVEAQVGVVGEGEEWLLIHQLSNEPDARSMEVPDLNPFTCYSFRMRQVNIVGTSPPSQPSRKIQTLQAPPDMAPANVSLRTASETSLWLRWMPLPEMEYNGNPESVGYKIKYSRSDGHGKTLSHVVQDRVERDYTIEDLEEWTEYRVQVQAFNAIGSGPWSQTVVGRTRESVPSSGPTNVSALATTSSSMLVRWSEVPEADRNGLVLGYKVMYKEKDSDTQPRFWLVEGNSSRSAQLTGLGKYVLYEVQVLAFTRIGDGSPSHPPILERTLDDVPGPPMGILFPEVRTTSVRLIWQPPAAPNGIILAYQITHRLNTTTANTATVEVLAPSARQYTATGLKPESVYLFRITAQTRKGWGEAAEALVVTTEKRDRPQPPSRPMVQQEDVRARSVLLSWEPGSDGLSPVRYYTIQTRELPSGRWALHSASVSHNASSFIVDRLKPFTSYKFRVKATNDIGDSEFSEESESLTTLQAAPDEAPTILSVTPHTTTSVLIRWQPPAEDKINGILLGFRIRYRELLYEGLRGFTLRGINNPGATWAELTSMYSMRNLSRPSLTQYELDNLNKHRRYEIRMSVYNAVGEGPSSPPQEVFVGEAVPTAAPRNVVVHGATATQLDVTWEPPPLDSQNGDIQGYKIYFWEAQRGNLTERVKTLFLAENSVKLKNLTGYTAYMVSVAAFNAAGDGPRSTPTQGQTQQAAPSAPSSVKFSELTTTSVNVSWEAPQFPNGILEGYRLVYEPCSPVDGVSKIVTVDVKGNSPLWLKVKDLAEGVTYRFRIRAKTFTYGPEIEANVTTGPGEGAPGPPGVPIIVRYSSAIAIHWSSGDPGKGPITRYVIEARPSDEGLWDILIKDIPKEVSSYTFSMDILKPGVSYDFRVIAVNDYGFGTPSSPSQSVPAQKANPFYEEWWFLVVIALVGLIFILLLVFVLIIRGQSKKYAKKTDSGNSAKSGALGHSEMMSLDESSFPALELNNRRLSVKNSFCRKNGLYTRSPPRPSPGSLHYSDEDVTKYNDLIPAESSSLTEKPSEISDSQGSDSEYEVDSNHQKAHSFVNHYISDPTYYNSWRRQQKGISRAQAYSYTESDSGEPDHTTVTNSTSTQQGSLFRPKASRTPTPQNPPNPPSQQSTLYHSRASKAGVQKEGENRERMCVASSSSALRWWGSLLPWELHGAGEVAVSLLWTRSGAGIWRERGSGG

SEQ ID NO: 6457 - protein, 1329 aa, Homo sapiens
QGYKLIAWEPEQEEEVTMVTARPNFQDSIHVGFVSGLKKFTEYFTSVLCFTTPGDGPRSTPQLVRTHEDVPGPVGHLSFSEILDTSLKVSWQEPGEKNGILTGYRISWEEYNRTNTRVTHYLPNVTLEYRVTGLTALTTYTIEVAAMTSKGQGQVSASTISSGVPPELPGPPTNLGISNIGPRSVTLQFRPGYDGKTSISRWLVEAQVGVVGEGEEWLLIHQLSNEPDARSMEVPDLNPFTCYSFRMRQVNIVGTSPPSQPSRKIQTLQAPPDMAPANVSLRTASETSLWLRWMPLPEMEYNGNPESVGYKIKYSRSDGHGKTLSHVVQDRVERDYTIEDLEEWTEYRVQVQAFNAIGSGPWSQTVVGRTRESVPSSGPTNVSALATTSSSMLVRWSEVPEADRNGLVLGYKVMYKEKDSDTQPRFWLVEGNSSRSAQLTGLGKYVLYEVQVLAFTRIGDGSPSHPPILERTLDDVPGPPMGILFPEVRTTSVRLIWQPPAAPNGIILAYQITHRLNTTTANTATVEVLAPSARQYTATGLKPESVYLFRITAQTRKGWGEAAEALVVTTEKRDRPQPPSRPMVQQEDVRARSVLLSWEPGSDGLSPVRYYTIQTRELPSGRWALHSASVSHNASSFIVDRLKPFTSYKFRVKATNDIGDSEFSEESESLTTLQAAPDEAPTILSVTPHTTTSVLIRWQPPAEDKINGILLGFRIRYRELLYEGLRGFMLRGINNPGATWAELTYLNKHRRYEIRMSVYNAVGEGPSSPPQEVFVGEAVPTAAPRNVVVHGATATQLDVTWEPPPLDSQNGDIQGYKIYFWEAQRGNLTERVKTLFLAENSVKLKNLTGYTAYMVSVAAFNAAGDGPRSTPTQGQTQQAAPSAPSSVKFSELTTTSVNVSWEAPQFPNGILEGYRLVYEPCSPVDGVSKIVTVDVKGNSPLWLKVKDLAEGVTYRFRIRAKTFTYGPEIEANVTTGPGEGAPGPPGVPIIVRYSSAIAIHWSSGDPGKGPITRYVIEARPSDEGLWDILIKDIPKEVSSYTFSMDILKPGVSYDFRVIAVNDYGFGTPSSPSQSVPAQKANPFYEEWWFLVVIALVGLIFILLLVFVLIIRGQSKKYAKKTDSGNSAKSGALGHSEMMSLDESSFPALELNNRRLSVKNSFCRKNGLYTRSPPRPSPGSLHYSDEDVTKYNDLIPAESSSLTEKPSEISDSQGSDSEYEVDSNHQKAHSFVNHYISDPTYYNSWRRQQKGISRAQAYSYTESDSGEPDHTTVTNSTSTQQGSLFRPKASRTPTPQNPPNPPSQQSTLYRPPSSLAPGSRAPIAGFSSFV

SEQ ID NO: 6458 - protein, 1598 aa, Homo sapiens
KVVDIPCQAKGVPPPSITWYKDAAVVEVEKLTRFRQRNDGGLQISGLVPDDTGMFQCFARNAAGEVQTSTYLAVTSIAPNITRGPLDSTVIDGMSVVLACETSGAPRPAITWQKGERILASGSVQLPRFTPLESGSLLISPTHISDAGTYTCLATNSRGVDEASADLVVWARTRITKPPQDQSVIKGTQASMVCGVTHDPRVTIRYIWEKDGATLGTESHPRIRLDRNGSLHISQTWSGDIGTYTCRVISAGGNDSRSAHLRVRQLPHAPEHPVATLSTVERRAINLTWTKPFDGNSPLIRYILEMSENNAPWTVLLASVDPKATSVTVKGLVPARSYQFRLCAVNDVGKGQFSKDTERVSLPEEPPTAPPQNVIASGRTNQSIMIQWQPPPESHQNGILKGYIIRYCLAGLPVGYQFKNITDADVNNLLLEDLIIWTNYEIEVAAYNSAGLGVYSSKVTEWTLQGVPTVPPGNVHAEATNSTTIRFTWNAPSPQFINGINQGYKLIAWEPEQEEEVTMVTARPNFQDSIHVGFVSGLKKFTEYFTSVLCFTTPGDGPRSTPQLVRTHEDVPGPVGHLSFSEILDTSLKVSWQEPGEKNGILTGYRISWEEYNRTNTRVTHYLPNVTLEYRVTGLTALTTYTIEVAAMTSKGQGQVSASTISSGVPPELPGPPTNLGISNIGPRSVTLQFRPGYDGKTSISRWLVEAQVGVVGEGEEWLLIHQLSNEPDARSMEVPDLNPFTCYSFRMRQVNIVGTSPPSQPSRKIQTLQAPPDMAPANVSLRTASETSLWLRWMPLPEMEYNGNPESVGYKIKYSRSDGHGKTLSHVVQDRVERDYTIEDLEEWTEYRVQVQAFNAIGSGPWSQTVVGRTRESVPSSGPTNVSALATTSSSMLVRWSEVPEADRNGLVLGYKVMYKEKDSDTQPRFWLVEGNSSRSAQLTGLGKYVLYEVQVLAFTRIGDGSPSHPPILERTLDDVPGPPMGILFPEVRTTSVRLIWQPPAAPNGIILAYQITHRLNTTTANTATVEVLAPSARQYTATGLKPESVYLFRITAQTRKGWGEAAEALVVTTEKRDRPQPPSRPMVQQEDVRARSVLLSWEPGSDGLSPVRYYTIQTRELPSGRWALHSASVSHNASSFIVDRLKPFTSYKFRVKATNDIGDSEFSEESESLTTLQAAPDEAPTILSVTPHTTTSVLIRWQPPAEDKINGILLGFRIRYRELLYEGLRGFTLRGINNPGATWAELTSMYSMRNLSRPSLTQYELDNLNKHRRYEIRMSVYNAVGEGPSSPPQEVFVGEAVPTAAPRNVVVHGATATQLDVTWEPPPLDSQNGDIQGYKIYFWEAQRGNLTERVKTLFLAENSVKLKNLTGYTAYMVSVAAFNAAGDGPRSTPTQGQTQQAAPSAPSSVKFSELTTTSVNVSWEAPQFPNGILEGYRLVYEPCSPVDGVSKIVTVDVKGNSPLWLKVKDLAEGVTYRFRIRAKTFTYGPEIEANVTTGPGEGAPGPPGVPIIVRYSSAIAIHWSSGDPGKGPITRYVIEARPSGAPRPAGLRPHSSLSPFFLGPSTWGTCLCPPPEKALVLLQVKSPGPVEEWETGLGGS

SEQ ID NO: 6459 - protein, 1454 aa, Homo sapiens
MRILKRFLACIQLLCVCRLDWANGYYRQQRKLVEEIGWSYTGALNQKNWGKKYPTCNSPKQSPINIDEDLTQVNVNLKKLKFQGWDKTSLENTFIHNTGKTVEINLTNDYRVSGGVSEMVFKASKITFHWGKCNMSSDGSEHSLEGQKFPLEMQIYCFDADRFSSFEEAVKGKGKLRALSILFEVGTEENLDFKAIIDGVESVSRFGKQAALDPFILLNLLPNSTDKYYIYNGSLTSPPCTDTVDWIVFKDTVSISESQLAVFCEVLTMQQSGYVMLMDYLQNNFREQQYKFSRQVFSSYTGKEEIHEAVCSSEPENVQADPENYTSLLVTWERPRVVYDTMIEKFAVLYQQLDGEDQTKHEFLTDGYQDLGAILNNLLPNMSYVLQIVAICTNGLYGKYSDQLIVDMPTDNPELDLFPELIGTEEIIKEEEEGKDIEEGAIVNPGRDSATNQIRKKEPQISTTTHYNRIGTKYNEAKTNRSPTRGSEFSGKGDVPNTSLNSTSQPVTKLATEKDISLTSQTVTELPPHTVEGTSASLNDGSKTVLRSPHMNLSGTAESLNTVSITEYEEESLLTSFKLDTGAEDSSGSSPATSAIPFISENISQGYIFSSENPETITYDVLIPESARNASEDSTSSGSEESLKDPSMEGNVWFPSSTDITAQPDVGSGRESFLQTNYTEIRVDESEKTTKSFSAGPVMSQGPSVTDLEMPHYSTFAYFPTEVTPHAFTPSSRQQDLVSTVNVVYSQTTQPVYNASNSSHESRIGLAEGLESEKKAVIPLVIVSALTFICLVVLVGILIYWRKCFQTAHFYLEDSTSPRVISTPPTPIFPISDDVGAIPIKHFPKHVADLHASSGFTEEFETLKEFYQEVQSCTVDLGITADSSNHPDNKHKNRYINIVAYDHSRVKLAQLAEKDGKLTDYINANYVDGYNRPKAYIAAQGPLKSTAEDFWRMIWEHNVEVIVMITNLVEKGRRKCDQYWPADGSEEYGNFLVTQKSVQVLAYYTVRNFTLRNTKIKKGSQKGRPSGRVVTQYHYTQWPDMGVPEYSLPVLTFVRKAAYAKRHAVGPVVVHCSAGVGRTGTYIVLDSMLQQIQHEGTVNIFGFLKHIRSQRNYLVQTEEQYVFIHDTLVEAILSKETEVLDSHIHAYVNALLIPGPAGKTKLEKQFQLLSQSNIQQSDYSAALKQCNREKNRTSSIIPVERSRVGISSLSGEGTDYINASYIMGYYQSNEFIITQHPLLHTIKDFWRMIWDHNAQLVVMIPDGQNMAEDEFVYWPNKDEPINCESFKVTLMAEEHKCLSNEEKLIIQDFILEATQDDYVLEVRHFQCPKWPNPDSPISKTFELISVIKEEAANRDGPMIVHDEHGGVTAGTFCALTTLMHQLEKENSVDVYQVAKMINLMRPGVFADIEQYQFLYKVILSLVSTRQEENPSTSLDSNGAALPDGNIAESLESLV

SEQ ID NO: 6460 - protein, 2365 aa, Homo sapiens
KHTYARTISLRSIHWRIKTNKQKKHFLRSPSLSTLRSRGAARRGAADRLEMRILKRFLACIQLLCVCRLDWANGYYRQQRKLVEEIGWSYTGALNQKNWGKKYPTCNSPKQSPINIDEDLTQVNVNLKKLKFQGWDKTSLENTFIHNTGKTVEINLTNDYRVSGGVSEMVFKASKITFHWGKCNMSSDGSEHSLEGQKFPLEMQIYCFDADRFSSFEEAVKGKGKLRALSILFEVGTEENLDFKAIIDGVESVSRFGKQAALDPFILLNLLPNSTDKYYIYNGSLTSPPCTDTVDWIVFKDTVSISESQLAVFCEVLTMQQSGYVMLMDYLQNNFREQQYKFSRQVFSSYTGKEEIHEAVCSSEPENVQADPENYTSLLVTWERPRVVYDTMIEKFAVLYQQLDGEDQTKHEFLTDGYQDLGAILNNLLPNMSYVLQIVAICTNGLYGKYSDQLIVDMPTDNPELDLFPELIGTEEIIKEEEEGKDIEEGAIVNPGRDSATNQIRKKEPQISTTTHYNRIGTKYNEAKTNRSPTRGSEFSGKGDVPNTSLNSTSQPVTKLATEKDISLTSQTVTELPPHTVEGTSASLNDGSKTVLRSPHMNLSGTAESLNTVSITEYEEESLLTSFKLDTGAEDSSGSSPATSAIPFISENISQGYIFSSENPETITYDVLIPESARNASEDSTSSGSEESLKDPSMEGNVWFPSSTDITAQPDVGSGRESFLQTNYTEIRVDESEKTTKSFSAGPVMSQGPSVTDLEMPHYSTFAYFPTEVTPHAFTPSSRQQDLVSTVNVVYSQTTQPVYNGETPLQPSYSSEVFPLVTPLLLDNQILNTTPAASSSDSALHATPVFPSVDVSFESILSSYDGAPLLPFSSASFSSELFRHLHTVSQILPQVTSATESDKVPLHASLPVAGGDLLLEPSLAQYSDVLSTTHAASETLEFGSESGVLYKTLMFSQVEPPSSDAMMHARSSGPEPSYALSDNEGSQHIFTVSYSSAIPVHDSVGVTYQGSLFSGPSHIPIPKSSLITPTASLLQPTHALSGDGEWSGASSDSEFLLPDTDGLTALNISSPVSVAEFTYTTSVFGDDNKALSKSEIIYGNETELQIPSFNEMVYPSESTVMPNMYDNVNKLNASLQETSVSISSTKGMFPGSLAHTTTKVFDHEISQVPENNFSVQPTHTVSQASGDTSLKPVLSANSEPASSDPASSEMLSPSTQLLFYETSASFSTEVLLQPSFQASDVDTLLKTVLPAVPSDPILVETPKVDKISSTMLHLIVSNSASSENMLHSTSVPVFDVSPTSHMHSASLQGLTISYASEKYEPVLLKSESSHQVVPSLYSNDELFQTANLEINQAHPPKGRHVFATPVLSIDEPLNTLINKLIHSDEILTSTKSSVTGKVFAGIPTVASDTFVSTDHSVPIGNGHVAITAVSPHRDGSVTSTKLLFPSKATSELSHSAKSDAGLVGGGEDGDTDDDGDDDDDDRGSDGLSIHKCMSCSSYRESQEKVMNDSDTHENSLMDQNNPISYSLSENSEEDNRVTSVSSDSQTGMDRSPGKSPSANGLSQKHNDGKEENDIQTGSALLPLSPESKAWAVLTSDEESGSGQGTSDSLNENETSTDFSFADTNEKDADGILAAGDSEITPGFPQSPTSSVTSENSEVFHVSEAEASNSSHESRIGLAEGLESEKKAVIPLVIVSALTFICLVVLVGILIYWRKCFQTAHFYLEDSTSPRVISTPPTPIFPISDDVGAIPIKHFPKHVADLHASSGFTEEFETLKEFYQEVQSCTVDLGITADSSNHPDNKHKNRYINIVAYDHSRVKLAQLAEKDGKLTDYINANYVDGYNRPKAYIAAQGPLKSTAEDFWRMIWEHNVEVIVMITNLVEKGRRKCDQYWPADGSEEYGNFLVTQKSVQVLAYYTVRNFTLRNTKIKKGSQKGRPSGRVVTQYHYTQWPDMGVPEYSLPVLTFVRKAAYAKRHAVGPVVVHCSAGVGRTGTYIVLDSMLQQIQHEGTVNIFGFLKHIRSQRNYLVQTEEQYVFIHDTLVEAILSKETEVLDSHIHAYVNALLIPGPAGKTKLEKQFQLLSQSNIQQSDYSAALKQCNREKNRTSSIIPVERSRVGISSLSGEGTDYINASYIMGYYQSNEFIITQHPLLHTIKDFWRMIWDHNAQLVVMIPDGQNMAEDEFVYWPNKDEPINCESFKVTLMAEEHKCLSNEEKLIIQDFILEATQDDYVLEVRHFQCPKWPNPDSPISKTFELISVIKEEAANRDGPMIVHDEHGGVTAGTFCALTTLMHQLEKENSVDVYQVAKMINLMRPGVFADIEQYQFLYKVILSLVSTRQEENPSTSLDSNGAALPDGNIAESLESLV

SEQ ID NO: 6461 - protein, 715 aa, Homo sapiens
SHTRGGGLSCRRRRLCRRRECGVGTGAAAAATPGIFVASSRPFCPAAFPQSALPTPLRPGAPASISRSLSTTHTAPPIMDPGSGGGGGGGGGGGSSSGSSSSDSAPDCWDQADMEAPGPGPCGGGGSLAAAAEAQRENLSAAFSRQLNVNAKPFVPNVHAAEFVPSFLRGPAAPPPPVGGAANNHGAGSGAGGRAAPVESSQEEQSLCEGSNSAVSMELSEPIVENGETEMSPEESWEHKEEISEAEPGGGSLGDGRPPEESAHEMMEEEEEIPKPKSVVAPPGAPKKEHVNVVFIGHVDAGKSTIGGQIMYLTGMVDKRTLEKYEREAKEKNRETWYLSWALDTNQEERDKGKTVEVGRAYFETEKKHFTILDAPGHKSFVPNMIGGASQADLAVLVISARKGEFETGFEKGGQTREHAMLAKTAGVKHLIVLINKMDDPTVNWSNERYEECKEKLVPFLKKVGFNPKKDIHFMPCSGLTGANLKEQSDFCPWYIGLPFIPYLDNLPNFNRSVDGPIRLPIVDKYKDMGTVVLGKLESGSICKGQQLVMMPNKHNVEVLGILSDDVETDTVAPGENLKIRLKGIEEEEILPGFILCDPNNLCHSGRTFDAQIVIIEHKSIICPGYNAVLHIHTCIEEVEITALICLVDKKSGEKSKTRPRFVKQDQVCIARLRTAGTICLETFKDFPQMGRFTLRDEGKTIAIGKVLKLVPEKD

SEQ ID NO: 6462 - protein, 712 aa, Homo sapiens
MGGKQRDEDDEAYGKPVKYDPSFRGPIKNRSCTDVICCVLFLLFILGYIVVGIVAWLYGDPRQVLYPRNSTGAYCGMGENKDKPYLLYFNIFSCILSSNIISVAENGLQCPTPQVCVSSCPEDPWTVGKNEFSQTVGEVFYTKNRNFCLPGVPWNMTVITSLQQELCPSFLLPSAPALGRCFPWTNITPPALPGITNDTTIQQGISGLIDSLNARDISVKIFEDFAQSWYWILVALGVALVLSLLFILLLRLVAGPLVLVLILGVLGVLAYGIYYCWEEYRVLRDKGASISQLGFTTNLSAYQSVQETWLAALIVLAVLEAILLLVLIFLRQRIRIAIALLKEASKAVGQMMSTMFYPLVTFVLLLICIAYWAMTALYPLPTQPATLGYVLWASNISSPGCEKVPINTSCNPTAHLVNSSCPGLMCVFQGYSSKGLIQRSVFNLQIYGVLGLFWTLNWVLALGQCVLAGAFASFYWAFHKPQDIPTFPLISAFIRTLRYHTGSLAFGALILTLVQIARVILEYIDHKLRGVQNPVARCIMCCFKCCLWCLEKFIKFLNRNAYIMIAIYGKNFCVSAKNAFMLLMRNIVRVVVLDKVTDLLLFFGKLLVVGGVGVLSFFFFSGRIPGLGKDFKSPHLNYYWLPIMTSILGAYVIASGFFSVFGMCVDTLFLCFLEDLERNNGSLDRPYYMSKSLLKILGKKNEAPPDNKKRKK

SEQ ID NO: 6463 - protein, 710 aa, Homo sapiens
MGGKQRDEDDEAYGKPVKYDPSFRGPIKNRSCTDVICCVLFLLFILGYIVVGIVAWLYGDPRQVLYPRNSTGAYCGMGENKDKPYLLYFNIFSCILSSNIISVAENGLQCPTPQVCVSSCPEDPWTVGKNEFSQTVGEVFYTKSSNFCLPGVPWNMTVITSLQQELCPSFLLPSAPALGRCFPWTNITPPALPGITNDTTIQQGISGLIDSLNARDISVKIFEDFAQSWYWILVALGVALVLSLLFILLLRLVAGPLVLVLILGVLGVLAYGIYYCWEEYRVLRDKGASISQLGFTTNLSAYQSVQETWLAALIVLAVLEAILLLVLIFLRQRIRIAIALLKEASKAVGQMMSTMFYPLVTFVLLLICIAYWAMTALYLATSGQPQYVLWASNISSPGCEKVPINTSCNPTAHLVNSSCPGLMCVFQGYSSKGLIQRSVFNLQIYGVLGLFWTLNWVLALGQCVLAGAFASFYWAFHKPQDIPTFPLISAFIRTLRYHTGSLAFGALILTLVQIARVILEYIDHKLRGVQNPVARCIMCCFKCCLWCLEKFIKFLNRNAYIMIAIYGKNFCVSAKNAFMLLMRNIVRVVVLDKVTDLLLFFGKLLVVGGVGVLSFFFFSGRIPGLGKDFKSPHLNYYWLPIMTSILGAYVIASGFFSVFGMCVDTLFLCFLEDLERNNGSLDRPYYMSKSLLKILGKKNEAPPDNKKRKK

SEQ ID NO: 6464 - protein, 338 aa, Homo sapiens
MGGKQRDEDDEAYGKPVKYDPSFRGPIKNRSCTDVICCVLFLLFILGYIVVGIVAWLYGDPRQVLYPRNSTGAYCGMGENKDKPYLLYFNIFSCILSSNIISVAENGLQCPTPQVCVSSCPEDPWTVGKNEFSQTVGEVFYTKNRNFCLPGVPWNMTVITSLQQELCPSFLLPSAPALGRCFPWTNITPPALPGITNDTTIQQGISGLIDSLNARDISVKIFEDFAQSWYWILVALGVALVLSLLFILLLRLVAGPLVLVLILGVLGVLAYGIYYCWEEYRVLRDKGASISQLGFTTNLSAYQSVQETWLAALCPHLRILSFHMAKCGPTTLSALPGH

SEQ ID NO: 6465 - protein, 752 aa, Homo sapiens
MYTGPCKVLHLSSGLLPNSGRFGIVLSDEYQVVTSLWCQLYTTHAPQQASGMLLLNYLVIPSKAQVNKPGYIPNLGECSHYRSKIHLKAGDKLQSPEGKPKTGRIQEKCEGPCISSSNCSQPCAKDFHGEIGFTCNQKKWQKSAETCTSLSVEKLFKDSTGASRLSVAAPSIPLHILDFRAPETIESVAQGIRKNCPFDYACITDMVKSSETTSGNIAFIVELLKNISTDLSDNVTREKMKSYSEVANHILDTAAISNWAFIPNKNASSDLLQSVNLFARQLHIHNNSENIVNELFIQTKGFHINHNTSEKSLNFSMSMNNTTEDILGMVQIPRQELRKLWPNASQAISIAFPTLGAILREAHLQNVSLPRQVNGLVLSVVLPERLQEIILTFEKINKTRNARAQCVGWHSKKRRWDEKACQMMLDIRNEVKCRCNYTSVVMSFSILMSSKSMTDKVLDYITCIGLSVSILSLVLCLIIEATVWSRVVVTEISYMRHVCIVNIAVSLLTANVWFIIGSHFNIKAQDYNMCVAVTFFSHFFYLSLFFWMLFKALLIIYGILVIFRRMMKSRMMVIGFAIGYGCPLIIAVTTVAITEPEKGYMRPEACWLNWDNTKALLAFAIPAFVIVAVNLIVVLVVAVNTQRPSIGSSKSQDVVIIMRISKNVAILTPLLGLTWGFGIATLIEGTSLTFHIIFALLNAFQGFFILLFGTIMDHKIRDALRMRMSSLKGKSRAAENASLGPTNGSKLMNRQG

SEQ ID NO: 6466 - protein, 469 aa, Homo sapiens
SPGAGSRRRVAGAPAPWAAAHGGAMMDVNSSGRPDLYGHLRSFLLPEVGRGLPDLSPDGGADPVAGSWAPHLLSEVTASPAPTWDAPPDNASGCGEQINYGRVEKVVIGSILTLITLLTIAGNCLVVISVCFVKKLRQPSNYLIVSLALADLSVAVAVMPFVSVTDLIGGKWIFGHFFCNVFIAMDVMCCTASIMTLCVISIDRYLGITRPLTYPVRQNGKCMAKMILSVWLLSASITLPPLFGWAQNVNDDKVCLISQDFGYTIYSTAVAFYIPMSVMLFMYYQIYKAARKSAAKHKFPGFPRVEPDSVIALNGIVKLQKEVEECANLSRLLKHERKNISIFKREQKAATTLGIIVGAFTVCWLPFFLLSTARPFICGTSCSCIPLWVERTFLWLGYANSLINPFIYAFFNRDLRTTYRSLLQCQYRNINRKLSAAGMHEALKLAERPERPEFVLQNADYCRKKGHDS

SEQ ID NO: 6467 - protein, 253 aa, Homo sapiens
MANLGCWMLVLFVATWSDLGLCKKRPKPGGWNTGGSRYPGQGSPGGNRYPPQGGGGWGQPHGGGWGQPHGGGWGQPHGGGWGQPHGGGWGQGGGTHSQWNKPSKPKTNMKHMAGAAAAGAVVGGLGGYMLGSAMSRPIIHFGSDYEDRYYRENMHRYPNQVYYRPMDEYSNQNNFVHDCVNITIKQHTVTTTTKGENFTETDVKMMERVVEQMCITQYERESQAYYQRGSSMVLFSSPPVILLISFLIFLIVG

SEQ ID NO: 6468 - protein, 285 aa, Homo sapiens
MANLGCWMLVLFVATWSDLGLCKKRPKPGGWNTGGSRYPGQGSPGGNRYPPQGGGGWGQPHGGGWGQPHGGGWGQPHGGGWGQPHGGGWGQPHGGGWGQPHGGGWGQPHGGGWGQPHGGGWGQGGGTHSQWNKPSKPKTNMKHMAGAAAAGAVVGGLGGYMLGSAMSRPIIHFGSDYEDRYYRENMHRYPNQVYYRPMDEYSNQNNFVHDCVNITIKQHTVTTTTKGENFTETDVKMMERVVEQMCITQYERESQAYYQRGSSMVLFSSPPVILLISFLIFLIVG

SEQ ID NO: 6469 - protein, 352 aa, Homo sapiens [sequence omitted]

SEQ ID NO: 6470 - protein, 1095 aa, Homo sapiens
MPLMMSEEGFENEESDYHTLPRARIMQRKRGLEWFVCDGWKFLCTSCCGWLINICRRKKELKARTVWLGCPEKCEEKHPRNSIKNQKYNVFTFIPGVLYEQFKFFLNLYFLVISCSQFVPALKIGYLYTYWAPLGFVLAVTMTREAIDEFRRFQRDKEVNSQLYSKLTVRGKVQVKSSDIQVGDLIIVEKNQRIPSDMVFLRTSEKAGSCFIRTDQLDGETDWKLKVAVSCTQQLPALGDLFSISAYVYAQKPQMDIHSFEGTFTREDSDPPIHESLSIENTLWASTIVASGTVIGVVIYTGKETRSVMNTSNPKNKVGLLDLELNRLTKALFLALVALSIVMVTLQGFVGPWYRNLFRFLLLFSYIIPISLRVNLDMGKAVYGWMMMKDENIPGTVVRTSTIPEELGRLVYLLTDKTGTLTQNEMIFKRLHLGTVSYGADTMDEIQSHVRDSYSQMQSQAGGNNTGSTPLRKAQSSAPKVRKSVSSRIHEAVKAIVLCHNVTPVYESRAGVTEETEFAEADQDFSDENRTYQASSPDEVALVQWTESVGLTLVSRDLTSMQLKTPSGQVLSFCILQLFPFTSESKRMGVIVRDESTAEITFYMKGADVAMSPIVQYNDWLEEECGNMAREGLRTLVVAKKALTEEQYQDFESRYTQAKLSMHDRSLKVAAVVESLEREMELLCLTGVEDQLQADVRPTLEMLRNAGIKIWMLTGDKLETATCIAKSSHLVSRTQDIHIFRQVTSRGEAHLELNAFRRKHDCALVISGDSLEVCLKYYEHEFVELACQCPAVVCCRCSPTQKARIVTLLQQHTGRRTCAIGDGGNDVSMIQAADCGIGIEGKEGKQASLAADFSITQFRHIGRLLMVHGRNSYKRSAALGQFVMHRGLIISTMQAVFSSVFYFASVPLYQGFLMVGYATIYTMFPVFSLVLDQDVKPEMAMLYPELYKDLTKGRSLSFKTFLIWVLISIYQGGILMYGALVLFESEFVHVVAISFTALILTELLMVALTVRTWHWLMVVAEFLSLGCYVSSLAFLNEYFGIGRVSFGAFLDVAFITTVTFLWKVSAITVVSCLPLYVLKYLRRKLSPPSYCKLAS

SEQ ID NO: 6471 - protein, 376 aa, Homo sapiens
MARGPGPLGRPRPDTVAMPKRGKRLKFRAHDACSGRVTVADYANSDPAVVRSGRVKKAVANAVQQEVKSLCGLEASQVPTEEALSGAGEPCDIIDSSDEMDAQEESIHERTVSRKKKSKRHKEELDGAGGEEYPMDIWLLLASYIRPEDIVNFSLICKNAWTVTCTAAFWTRLYRRHYTLDASLPLRLRPESMEKLRCLRACVIRSLYHMYEPFAARISKNPAIPESTPSTLKNSKCLLFWCRKIVGNRQEPMWEFNFKFKKQSPRLKSKCTGGLQPPVQYEDVHTNPDQDCCLLQVTTLNFIFIPIVMGMIFTLFTINVSTDMRHHRVRLVFQDSPVHGGRKLRSEQGVQVILDPVHSVRLFDWWHPQYPFSLRA

SEQ ID NO: 6472 - protein, 376 aa, Homo sapiens
MARGPGPLGRPRPDTVAMPKRGKRLKFRAHDACSGRVTVADYADSDLAVVRSGRVKKAVANAVRQEVKSLCGLEASQVPAEEALSGAGEPYDIIDSSDEMDAQEENIHERTVSRKKKSKRHKEELDGAGGEEYPMDIWLLLASYIRPEDIVNFSLICKNAWTVTCTAAFWTRLYRRHYTLDASLPLRLRPESMEKLHCLRACVIRSLYHMYEPFAARISKNPAIPESTPSTLKNSKCLLFWCRKIVGNRQEPMWEFNFKFKKQSPRLKSKCTGGLQPPVQYEDVHTNPDQDCCLLQVTTLNFIFIPIVMGMIFTLFTINVSTDMRHHRVRLVFQDSPVHGGRKLRSEQGVQVILDPVHSVRLFDWWHPQYPFSLRA

SEQ ID NO: 6473 - protein, 432 aa, Homo sapiens
MDSNGIRQFCVHVNNSNLNYFQKLQKVNATNFQALAAEFGGESFTSTFQTQSPPSFYRAGDPILTYFPKWSVISLLRQPAGVGAGGLCAESNPAGFLESKSTTCTRFFKNLASSCTLDSALNAASYYNFTVLKVPRSMTDPQNMEVTYEIETNGTFGIQKVSVSLGQTNLTVEPGASLQQHFILRFRAFQQSTAASLTSPRSGNPGYIVGKPLLALTDDISYSVSFLELGGLQGNGSCSVKRHEVQFGVNAISGCKLRLKKADCSHLQQEIYQTLHGRPRPEYVAIFGNADPAQKGGWTRILNRHCSISAINCTSCCLIPVSLEIQVLWAYVGLLSNPQAHVSGVRFLYQCQSIQDSQQVTEVSLTTLVNFVDITQKPQPPRGQPKMDWKWPFDFFPFKVAFSRGVFSQKCSVSPILILCLLLLGVLNLETM

SEQ ID NO: 6474 - protein, 618 aa, Homo sapiens
GPGGPECPMRTPQLALLQVFFLVFPDGVRPQPSSSPSGAVPTSLELQRGTDGGTLQSPSEATATRPAVPGLPTVVPTLVTPSAPGNRTVDLFPVLPICVCDLTPGACDINCCCDRDCYLLHPRTVFSFCLPGSVRSSSWVCVDNSVIFRSNSPFPSRVFMDSNGIRQFCVHVNNSNLNYFQKLQKVNATNFQALAAEFGGESFTSTFQTQSPPSFYRAGDPILTYFPKWSVISLLRQPAGVGAGGLCAESNPAGFLESKSTTCTRFFKNLASSCTLDSALNAASYYNFTVLKVPRSMTDPQNMEFQVPVILTSQANAPLLAGNTCQNVVSQVTYEIETNGTFGIQKVSVSLGQTNLTVEPGASLQQHFILRFRAFQQSTAASLTSPRSGNPGYIVGKPLLALTDDISYSVSFLELGGLQGNGSCSVKRHEVQFGVNAISGCKLRLKKADCSHLQQEIYQTLHGRPRPEYVAIFGNADPAQKGGWTRILNRHCSISAINCTSCCLIPVSLEIQVLWAYVGLLSNPQAHVSGVRFLYQCQSIQDSQQVTEVSLTTLVNFVDITQKPQPPRGQPKMDWKWPFDFFPFKVAFSRGVFSQKCSVSPILILCLLLLGVLNLETM

SEQ ID NO: 6475 - protein, 318 aa, Homo sapiens
IPAWGPTKVANNVTEFIFLGLSQDSGMRWIFFVLFLLFYIVIMVGNLLIFLMVFSDPQLHTPMYFFLSNLSFVDIAYSSATAPKMIADFVSEKKTISYWGCITQMFTFHFFGCAEIFVLTVMAFDRYAAICQPLRYTVIMSANACTVLASLSWLGALGHSFVQTLLTFQLPFCNAQVIDHYFCDVHPVLKLACADTTLINMLVVANSGLISLGCFLILLASYKVILLSLQKQSAESRRKALSTCGSHLTVVTFFFVPCIFIYLRPSTTFPLDKAVSVFYTTITPMLNPLIYTLRNEDVKNAMRQLWSSKISLKEKQRG

SEQ ID NO: 6476 - protein, 347 aa, Homo sapiens
MGDELAPCPVGTTAWPALIQLISKTPCMPQAASNTSLGLGDLRVPSSMLYWLFLPSSLLAAATLAVSPLLLVTILRNQRLRQEPHYLLPANILLSDLAYILLHMLISSSSLGGWELGRMACGILTDAVFAACTSTILSFTAIVLHTYLAVIHPLRYLSFMSHGAAWKAVALIWLVACCFPTFLIWLSKWQDAQLEEQGASYILPPSMGTQPGCGLLVIVTYTSILCVLFLCTALIANCFWRIYAEAKTSGIWGQGYSRARGTLLIHSVLITLYVSTGVVFSLDMVLTRYHHIDSGTHTWLLAANSEVLMMLPRAMLPYLYLLRYRQLLGMVRGHLPSRRHQAIFTIS

SEQ ID NO: 6477 - protein, 2357 aa, Homo sapiens
MVRFGDELGGRYGGPGGGERARGGGAGGAGGPGPGGLQPGQRVLYKQSIAQRARTMALYNPIPVKQNCFTVNRSLFVFSEDNVVRKYAKRITEWPYPAGRGRAGPGGDRVLNSRTPFEYMILATIIANCIVLALEQHLPDGDKTPMSERLDDTEPYFIGIFCFEAGIKIIALGFVFHKGSYLRNGWNVMDFVVVLTGILATAGTDFDLRTLRAVRVLRPLKLVSGIPSLQVVLKSIMKAMVPLLQIGLLLFFAILMFAIIGLEFYMGKFHKACFPNSTDAEPVGDFPCGKEAPARLCEGDTECREYWPGPNFGITNFDNILFAILTVFQCITMEGWTDILYNTNDAAGNTWNWLYFIPLIIIGSFFMLNLVLGVLSGEFAKERERVENRRAFLKLRRQQQIERELNGYLEWIFKAEEVMLAEEDRNAEEKSPLDVLKRAATKKSRNDLIHAEEGEDRFADLCAVGSPFARASLKSGKTESSSYFRRKEKMFRFFIRRMVKAQSFYWVVLCVVALNTLCVAMVHYNQPRRLTTTLYFAEFVFLGLFLTEMSLKMYGLGPRSYFRSSFNCFDFGVIVGSVFEVVWAAIKPGSSFGISVLRALRLLRIFKVTKYWSSLRNLVVSLLNSMKSIISLLFLLFLFIVVFALLGMQLFGGQFNFQDETPTTNFDTFPAAILTVFQILTGEDWNAVMYHGIESQGGVSKGMFSSFYFIVLTLFGNYTLLNVFLAIAVDNLANAQELTKDEEEMEEAANQKLALQKAKEVAEVSPMSAANISIAARQQNSAKARSVWEQRASQLRLQNLRASCEALYSEMDPEERLRFATTRHLRPDMKTHLDRPLVVELGRDGARGPVGGKARPEAAEAPEGVDPPRRHHRHRDKDKTPAAGDQDRAEAPKAESGEPGAREERPRPHRSHSKEAAGPPEARSERGRGPGPEGGRRHHRRGSPEEAAEREPRRHRAHRHQDPSKECAGAKGERRARHRGGPRAGPREAESGEEPARRHRARHKAQPAHEAVEKETTEKEATEKEAEIVEADKEKELRNHQPREPHCDLETSGTVTVGPMHTLPSTCLQKVEEQPEDADNQRNVTRMGSQPPDPNTIVHIPVMLTGPLGEATVVPSGNVDLESQAEGKKEVEADDVMRSGPRPIVPYSSMFCLSPTNLLRRFCHYIVTMRYFEVVILVVIALSSIALAAEDPVRTDSPRNNALKYLDYIFTGVFTFEMVIKMIDLGLLLHPGAYFRDLWNILDFIVVSGALVAFAFSGSKGKDINTIKSLRVLRVLRPLKTIKRLPKLKAVFDCVVNSLKNVLNILIVYMLFMFIFAVIAVQLFKGKFFYCTDESKELERDCRGQYLDYEKEEVEAQPRQWKKYDFHYDNVLWALLTLFTVSTGEGWPMVLKHSVDATYEEQGPSPGYRMELSIFYVVYFVVFPFFFVNIFVALIIITFQEQGDKVMSECSLEKNERACIDFAISAKPLTRYMPQNRQSFQYKTWTFVVSPPFEYFIMAMIALNTVVLMMKFYDAPYEYELMLKCLNIVFTSMFSMECVLKIIAFGVLNYFRDAWNVFDFVTVLGSITDILVTEIANNFINLSFLRLFRAARLIKLLRQGYTIRILLWTFVQSFKALPYVCLLIAMLFFIYAIIGMQVFGNIALDDDTSINRHNNFRTFLQALMLLFRSATGEAWHEIMLSCLSNQACDEQANATECGSDFAYFYFVSFIFLCSFLMLNLFVAVIMDNFEYLTRDSSILGPHHLDEFIRVWAEYDPAACGRISYNDMFEMLKHMSPPLGLGKKCPARVAYKRLVRMNMPISNEDMTVHFTSTLMALIRTALEIKLAPAGTKQHQCDAELRKEISVVWANLPQKTLDLLVPPHKPDEMTVGKVYAALMIFDFYKQNKTTRDQMQQAPGGLSQMGPVSLFHPLKATLEQTQPAVLRGARVFLRQKSSTSLSNGGAIQNQESGIKESVSWGTQRTQDAPHEARPPLERGHSTEIPVGRSGALAVDVQMQSITRRGPDGEPQPGLESQGRAASMPRLAAETQPVTDASPMKRSISTLAQRPRGTHLCSTTPDRPPPSQASSHHHHHRCHRRRDRKQRSLEKGPSLSADMDGAPSSAVGPGLPPGEGPTGCRRERERRQERGRSQERRQPSSSSSEKQRFYSCDRFGGREPPKPKPSLSSHPTSPTAGQEPGPHPQGSGSVNGSPLLSTSGASTPGRGGRRQLPQTPLTPRPSITYKTANSSPIHFAGAQTSLPAFSPGRLSRGLSEHNALLQRDPLSQPLAPGSRIGSDPYLGQRLDSEASVHALPEDTLTFEEAVATNSGRSSRTSYVSSLTSQSHPLRRVPNGYHCTLGLSSGGRARHSYHHPDQDHWC

SEQ ID NO: 6478 - protein, 2597 aa, Homo sapiens
MASLFHQLQILVWKNWLGVKRQPLWTLVLILWPVIIFIILAITRTKFPPTAKPTCYLAPRNLPSTGFFPFLQTLLCDTDSKCKDTPYGPQDLLRRKGIDDALFKDSEILRKSSNLDKDSSLSFQSTQVPERRHASLATVFPSPSSDLEIPGTYTFNGSQVLARILGLEKLLKQNSTSEDIRRELCDSYSGYIVDDAFSWTFLGRNVFNKFCLSNMTLLESSLQELNKQFSQLSSDPNNQKIVFQEIVRMLSFFSQVQEQKAVWQLLSSFPNVFQNDTSLSNLFDVLRKANSVLLVVQKVYPRFATNEGFRTLQKSVKHLLYTLDSPAQGDSDNITHVWNEDDGQTLSPSSLAAQLLILENFEDALLNISANSPYIPYLACVRNVTDSLARGSPENLRLLQSTIRFKKSFLRNGSYEDYFPPVPEVLKSKLSQLRNLTELLCESETFSLIEKSCQLSDMSFGSLCEESEFDLQLLEAAELGTEIAASLLYHDNVISKKVRDLLTGDPSKINLNMDQFLEQALQMNYLENITQLIPIIEAMLHVNNSADASEKPGQLLEMFKNVEELKEDLRRTTGMSNRTIDKLLAIPIPDNRAEIISQVFWLHSCDTNITTPKLEDAMKEFCNLSLSERSRQSYLIGLTLLHYLNIYNFTYKASFFPRKDQKPVEKMMELFIRLKEILNQMASGTHPLLDKMRSLKQMHLPRSVPLTQAMYRSNRMNTPQGSFSTISQALCSQGITTEYLTAMLPSSQRPKGNHTKDFLTYKLTKEQIASKYGIPINSTPFCFSLYKDIINMPAGPVIWAFLKPMLLGRILYAPYNPVTKAIMEKSNVTLRQLAELREKSQEWMDKSPLFMNSFHLLNQAIPMLQNTLRNPFVQVFVKFSVGLDAVELLKQIDELDILRLKLENNIDIIDQLNTLSSLTVNISSCVLYDRIQAAKTIDEMEREAKRLYKSNELFGSVIFKLPSNRSWHRGYDSGNVFLPPVIKYTIRMSLKTAQTTRSLRTKIWAPGPHNSPSHNQIYGRAFIYLQDSIERAIIELQTGRNSQEIAVQVQAIPYPCFMKDNFLTSVSYSLPIVLMVAWVVFIAAFVKKLVYEKDLRLHEYMKMMGVNSCSHFFAWLIESVGFLLVTIVILIIILKFGNILPKTNGFILFLYFSDYSFSVIAMSYLISVFFNNTNIAALIGSLIYIIAFFPFIVLVTVENELSYVLKVFMSLLSPTAFSYASQYIARYEEQGIGLQWENMYTSPVQDDTTSFGWLCCLILADSFIYFLIAWYVRNVFPGTYGMAAPWYFPILPSYWKERFGCAEVKPEKSNGLMFTNIMMQNTNPSASPEYMFSSNIEPEPKDLTVGVALHGVTKIYGSKVAVDNLNLNFYEGHITSLLGPNGAGKTTTISMLTGLFGASAGTIFVYGKDIKTDLHTVRKNMGVCMQHDVLFSYLTTKEHLLLYGSIKVPHWTKKQLHEEVKRQTLKDTGLYSHRHKRVGTLSGGMKRKLSISIALIGGSRVVILDEPSTGVDPCSRRSIWDVISKNKTARTIILSTHHLDEAEVLSDRIAFLEQGGLRCCGSPFYLKEAFGDGYHLTLTKKKSPNLNANAVCDTMAVTAMIQSHLPEAYLKEDIGGELVYVLPPFSTKVSGAYLSLLRALDNGMGDLNIGCYGISDTTVEEVFLNLTKESQKNSAMSLEHLTQKKIGNSNANGISTPDDLSVSSSNFTDRDDKILTRGERLDGFGLLLKKIMAILIKRFHHTRRNWKGLIAQVILPIVFVTTAMGLGTLRNSSNSYPEIQISPSLYGTSEQTAFYANYHPSTEALVSAMWDFPGIDNMCLNTSDLQCLNKDSLEKWNTSGEPITNFGVCSCSENVQECPKFNYSPPHRRTYSSQVIYNLTGQRVENYLISTANEFVQKRYGGWSFGLPLTKDLRFDITGVPANRTLAKVWYDPEGYHSLPAYLNSLNNFLLRVNMSKYDAARHGIIMYSHPYPGVQDQEQATISSLIDILVALSILMGYSVTTASFVTYVVREHQTKAKQLQHISGIGVTCYWVTNFIYDMVFYLVPVAFSIGIIAIFKLPAFYSENNLGAVSLLLLLFGYATFSWMYLLAGLFHETGMAFITYVCVNLFFGINSIVSLSVVYFLSKEKPNDPTLELISETLKRIFLIFPQFCFGYGLIELSQQQSVLDFLKAYGVEYPNETFEMNKLGAMFVALVSQGTMFFSLRLLINESLIKKLRLFFRKFNSSHVRETIDEDEDVRAERLRVESGAAEFDLVQLYCLTKTYQLIHKKIIAVNNISIGIPAGECFGLLGVNGAGKTTIFKMLTGDIIPSSGNILIRNKTGSLGHVDSHSSLVGYCPQEDALDDLVTVEEHLYFYARVHGIPEKDIKETVHKLLRRLHLMPFKDRATSMCSYGTKRKLSTALALIGKPSILLLDEPSSGMDPKSKRHLWKIISEEVQNKCSVILTSHSMEECEALCTRLAIMVNGKFQCIGSLQHIKSRFGRGFTVKVHLKNNKVTMETLTKFMQLHFPKTYLKDQHLSMLEYHVPVTAGGVANIFDLLETNKTALNITNFLVSQTTLEEVFINFAKDQKSYETADTSSQGSTISVDSQDDQMES

SEQ ID NO: 6479 - protein, 2277 aa, Homo sapiens
  VARIANT 1707: Xaa = Any Amino Acid
MFTYIKIITSGDSDNITHVWNEDDGQTLSPSSLAAQLLILENFEDALLNISANSPYIPYLACVRNVTDSLARGSPENLRLLQSTIRFKKSFLRNGSYEDYFPPVPEVLKSKLSQLRNLTELLCESETFSLIEKSCQLSDMSFGSLCEESEFDLQLLEAAELGTEIAASLLYHDNVISKKVRDLLTGDPSKINLNMDQFLEQALQMNYLENITQLIPIIEAMLHVNNSADASEKPGQLLEMFKNVEELKEDLRRTTGMSNRTIDKLLAIPIPDNRAEIISQVFWLHSCDTNITTPKLEDAMKEFCNLSLSERSRQSYLIGLTLLHYLNIYNFTYKVFFPRKDQKPVEKMMELFIRLKEILNQMASGTHPLLDKMRSLKQMHLPRSVPLTQAMYRSNRMNTPQGSFSTISQALCSQGITTEYLTAMLPSSQRPKGNHTKDFLTYKLTKEQIASKYGIPINTTPFCFSLYKDIINMPAGPVIWAFLKPMLLGRILYAPYNPVTKAIMEKSDVTLRQLAELREKSQEWMDKSPLFMNSFHLLNQAIPMLQNTLRNPFVQVFVKFSVGLDAVELLKQIDELDILRLKLENNIDIIDQLNTLSSLTVNISSCVLYDRIQAAKTIDEMEREAKRLYKSNELFGSVIFKLPSNRSWHRGYDSGNVFLPPVIKYTIRMSLKTAQTTRSLRTKIWAPGPHNSPSHNQIYGRAFIYLQDSIERAIIELQTGRNSQEIAVQVQAIPYPCFMKDNFLTSVSYSLPIVLMVAWVVFIAAFVKKLVYEKDLRLHEYMKMMGVNSCSHFFAWLIESVGFLLVTIVILIIILKFGNILPKTNGFILFLYFSDYSFSVIAMSYLISVFFNNTNIAALIGSLIYIIAFFPFIVLVTVENELSYVLKVFMSLLSPTAFSYASQYIARYEEQGIGLQWENMYTSPVQDDTTSFGWLCCLILADSFIYFLIAWYVRNVFPGTYGMAAPWYFPILPSYWKERFGCAEVKPEKSNGLMFTNIMMQNTNPSASPEYMFSSNIEPEPKDLTVGVALHGVTKIYGSKVAVDNLNLNFYEGHITSLLGPNGAGKTTTISMLTGLFGASAGTIFVYGKDIKTDLHTVRKNMGVCMQHDVLFSYLTTKEHLLLYGSIKVPHWTKKQLHEEVKRTLKDTGLYSHRHKRVGTLSGGMKRKLSISIALIGGSRVVILDEPSTGVDPCSRRSIWDVISKNKTARTIILSTHHLDEAEVLSDRIAFLEQGGLRCCGSPFYLKEAFGDGYHLTLTKKKSPNLNANAVCDTMAVTAMIQSHLPEAYLKEDIGGELVYVLPPFSTKVSGAYLSLLRALDNGMGDLNIGCYGISDTTVEEVFLNLTKESQKNSAMSLEHLTQKKIGNSNANGISTPDDLSVSSSNFTDRDDKILTRGERLDGFGLLLKKIMAILIKRFHHTRRNWKGLIAQVILPIVFVTTAMGLGTLRNSSNSYPEIQISPSLYGTSEQTAFYANYHPSTEALVSAMWDFPGIDNMCLNTSDLQCLNKDSLEKWNTSGEPITNFGVCSCSENVQECPKFNYSPPHRRTYSSQVIYNLTGQRVENYLISTANEFVQKRYGGWSFGLPLTKDLRFDITGVPANRTLAKVWYDPEGYHSLPAYLNSLNNFLLRVNMSKYDAARHGIIMYSHPYPGVQDQEQATISSLIDILVALSILMGYSVTTASFVTYVVREHQTKAKQLQHISGXGVTCYWVTNFIYDMVFYLVPVAFSIGIIAIFKLPAFYSENNLGAVSLLLLLFGYATFSWMYLLAGLFHETGMAFITYVCVNLFFGINSIVSLSVVYFLSKEKPNDPTLELISETLKRIFLIFPQFCFGYGLIELSQQQSVLDFLKAYGVEYPNETFEMNKLGAMFVALVSQGTMFFSLRLLINESLIKKLRLFFRKFNSSHVRETIDEDEDVRAERLRVESGAAEFDLVQLYCLTKTYQLIHKKIIAVNNISIGIPAGECFGLLGVNGAGKTTIFKMLTGDIIPSSGNILIRNKTGSLGHVDSHSSLVGYCPQEDALDDLVTVEEHLYFYARVHGIPEKDIKETVHKLLRRLHLMPFKDRATSMCSYGTKRKLSTALALIGKPSILLLDEPSSGMDPKSKRHLWKIISEEVQNKCSVILTSHSMEECEALCTRLAIMVNGKFQCIGSLQHIKSRFGRGFTVKVHLKNNKVTMETLTKFMQLHFPKTYLKDQHLSMLEYHVPVTAGGVANIFDLLETNKTALNITNFLVSQTTLEEVFINFAKDQKSYETADTSSQGSTISVDSQDDQMES

SEQ ID NO: 6480 - protein, 1194 aa, Homo sapiens [sequence omitted]

SEQ ID NO: 6481 - protein, 260 aa, Homo sapiens
MKDRTQELRTAKDSDDDDDVAVTVDRDRFMDEFFEQVEEIRGFIDKIAENVEEVKRKHSAILASPNPDEKTKEELEELMSDIKKTANKVRSKLKSIEQSIEQEEGLNRSSADLRIRKTQHSTLSRKFVEVMSEYNATQSDYRERCKGRIQRQLEITGRTTTSEELEDMLESGNPAIFASGIIMDSSISKQALSEIETRHSEIIKLENSIRELHDMFMDMAMLVESQPQGAFLKSCPEPQPNREEGALWSSGAPGPAGRDD

SEQ ID NO: 6482 - protein, 251 aa, Homo sapiens
MKDRTQELRTAKDSDDDDDVAVTVDRDRFMDEFFEQVEEIRGFIDKIAENVEEVKRKHSAILASPNPDEKTKEELEELMSDIKKTANKVRSKLKSIEQSIEQEEGLNRSSADLRIRKTQHSTLSRKFVEVMSEYNATQSDYRERCKGRIQRQLEITGRTTTSEELEDMLESGNPAIFASGIIMDSSISKQALSEIETRHSEIIKLENSIRELHDMFMDMAMLVESQTMWRGPCLTPRRPSSTRARRAGRKS

SEQ ID NO: 6483 - protein, 288 aa, Homo sapiens
MKDRTQELRTAKDSDDDDDVAVTVDRDRFMDEFFEQVEEIRGFIDKIAENVEEVKRKHSAILASPNPDEKTKEELEELMSDIKKTANKVRSKLKSIEQSIEQEEGLNRSSADLRIRKTQHSTLSRKFVEVMSEYNATQSDYRERCKGRIQRQLEITGRTTTSEELEDMLESGNPAIFASGIIMDSSISKQALSEIETRHSEIIKLENSIRELHDMFMDMAMLVESQGEMIDRIEYNVEHAVDYVERAVSDTKKAVKYQSKARRKKIMIIICCVILGIVIASTVGGIFA

SEQ ID NO: 6484 - protein, 582 aa, Homo sapiens
MAARSWQDELAQQAEEGSARLREMLSVGLGFLRTELGLDLGLEPKRYPGWVILVGTGALGLLLLFLLGYGWAAACAGARKKRRSPPRKREEAAAVPAAAPDDLALLKNLRSEEQKKKNRKKLSEKPKPNGRTVEVAEGEAVRTPQSVTAKQPPEIDKKNEKSKKNKKKSKSDAKAVQNSSRHDGKEVDEGAWETKISHREKRQQRKRDKVLTDSGSLDSTIPGIENTITVTTEQLTTASFPVGSKKNKGDSHLNVQVSNFKSGKGDSTLQVSSGLNENLTVNGGGWNEKSVKLSSQISAGEEKWNSVSPASAGKRKTEPSAWSQDTGDANTNGKDWGRSWSDRSIFSGIGSTAEPVSQSTTSDYQWDVSRNQPYIDDEWSGLNGLSSADPNSDWNAPAEEWGNWVDEERASLLKSQEPIPDDQKVSDDDKEKGEGALPTGKSKKKKKKKKKQGEDNSTAQDTEELEKEIREDLPVNTSKTRPKQEKAFSLKTISTSDPAEVLVKNSQPIKTLPPATSTEPSVILSKSDSDKSSSQVPPILQETDKSKSNTKQNSVPPSQTKSETSWESPKQIKKKKKARRET

SEQ ID NO: 6485 - protein, 314 aa, Homo sapiens
PRAPGRSLHPPAPGTVDSTTLSSALSAPKQPGTAQRPACRHGKSLSHLPLHSSKEDAYDGVTSENMRNGLVNSEVHNEDGRNGDVSQFPYVEFTGRDSVTCPTCQGTGRIPRGQENQLVALIPYSDQRLRPRRTKLYVMASVFVCLLLSGLAVFFLFPRSIDVKYIGVKSAYVSYDVQKRTIYLNITNTLNITNNNYYSVEVENITAQVQFSKTVIGKARLNNISIIGPLDMKQIDYTVPTVIAEEMSYMYDFCTLISIKVHNIVLMMQVTVTTTYFGHSEQISQERYQYVDCGRNTTYQLGQSEYLNVLQPQQ

SEQ ID NO: 6486 - protein, 274 aa, Homo sapiens
MGKSLSHLPLHSSKEDAYDGVTSENMRNGLVNSEVHNEDGRNGDVSQFPYVEFTGRDSVTCPTCQGTGRIPRGQENQLVALIPYSDQRLRPRRTKLYVMASVFVCLLLSGLAVFFLFPRSIDVKYIGVKSAYVSYDVQKRTIYLNITNTLNITNNNYYSVEVENITAQVQFSKTVIGKARLNNITIIGPLDMKQIDYTVPTVIAEEMSYMYDFCTLISIKVHNIVLMMQVTVTTTYFGHSEQISQERYQYVDCGRNTTYQLGQSEYLNVLQPQQ

SEQ ID NO: 6487 - protein, 501 aa, Homo sapiens
MRAEEPCAPGAPSALGAQRTPGPELRLSSQLLPELCTFVVRVLFYLGPVYLAGYLGLSITWLLLGALLWMWWRRNRRGKLGRLAAAFEFLDNEREFISRELRGQHLPAWIHFPDVERVEWANKIISQTWPYLSMIMESKFREKLEPKIREKSIHLRTFTFTKLYFGQKCPRVNGVKAHTNTCNRRRVTVDLQICYIGDCEISVELQKIQAGVNGIQLQGTLRVILEPLLVDKPFVGAVTVFFLQKQHLQINWTGLTNLLDAPGINDVSDSLLEDLIATHLVLPNRVTVPVKKGLDLTNLRFPLPCGVIRVHLLEAEQLAQKDNFLGLRGKSDPYAKVSIGLQHFRSRTIYRNLNPTWNEVFEFMVYEVPGQDLEVDLYDEDTDRDDFLGSLQICLGDVMTNRVVDEWFVLNDTTSGRLHLRLEWLSLLTDQEVLTEDHGGLSTAILVVFLESACNLPRNPFDYLNGEYRAKKLSRFARVKQGQQRPFFLCQTICRQEDTYK

SEQ ID NO: 6488 - protein, 455 aa, Homo sapiens
MSFYSKQDYNMDLELDEYYNKTLATENNTAATRNSDFPVWDDYKSSVDDLQYFLIGLYTFVSLLGFMGNLLILMALMKKRNQKTTVNFLIGNLAFSDILVVLFCSPFTLTSVLLDQWMFGKVMCHIMPFLQCVSVLVSTLILISIAIVRYHMIKHPISNNLTANHGYFLIATVWTLGFAICSPLPVFHSLVELQETFGSALLSSRYLCVESWPSDSYRIAFTISLLLVQYILPLVCLTVSHTSVCRSISCGLSNKENRLEENEMINLTLHPSKKSGPQVKLSGSHKWSYSFIKKHRRRYSKKTACVLPAPERPSQENHSRILPENFGSVRSQLSSSSKFIPGVPTCFEIKPEENSDVHELRVKRSVTRIKKRSRSVFYRLTILILVFAVSWMPLHLFHVVTDFNDNLISNRHFKLVYCICHLLGMMSCCLNPILYGFLNNGIKADLVSLIHCLHM

SEQ ID NO: 6489 - protein, 862 aa, Homo sapiens
MRMCTPIRGLLMALAVMFGTAMAFAPIPRITWEHREVHLVQFHEPDIYNYSALLLSEDKDTLYIGAREAVFAVNALNISEKQHEVYWKVSEDKKAKCAEKGKSKQTECLNYIRVLQPLSATSLYVCGTNAFQPACDHLNLTSFKFLGKNEDGKGRCPFDPAHSYTSVMVDGELYSGTSYNFLGSEPIISRNSSHSPLRTEYAIPWLNEPSFVFADVIRKSPDSPDGEDDRVYFFFTEVSVEYEFVFRVLIPRIARVCKGDQGGLRTLQKKWTSFLKARLICSRPDSGLVFNVLRDVFVLRSPGLKVPVFYALFTPQLNNVGLSAVCAYNLSTAEEVFSHGKYMQSTTVEQSHTKWVRYNGPVPKPRPGACIDSEARAANYTSSLNLPDKTLQFVKDHPLMDDSVTPIDNRPRLIKKDVNYTQIVVDRTQALDGTVYDVMFVSTDRGALHKAISLEHAVHIIEETQLFQDFEPVQTLLLSSKKGNRFVYAGSNSGVVQAPLAFCGKHGTCEDCVLARDPYCAWSPPTATCVALHQTESPSRGLIQEMSGDASVCPDKSKGSYRQHFFKHGGTAELKCSQKSNLARVFWKFQNGVLKAESPKYGLMGRKNLLIFNLSEGDSGVYQCLSEERVKNKTVFQVVAKHVLEVKVVPKPVVAPTLSVVQTEGSRIATKVLVASTQGSSPPTPAVQATSSGAITLPPKPAPTGTSCEPKIVINTVPQLHSEKTMYLKSSDNRLLMSLFLFFFVLFLCLFFYNCYKGYLPRQCLKFRSALLIGKKKPKSDFCDREQSLKETLVEPGSFSQQNGEHPKPALDTGYETEQDTITSKVPTDREDSQRIDDLSARDKPFDVKCELKFADSDADGD

SEQ ID NO: 6490 - protein, 862 aa, Homo sapiens
MRMCTPIRGLLMALAVMFGTAMAFAPIPRITWEHREVHLVQFHEPDIYNYSALLLSEDKDTLYIGAREAVFAVNALNISEKQHEVYWKVSEDKKAKCAEKGKSKQTECLNYIRVLQPLSATSLYVCGTNAFQPACDHLNLTSFKFLGKNEDGKGRCPFDPAHSYTSVMVDGELYSGTSYNFLGSEPIISRNSSHSPLRTEYAIPWLNEPSFVFADVIRKSPDSPDGEDDRVYFFFTEVSVEYEFVFRVLIPRIARVCKGDQGGLRTLQKKWTSFLKARLICSRPDSGLVFNVLRDVFVLRSPGLKVPVFYALFTPQLNNVGLSAVCAYNLSTAEEVFSHGKYMQSTTVEQSHTKWVRYNGPVPKPRPGACIDSEARAANYTSSLNLPDKTLQFVKDHPLMDDSVTPIDNRPRLIKKDVNYTQIVVDRTQALDGTVYDVMFVSTDRGALHKAISLEHAVHIIEETQLFQDFEPVQTLLLSSKKGNRFVYAGSNSGVVQAPLAFCGKHGTCEDCVLARDPYCAWSPPTATCVALHQTESPSRGLIQEMSGDASVCPDKSKGSYRQHFFKHGGTAELKCSQKSNLARVFWKFQNDVLKAESPKYGLMGRKNLLIFNLSEGDSGVYQCLSEERVKNKTVFQVVAKHVLEVKVVPKPVVAPTLSVVQTEGSRIATKVLVASTQGSSPPTPAVQATSSGAITLPPKPAPTGTSCEPKIVINTVPQLHSEKTMYLKSSDNRLLMSLFLFFFVLFLCLFFYNCYKGYLPRQCLKFRSALLIGKKKPKSDFCDREQSLKETLVEPGSFSQQNGEHPKPALDTGYETEQDTITSKVPTDREDSQRIDDLSARDKPFDVKCELKFADSDADGD

SEQ ID NO: 6491 - protein, 513 aa, Homo sapiens
KNKIARLGNGSQDLNHGVDNENGGRRGPNRTSYCRNPLCEPGSSGGSSGSHTSSASVTSVRSRTRSSSGTGLSSPPLATQTVVPLQHCKIPELPVQASILFELQLFFCQLIALFVHYINIYKTVWWYPPSHPPSHTSLNFHLIDFNLLMVTTIVLGRRFIGSIVKEASQRGKVSLFRSILLFLTRFTVLTATGWSLCRSLIHLFRTYSFLNLLFLCYPFGMYIPFLQLNCDLRKTSLFNHMASMGPREAVSGLAKSRDYLLTLRETWKQHTRQLYGPDAMPTHACCLSPSLIRSEVEFLKMDFNWRMKEVLVSSMLSAYYVAFVPVWFVKNTHYYDKRWSCELFLLVSISTSVILMQHLLPASYCDLLHKAAAHLGCWQKVDPALCSNVLQHPWTEECMWPQGVLVKHSKNVYKAVGHYNVAIPSDVSHFRFHFFFSKPLRILNILLLLEGAVIVYQLYSLMSSEKWHQTISLALILFSNYYAFFKLLRDRLVLGKAYSYSASPQRDLDHRFS

SEQ ID NO: 6492 - protein, 502 aa, Homo sapiens
MAIHLDKQNIILKNDKDEYLKKTRDGVLPPYQDAKPPSPASIKKTYTTSKFNDAEPAKGNLFIGVEVLPENLHLDESETSEEDHGSLEKEKYEQFLSLEEGTKAHYFFEKVVNAAQTWFSLFGWPEGPHSFSIPETIRRDVYKMQFYSSTSPPQKFSRQNDFSKYNKTIYDVLLHLSGKMPPGINSSQSLPVDNHEKRVIQLHLQHSSLLDFLNAQGGCISHVLPEFLLEPEDYKRWIEIMSSTNTMPVSSCTPKKKCSIVIEMSKFEAWSKRAWTDVFLQIYKVLVLSRVVPYCSNNMPPICVQNTPKVNPCFASSNIYSDSERILLSWMNINYENTRHVIWKNCHKDVIPSERWIVNFDKDLSDGLVFATQLGAYCPFLIESHFINMYTRPKSPEEYLHNCLIIVNTLYEIDFDVEIQVCLRVFPKEMDAGVSGLRKEDMPSVWVVTIRLAVAVARTKRQKKGDIQFACFFVCLFFFIFVVISFSLWSRMHFFLLLPLDI

SEQ ID NO: 6493 - protein, 492 aa, Homo sapiens
MVKFPALTHYWPLIRFLVPLGITNIAIDFGEQALNRGIAAVKEDAVEMLASYGLAYSLMKFFTGPMSDFKNVGLVFVNSKRDRTKAVLCMVVAGAIAAVFHTLIAYSDLGYYIINKLHHVDESVGSKTRRAFLYLAAFPFMDAMAWTHAGILLKHKYSFLVGCASISDVIAQVVFVAILLHSHLECREPLLIPILSLYMGALVRCTTLCLGYYKNIHDIIPDRSGPELGGDATIRKMLSFWWPLALILATQRISRPIVNLFVSRDLGGSSAATEAVAILTATYPVGHMPYGWLTEIRAVYPAFDKNNPSNKLVSTSNTVTAAHIKKFTFVCMALSLTLCFVMFWTPNVSEKILIDIIGVDFAFAELCVVPLRIFSFFPVPVTVRAHLTGWLMTLKKTFVLAPSSVLRIIVLIASLVVLPYLGVHGATLGVGSLLAGFVGESTMVAIAACYVYRKQKKKMENESATEGEDSAMTDMPPTEEVTDIVEMREENE

SEQ ID NO: 6494 - protein, 627 aa, Homo sapiens
MELGGPGAPRLLPPLLLLLGTGLLRASSHVETRAHAEERLLKKLFSGYNKWSRPVANISDVVLVRFGLSIAQLIDVDEKNQMMTTNVWVKQEWHDYKLRWDPADYENVTSIRIPSELIWRPDIVLYNNADGDFAVTHLTKAHLFHDGRVQWTPPAIYKSSCSIDVTFFPFDQQNCTMKFGSWTYDKAKIDLVNMHSRVDQLDFWESGEWVIVDAVGTYNTRKYECCAEIYPDITYAFVIRRLPLFYTINLIIPCLLISCLTVLVFYLPSECGEKITLCISVLLSLTVFLLLITEIIPSTSLVIPLIGEYLLFTMIFVTLSIVITVFVLNVHHRSPRTHTMPTWVRRVFLDIVPRLLLMKRPSVVKDNCRRLIESMHKMASAPRFWPEPEGEPPATSGTQSLHPPSPSFCVPLDVPAEPGPSCKSPSDQLPPQQPLEAEKASPHPSPGPCRPPHGTQAPGLAKARSLSVQHMSSPGEAVEGGVRCRSRSIQYCVPRDDAAPEADGQAAGALASRNTHSAELPPPDQPSPCKCTCKKEPSSVSPSATVKTRSTKAPPPHLPLSPALTRAVEGVQYIADHLKAEDTDFSVKEDWKYVAMVIDRIFLWMFIIVCLLGTVGLFLPPWLAGMI

SEQ ID NO: 6495 - protein, 486 aa, Homo sapiens
MAKVNRARSTSPPDGGWGWMIVAGCFLVTICTRAVTRCISIFFVEFQTYFTQDYAQTAWIHSIVDCVTMLCAPLGSVVSNHLSCQVGIMLGGLLASTGLILSSFATSLKHLYLTLGVLTGLGFALCYSPAIAMVGKYFSRRKALAYGIAMSGSGIGTFILAPVVQLLIEQFSWRGALLILGGFVLNLCVCGALMRPITLKEDHTTPEQNHVCRTQKEDIKRVSPYSSLTKEWAQTCLCCCLQQEYSFLLMSDFVVLAVSVLFMAYGCSPLFVYLVPYALSVGVSHQQAAFLMSILGVIDIIGNITFGWLTDRRCLKNYQYVCYLFAVGMDGLCYLCLPMLQSLPLLVPFSCTFGYFDGAYVTLIPVVTTEIVGTTSLSSALGVVYFLHAVPYLVSPPIAGRLVDTTGSYTAAFLLCGFSMIFSSVLLGFARLIKRMRKTQLQFIAKESDPKLQLWTNGSVAYSVARELDQKHGEPVATAVPGYSLT

SEQ ID NO: 6496 - protein, 1083 aa, Homo sapiens
MRDNEKAWWQQWTSHTGLEGWGGTQEDRMGFGGAVAALRGRPSPLQSTIHESYGRPEEQVLINRQEITNKADAWDMQEFITHMYIKQLLRHPAFQLLLALLLVINAITIALRTNSYLDQKHYELFSTIDDIVLTILLCEVLLGWLNGFWIFWKDGWNILNFIIVFILLLRFFINEINIPSINYTLRALRLVHVCMAVEPLARIIRVILQSVPDMANIMVLILFFMLVFSVFGVTLFGAFVPKHFQNIQVALYTLFICITQDGWVDIYSDFQTEKREYAMEIGGAIYFTIFITIGAFIGINLFVIVVTTNLEQMMKAGEQGQQQRITFSETGAEEEEENDQLPLVHCVVARSEKSGLLQEPLAGGPLSNLSENTCDNFCLVLEAIQENLRQYKEIRDELNMIVEEVRAIRFNQEQESEVLNRRSSTSGSLETTSSKDIRQMSQQQDLLSALVSMEKDFFPAPSRTISSTEKGTQRILLLLLLLTGDGALNLPEAYNTSCSSNLSTNSSSNGSTEQTTSIQKTQEEKLNTTISTTSKGTLLPNSIMTSTLKDQGGISRTTALSSTASSVETPKQNQETPIITPSASNTTVNGTQSSVSIGFQESDTITSPTALNTPGSDVQSSGSMATTVSGKSAITTSPTAKSTPGHHVQSSGSMATTVSGKSAITTSPTALNKTTGIKESSPMTASEVMHTTLLNTTTLGTTLLGTTTSETQEGKTTAASLSPTTTSMISKLSGTHHNTVSQTPSHLAESTSSVATAIIQSHEMTAAHSTGLLPRSSETTKSSAVTGASQTSPKHTQSSGPRVGACALDEYAGSRGVCMCNDSYYFHAELSRVSVSLHCWPQKIEVVLSSCILQTRRWMLMKDAFSGCSSISKIEQGLRVQVFLLEKKEGTCGLRLSTNSSHALYSLEVQLLQVLPGFISNDSTMLSFSCTYTLVVNVSQTHPYQVFSFPYSTIHVLGTGDTIIILGIFTDLQLLTLLENRTVPLGMPFYVVLKTISSDLPWCCPVSNRLLQGLRANGASLEVTLAFNLIRFSTSDTLYLHGRVTLCDTRARRPCQPVSGQPRDLLRSRRSLACKAVPAGQAG

SEQ ID NO: 6497 - protein, 1256 aa, Homo sapiens
MYLWLKLLAFGFAFLDTEVFVTGQSPTPSPTGLTTAKMPSVPLSSDPLPTHTTAFSPASTFERENDFSETTTSLSPDNTSTQVSPDSLDNASAFNTTGVSSVQTPHLPTHADSQTPSAGTDTQTFSGSAANAKLNPTPGSNAISDAYLNASETTTLSPSGSAVISTTTIATTPSKPTCDEKYANITVDYLYNKETKLFTAKLNVNENVECGNNTCTNNEVHNLTECKNASVSISHNSCTAPDKTLILDVPPGVEKFQLHDCTQVEKADTTICLKWKNIETFTCDTQNITYRFQCGNMIFDNKEIKLENLEPEHEYKCDSEILYNNHKFTNASKIIKTDFGSPGEPQIIFCRSEAAHQGVITWNPPQRSFHNFTLCYIKETEKDCLNLDKNLIKYDLQNLKPYTKYVLSLHAYIIAKVQRNGSAAMCHFTTKSAPPSQVWNMTVSMTSDNSMHVKCRPPRDRNGPHERYHLEVEAGNTLVRNESHKNCDFRVKDLQYSTDYTFKAYFHNGDYPGEPFILHHSTSYNSKALIAFLAFLIIVTSIALLVVLYKIYDLHKKRSCNLDEQQELVERDDEKQLMNVEPIHADILLETYKRKIADEGRLFLAEFQSIPRVFSKFPIKEARKPFNQNKNRYVDILPYDYNRVELSEINGDAGSNYINASYIDGFKEPRKYIAAQGPRDETVDDFWRMIWEQKATVIVMVTRCEEGNRNKCAEYWPSMEEGTRAFGDVVVKINQHKRCPDYIIQKLNIVNKKEKATGREVTHIQFTSWPDHGVPEDPHLLLKLRRRVNAFSNFFSGPIVVHCSAGVGRTGTYIGIDAMLEGLEAENKVDVYGYVVKLRRQRCLMVQVEAQYILIHQALVEYNQFGETEVNLSELHPYLHNMKKRDPPSEPSPLEAEFQRLPSYRSWRTQHIGNQEENKSKNRNSNVIPYDYNRVPLKHELEMSKESEHDSDESSDDDSDSEEPSKYINASFIMSYWKPEVMIAAQGPLKETIGDFWQMIFQRKVKVIVMLTELKHGDQEICAQYWGEGKQTYGDIEVDLKDTDKSSTYTLRVFELRHSKRKDSRTVYQYQYTNWSVEQLPAEPKELISMIQVVKQKLPQKNSSEGNKHHKSTPLLIHCRDGSQQTGIFCALLNLLESAETEEVVDIFQVVKALRKARPGMVSTFEQYQFLYDVIASTYPAQNGQVKKNNHQEDKIEFDNEVDKVKQDANCVNPLGAPEKLPEAKEQAEGSEPTSGTEGPEHSVNGPASPALNQGS

SEQ ID NO: 6498 - protein, 2257 aa, Homo sapiens
MVNENTRMYIPEENHQGSNYGSPRPAHANMNANAAAGLAPEHIPTPGAALSWQAAIDAARQAKLMGSAGNATISTVSSTQRKRQQYGKPKKQGSTTATRPPRALLCLTLKNPIRRACISIVEWKPFEIIILLTIFANCVALAIYIPFPEDDSNATNSNLERVEYLFLIIFTVEAFLKVIAYGLLFHPNAYLRNGWNLLDFIIVVVGLFSAILEQATKADGANALGGKGAGFDVKALRAFRVLRPLRLVSGVPSLQVVLNSIIKAMVPLLHIALLVLFVIIIYAIIGLELFMGKMHKTCYNQEGIADVPAEDDPSPCALETGHGRQCQNGTVCKPGWDGPKHGITNFDNFAFAMLTVFQCITMEGWTDVLYWVNDAVGRDWPWIYFVTLIIIGSFFVLNLVLGVLSGEFSKEREKAKARGDFQKLREKQQLEEDLKGYLDWITQAEDIDPENEDEGMDEEKPRNMSMPTSETESVNTENVAGGDIEGENCGARLAHRISKSKFSRYWRRWNRFCRRKCRAAVKSNVFYWLVIFLVFLNTLTIASEHYNQPNWLTEVQDTANKALLALFTAEMLLKMYSLGLQAYFVSLFNRFDCFVVCGGILETILVETKIMSPLGISVLRCVRLLRIFKITRYWNSLSNLVASLLNSVRSIASLLLLLFLFIIIFSLLGMQLFGGKFNFDEMQTRRSTFDNFPQSLLTVFQILTGEDWNSVMYDGIMAYGGPSFPGMLVCIYFIILFICGNYILLNVFLAIAVDNLADAESLTSAQKEEEEEKERKKLARTASPEKKQELVEKPAVGESKEEKIELKSITADGESPPATKINMDDLQPNENEDKSPYPNPETTGEEDEEEPEMPVGPRPRPLSELHLKEKAVPMPEASAFFIFSSNNRFRLQCHRIVNDTIFTNLILFFILLSSISLAAEDPVQHTSFRNHILFYFDIVFTTIFTIEIALKILGNADYVFTSIFTLEIILKMTAYGAFLHKGSFCRNYFNILDLLVVSVSLISFGIQSSAINVVKILRVLRVLRPLRAINRAKGLKHVVQCVFVAIRTIGNIVIVTTLLQFMFACIGVQLFKGKLYTCSDSSKQTEAECKGNYITYKDGEVDHPIIQPRSWENSKFDFDNVLAAMMALFTVSTFEGWPELLYRSIDSHTEDKGPIYNYRVEISIFFIIYIIIIAFFMMNIFVGFVIVTFQEQGEQEYKNCELDKNQRQCVEYALKARPLRRYIPKNQHQYKVWYVVNSTYFEYLMFVLILLNTICLAMQHYGQSCLFKIAMNILNMLFTGLFTVEMILKLIAFKPKGYFSDPWNVFDFLIVIGSIIDVILSETNHYFCDAWNTFDALIVVGSIVDIAITEVNPAEHTQCSPSMNAEENSRISITFFRLFRVMRLVKLLSRGEGIRTLLWTFIKSFQALPYVALLIVMLFFIYAVIGMQVFGKIALNDTTEINRNNNFQTFPQAVLLLFRCATGEAWQDIMLACMPGKKCAPESEPSNSTEGETPCGSSFAVFYFISFYMLCAFLIINLFVAVIMDNFDYLTRDWSILGPHHLDEFKRIWAEYDPEAKGRIKHLDVVTLLRRIQPPLGFGKLCPHRVACKRLVSMNMPLNSDGTVMFNATLFALVRTALRIKTEGNLEQANEELRAIIKKIWKRTSMKLLDQVVPPAGDDEVTVGKFYATFLIQEYFRKFKKRKEQGLVGKPSQRNALSLQAGLRTLHDIGPEIRRAISGDLTAEEELDKAMKEAVSAASEDDIFRRAGGLFGNHVSYYQSDGRSAFPQTFTTQRPLHINKAGSSQGDTESPSHEKLVDSTFTPSSYSSTGSNANINNANNTALGRLPRPAGYPSTVSTVEGHGPPLSPAIRVQEVAWKLSSNRMHCCDMLDGGTFPPALGPRRAPPCLHQQLQGSLAGLREDTPCIVPGHASLCCSSRVGEWLPAGCTAPQHARCHSRESQAAMAGQEETSQDETYEVKMNHDTEACSEPSLLSTEMLSYQDDENRQLTLPEEDKRDIRQSPKRGFLRSASLGRRASFHLECLKRQKDRGGDISQKTVLPLHLVHHQALAVAGLSPLLQRSHSPASFPRPFATPPATPGSRGWPPQPVPTLRLEGVESSEKLNSSFPSIHCGSWAETTPGGGGSSAARRVRPVSLMVPSQAGAPGRQFHGSASSLVEAVLISEGLGQFAQDPKFIEVTTQELADACDMTIEEMESAADNILSGGAPQSPNGALLPFVNCRDAGQDRAGGEEDAGCVRARGAPSEEELQDSRVYVSSL

SEQ ID NO: 6499 - protein, 2138 aa, Homo sapiens
MVNENTRMYIPEENHQGSNYGSPRPAHANMNANAAAGLAPEHIPTPGAALSWQAAIDAARQAKLMGSAGNATISTVSSTQRKRQQYGKPKKQGSTTATRPPRALLCLTLKNPIRRACISIVEWKPFEIIILLTIFANCVALAIYIPFPEDDSNATNSNLERVEYLFLIIFTVEAFLKVIAYGLLFHPNAYLRNGWNLLDFIIVVVGLFSAILEQATKADGANALGGKGAGFDVKALRAFRVLRPLRLVSGVPSLQVVLNSIIKAMVPLLHIALLVLFVIIIYAIIGLELFMGKMHKTCYNQEGIADVPAEDDPSPCALETGHGRQCQNGTVCKPGWDGPKHGITNFDNFAFAMLTVFQCITMEGWTDVLYWVNDAVGRDWPWIYFVTLIIIGSFFVLNLVLGVLSGEFSKEREKAKARGDFQKLREKQQLEEDLKGYLDWITQAEDIDPENEDEGMDEEKPRNMSMPTSETESVNTENVAGGDIEGENCGARLAHRISKSKFSRYWRRWNRFCRRKCRAAVKSNVFYWLVIFLVFLNTLTIASEHYNQPNWLTEVQDTANKALLALFTAEMLLKMYSLGLQAYFVSLFNRFDCFVVCGGILETILVETKIMSPLGISVLRCVRLLRIFKITRYWNSLSNLVASLLNSVRSIASLLLLLFLFIIIFSLLGMQLFGGKFNFDEMQTRRSTFDNFPQSLLTVFQILTGEDWNSVMYDGIMAYGGPSFPGMLVCIYFIILFICGNYILLNVFLAIAVDNLADAESLTSAQKEEEEEKERKKLARTASPEKKQELVEKPAVGESKEEKIELKSITADGESPPATKINMDDLQPNENEDKSPYPNPETTGEEDEEEPEMPVGPRPRPLSELHLKEKAVPMPEASAFFIFSSNNRFRLQCHRIVNDTIFTNLILFFILLSSISLAAEDPVQHTSFRNHILFYFDIVFTTIFTIEIALKMTAYGAFLHKGSFCRNYFNILDLLVVSVSLISFGIQSSAINVVKILRVLRVLRPLRAINRAKGLKHVVQCVFVAIRTIGNIVIVTTLLQFMFACIGVQLFKGKLYTCSDSSKQTEAECKGNYITYKDGEVDHPIIQPRSWENSKFDFDNVLAAMMALFTVSTFEGWPELLYRSIDSHTEDKGPIYNYRVEISIFFIIYIIIIAFFMMNIFVGFVIVTFQEQGEQEYKNCELDKNQRQCVEYALKARPLRRYIPKNQHQYKVWYVVNSTYFEYLMFVLILLNTICLAMQHYGQSCLFKIAMNILNMLFTGLFTVEMILKLIAFKPKHYFCDAWNTFDALIVVGSIVDIAITEVNPAEHTQCSPSMNAEENSRISITFFRLFRVMRLVKLLSRGEGIRTLLWTFIKSFQALPYVALLIVMLFFIYAVIGMQVFGKIALNDTTEINRNNNFQTFPQAVLLLFRCATGEAWQDIMLACMPGKKCAPESEPSNSTEGETPCGSSFAVFYFISFYMLCAFLIINLFVAVIMDNFDYLTRDWSILGPHHLDEFKRIWAEYDPEAKGRIKHLDVVTLLRRIQPPLGFGKLCPHRVACKRLVSMNMPLNSDGTVMFNATLFALVRTALRIKTEGNLEQANEELRAIIKKIWKRTSMKLLDQVVPPAGDDEVTVGKFYATFLIQEYFRKFKKRKEQGLVGKPSQRNALSLQAGLRTLHDIGPEIRRAISGDLTAEEELDKAMKEAVSAASEDDIFRRAGGLFGNHVSYYQSDGRSAFPQTFTTQRPLHINKAGSSQGDTESPSHEKLVDSTFTPSSYSSTGSNANINNANNTALGRLPRPAGYPSTVSTVEGHGPPLSPAIRVQEVAWKLSSNRCHSRESQAAMAGQEETSQDETYEVKMNHDTEACSEPSLLSTEMLSYQDDENRQLTLPEEDKRDIRQSPKRGFLRSASLGRRASFHLECLKRQKDRGGDISQKTVLPLHLVHHQALAVAGLSPLLQRSHSPASFPRPFATPPATPGSRGWPPQPVPTLRLEGVESSEKLNSSFPSIHCGSWAETTPGGGGSSAARRVRPVSLMVPSQAGAPGRQFHGSASSLVEAVLISEGLGQFAQDPKFIEVTTQELADACDMTIEEMESAADNILSGGAPQSPNGALLPFVNCRDAGQDRAGGEEDAGCVRARGRPSEEELQDSRVYVSSL

SEQ ID NO: 6500 - protein, 2221 aa, Homo sapiens
MVNENTRMYIPEENHQGSNYGSPRPAHANMNANAAAGLAPEHIPTPGAALSWQAAIDAARQAKLMGSAGNATISTVSSTQRKRQQYGKPKKQGSTTATRPPRALLCLTLKNPIRRACISIVEWKPFEIIILLTIFANCVALAIYIPFPEDDSNATNSNLERVEYLFLIIFTVEAFLKVIAYGLLFHPNAYLRNGWNLLDFIIVVVGLFSAILEQATKADGANALGGKGAGFDVKALRAFRVLRPLRLVSGVPSLQVVLNSIIKAMVPLLHIALLVLFVIIIYAIIGLELFMGKMHKTCYNQEGIADVPAEDDPSPCALETGHGRQCQNGTVCKPGWDGPKHGITNFDNFAFAMLTVFQCITMEGWTDVLYWVNDAVGRDWPWIYFVTLIIIGSFFVLNLVLGVLSGEFSKEREKAKARGDFQKLREKQQLEEDLKGYLDWITQAEDIDPENEDEGMDEEKPRNMSMPTSETESVNTENVAGGDIEGENCGARLAHRISKSKFSRYWRRWNRFCRRKCRAAVKSNVFYWLVIFLVFLNTLTIASEHYNQPNWLTEVQDTANKALLALFTAEMLLKMYSLGLQAYFVSLFNRFDCFVVCGGILETILVETKIMSPLGISVLRCVRLLRIFKITRYWNSLSNLVASLLNSVRSIASLLLLLFLFIIIFSLLGMQLFGGKFNFDEMQTRRSTFDNFPQSLLTVFQILTGEDWNSVMYDGIMAYGGPSFPGMLVCIYFIILFICGNYILLNVFLAIAVDNLADAESLTSAQKEEEEEKERKKLARTASPEKKQELVEKPAVGESKEEKIELKSITADGESPPATKINMDDLQPNENEDKSPYPNPETTGEEDEEEPEMPVGPRPRPLSELHLKEKAVPMPEASAFFIFSSNNRFRLQCHRIVNDTIFTNLILFFILLSSISLAAEDPVQHTSFRNHILFYFDIVFTTIFTIEIALKILGNADYVFTSIFTLEIILKMTAYGAFLHKGSFCRNYFNILDLLVVSVSLISFGIQSSAINVVKILRVLRVLRPLRAINRAKGLKHVVQCVFVAIRTIGNIVIVTTLLQFMFACIGVQLFKGKLYTCSDSSKQTEAECKGNYITYKDGEVDHPIIQPRSWENSKFDFDNVLAAMMALFTVSTFEGWPELLYRSIDSHTEDKGPIYNYRVEISIFFIIYIIIIAFFMMNIFVGFVIVTFQEQGEQEYKNCELDKNQRQCVEYALKARPLRRYIPKNQHQYKVWYVVNSTYFEYLMFVLILLNTICLAMQHYGQSCLFKIAMNILNMLFTGLFTVEMILKLIAFKPKGYFSDPWNVFDFLIVIGSIIDVILSETNHYFCDAWNTFDALIVVGSIVDIAITEVNPAEHTQCSPSMNAEENSRISITFFRLFRVMRLVKLLSRGEGIRTLLWTFIKSFQALPYVALLIVMLFFIYAVIGMQVFGKIALNDTTEINRNNNFQTFPQAVLLLFRCATGEAWQDIMLACMPGKKCAPESEPSNSTEGETPCGSSFAVFYFISFYMLCAFLIINLFVAVIMDNFDYLTRDWSILGPHHLDEFKRIWAEYDPEAKGRIKHLDVVTLLRRIQPPLGFGKLCPHRVACKRLVSMNMPLNSDGTVMFNATLFALVRTALRIKTEGNLEQANEELRAIIKKIWKRTSMKLLDQVVPPAGDDEVTVGKFYATFLIQEYFRKFKKRKEQGLVGKPSQRNALSLQAGLRTLHDIGPEIRRAISGDLTAEEELDKAMKEAVSAASEDDIFRRAGGLFGNHVSYYQSDGRSAFPQTFTTQRPLHINKAGSSQGDTESPSHEKLVDSTFTPSSYSSTGSNANINNANNTALGRLPRPAGYPSTVSTVEGHGPPLSPAIRVQEVAWKLSSNRERHVPVCEDLELRRDSGSAGTQAHCLLLRRANPSRCHSRESQAAMAGQEETSQDETYEVKMNHDTEACSEPSLLSTEMLSYQDDENRQLTLPEEDKRDIRQSPKRGFLRSASLGRRASFHLECLKRQKDRGGDISQKTVLPLHLVHHQALAVAGLSPLLQRSHSPASFPRPFATPPATPGSRGWPPQPVPTLRLEGVESSEKLNSSFPSIHCGSWAETTPGGGGSSAARRVRPVSLMVPSQAGAPGRQFHGSASSLVEAVLISEGLGQFAQDPKFIEVTTQELADACDMTIEEMESAADNILSGGAPQSPNGALLPFVNCRDAGQDRAGGEEDAGCVRARGAPSEEELQDSRVYVSSL

SEQ ID NO: 6501 - protein, 1243 aa, Homo sapiens [sequence omitted]

SEQ ID NO: 6502 - protein, 1199 aa, Homo sapiens
MGDMTNSDFYSKNQRNESSHGGEFGCTMEELRSLMELRGTEAVVKIKETYGDTEAICRRLKTSPVEGLPGTAPDLEKRKQIFGQNFIPPKKPKTFLQLVWEALQDVTLIILEIAAIISLGLSFYHPPGEGNEGCATAQGGAEDEGEAEAGWIEGAAILLSVICVVLVTAFNDWSKEKQFRGLQSRIEQEQKFTVVRAGQVVQIPVAEIVVGDIAQVKYGDLLPADGLFIQGNDLKIDESSLTGESDQVRKSVDKDPMLLSGTHVMEGSGRMLVTAVGVNSQTGIIFTLLGAGGEEEEKKDKKGVKKGDGLQLPAADGAAASNAADSANASLVNGKMQDGNVDASQSKAKQQDGAAAMEMQPLKSAEGGDADDRKKASMHKKEKSVLQGKLTKLAVQIGKAGLVMSAITVIILVLYFTVDTFVVNKKPWLPECTPVYVQYFVKFFIIGVTVLVVAVPEGLPLAVTISLAYSVKKMMKDNNLVRHLDACETMGNATAICSDKTGTLTTNRMTVVQAYVGDVHYKEIPDPSSINTKTMELLINAIAINSAYTTKILPPEKEGALPRQVGNKTECGLLGFVLDLKQDYEPVRSQMPEEKLYKVYTFNSVRKSMSTVIKLPDESFRMYSKGASEIVLKKCCKILNGAGEPRVFRPRDRDEMVKKVIEPMACDGLRTICVAYRDFPSSPEPDWDNENDILNELTCICVVGIEDPVRPEVPEAIRKCQRAGITVRMVTGDNINTARAIAIKCGIIHPGEDFLCLEGKEFNRRIRNEKGEIEQERIDKIWPKLRVLARSSPTDKHTLVKGIIDSTHTEQRQVVAVTGDGTNDGPALKKADVGFAMGIAGTDVAKEASDIILTDDNFSSIVKAVMWGRNVYDSISKFLQFQLTVNVVAVIVAFTGACITQDSPLKAVQMLWVNLIMDTFASLALATEPPTETLLLRKPYGRNKPLISRTMMKNILGHAVYQLALIFTLLFVGEKMFQIDSGRNAPLHSPPSEHYTIIFNTFVMMQLFNEINARKIHGERNVFDGIFRNPIFCTIVLGTFAIQIVIVQFGGKPFSCSPLQLDQWMWCIFIGLGELVWGQVIATIPTSRLKFLKEAGRLTQKEEIPEEELNEDVEEIDHAERELRRGQILWFRGLNRIQTQIEVVNTFKSGASFQGALRRQSSVTSQSQDVANLSSPSRVSLSNALSSPTSLPPAAAGQG

SEQ ID NO: 6503 - protein, 220 aa, Homo sapiens
MTSSVLTVNGKTENYILDTTPGSQASLICAVQNHTREEELLWYREEGRVDLKSGNKINSSSVCVSSISENDNGISFTCRLGRDQSVSVSVVLNVTFEEGSNVKLVCNVKANPQAQMMWYKNSSLLDLEKSRHQIQQTSESFQLSITKVEKPDNGTYSCIAKSSLKTESLDFHLIVKDKTVGVPIEPIIAACVVIFLTLCFGLIARRKKIMKVSKYSELFK

SEQ ID NO: 6504 - protein, 1966 aa, Homo sapiens
MEFPIGSLETNNFRRFTPESLVEIEKQIAAKQGTKKAREKHREQKDQEEKPRPQLDLKACNQLPKFYGELPAELIGEPLEDLDPFYSTHRTFMVLNKGRTISRFSATRALWLFSPFNLIRRTAIKVSVHSYPLHDCLFHVWFSLFITVTILVNCVCMTRTDLPEKIEYVFTVIYTFEALIKILARGFCLNEFTYLRDPWNWLDFSVITLAYVGTAIDLRGISGLRTFRVLRALKTVSVIPGLKVIVGALIHSVKKLADVTILTIFCLSVFALVGLQLFKGNLKNKCVKNDMAVNETTNYSSHRKPDIYINKRGTSDPLLCGNGSDSGHCPDGYICLKTSDNPDFNYTSFDSFAWAFLSLFRLMTQDSWERLYQQTLRTSGKIYMIFFVLVIFLGSFYLVNLILAVVTMAYEEQNQATTDEIEAKEKKFQEALEMLRKEQEVLAALGIDTTSLHSHNGSPLTSKNASERRHRIKPRVSEGSTEDNKSPRSDPYNQRRMSFLGLASGKRRASHGSVFHFRSPGRDISLPEGVTDDGVFPGDHESHRGSLLLGGGAGQQGPLPRSPLPQPSNPDSRHGEDEHQPPPTSELAPGAVDVSAFDAGQKKTFLSAEYLDEPFRAQRAMSVVSIITSVLEELEESEQKCPPCLTSLSQKYLIWDCCPMWVKLKTILFGLVTDPFAELTITLCIVVNTIFMAMEHHGMSPTFEAMLQIGNIVFTIFFTAEMVFKIIAFDPYYYFQKKWNIFDCIIVTVSLLELGVAKKGSLSVLRSFRLLRVFKLAKSWPTLNTLIKIIGNSVGALGNLTIILAIIVFVFALVGKQLLGENYRNNRKNISAPHEDWPRWHMHDFFHSFLIVFRILCGEWIENMWACMEVGQKSICLILFLTVMVLGNLVVLNLFIALLLNSFSADNLTAPEDDGEVNNLQVALARIQVFGHRTKQALCSFFSRSCPFPQPKAEPELVVKLPLSSSKAENHIAANTARGSSGGLQAPRGPRDEHSDFIANPTVWVSVPIAEGESDLDDLEDDGGEDAQSFQQEVIPKGQQEQLQQVERCGDHLTPRSPGTGTSSEDLAPSLGETWKDESVPQVPAEGVDDTSSSEGSTVDCLDPEEILRKIPELADDLEEPDDCFTEGCIRHCPCCKLDTTKSPWDVGWQVRKTCYRIVEHSWFESFIIFMILLSSGSLAFEDYYLDQKPTVKALLEYTDRVFTFIFVFEMLLKWVAYGFKKYFTNAWCWLDFLIVNISLISLTAKILEYSEVAPIKALRTLRALRPLRALSRFEGMRVVVDALVGAIPSIMNVLLVCLIFWLIFSIMGVNLFAGKFWRCINYTDGEFSLVPLSIVNNKSDCKIQNSTGSFFWVNVKVNFDNVAMGYLALLQVATFKGWMDIMYAAVDSREVNMQPKWEDNVYMYLYFVIFIIFGGFFTLNLFVGVIIDNFNQQKKKIRGQDIFMTEEQKKYYNAMKKLGSKKPQKPIPRPLNKFQGFVFDIVTRQAFDITIMVLICLNMITMMVETDDQSEEKTKILGKINQFFVAVFTGECVMKMFALRQYYFTNGWNVFDFIVVVLSIASLIFSAILKSLQSYFSPTLFRVIRLARIGRILRLIRAAKGIRTLLFALMMSLPALFNIGLLLFLVMFIYSIFGMSSFPHVRWEAGIDDMFNFQTFANSMLCLFQITTSAGWDGLLSPILNTGPPYCDPNLPNSNGTRGDCGSPAVGIIFFTTYIIISFLIMVNMYIAVILENFNVATEESTEPLSEDDFDMFYETWEKFDPEATQFITFSALSDFADTLSGPLRIPKPNRNILIQMDLPLVPGDKIHCLDILFAFTKNVLGESGELDSLKANMEEKFMATNLSKSSYEPIATTLRWKQEDISATVIQKAYRSYVLHRSMALSNTPCVPRAEEEAASLPDEGFVAFTANENCVLPDKSETASATSFPPSYESVTRGLSDRVNMRTSSSIQNEDEATSMELIAPGP

SEQ ID NO: 6505 - protein, 1286 aa, Homo sapiens
MDLEAAKNGTAWRPTSAEGDFELGISSKQKRKKTKTVKMIGVLTLFRYSDWQDKLFMSLGTIMAIAHGSGLPLMMIVFGEMTDKFVDTAGNFSFPVNFSLSLLNPGKILEEEMTRYAYYYSGLGAGVLVAAYIQVSFWTLAAGRQIRKIRQKFFHAILRQEIGWFDINDTTELNTRLTDDISKISEGIGDKVGMFFQAVATFFAGFIVGFIRGWKLTLVIMAISPILGLSAAVWAKILSAFSDKELAAYAKAGAVAEEALGAIRTVIAFGGQNKELERYQKHLENAKEIGIKKAISANISMGIAFLLIYASYALAFWYGSTLVISKEYTIGNAMTVFFSILIGAFSVGQAAPCIDAFANARGAAYVIFDIIDNNPKIDSFSERGHKPDSIKGNLEFNDVHFSYPSRANVKILKGLNLKVQSGQTVALVGSSGCGKSTTVQLIQRLYDPDEGTINIDGQDIRNFNVNYLREIIGVVSQEPVLFSTTIAENICYGRGNVTMDEIKKAVKEANAYEFIMKLPQKFDTLVGERGAQLSGGQKQRIAIARALVRNPKILLLDEATSALDTESEAEVQAALDKAREGRTTIVIAHRLSTVRNADVIAGFEDGVIVEQGSHSELMKKEGVYFKLVNMQTSGSQIQSEEFELNDEKAATRMAPNGWKSRLFRHSTQKNLKNSQMCQKSLDVETDGLEANVPPVSFLKVLKLNKTEWPYFVVGTVCAIANGGLQPAFSVIFSEIIAIFGPGDDAVKQQKCNIFSLIFLFLGIISFFTFFLQGFTFGKAGEILTRRLRSMAFKAMLRQDMSWFDDHKNSTGALSTRLATDAAQVQGATGTRLALIAQNIANLGTGIIISFIYGWQLTLLLLAVVPIIAVSGIVEMKLLAGNAKRDKKELEAAGKIATEAIENIRTVVSLTQERKFESMYVEKLYGPYRNSVQKAHIYGITFSISQAFMYFSYAGCFRFGAYLIVNGHMRFRDVILVFSAIVFGAVALGHASSFAPDYAKAKLSAAHLFMLFERQPLIDSYSEEGLKPDKFEGNITFNEVVFNYPTRANVPVLQGLSLEVKKGQTLALVGSSGCGKSTVVQLLERFYDPLAGTVFVDFGFQLLDGQEAKKLNVQWLRAQLGIVSQEPILFDCSIAENIAYGDNSRVVSQDEIVSAAKAANIHPFIETLPHKYETRVGDKGTQLSGGQKQRIAIARALIRQPQILLLDEATSALDTESEKVVQEALDKAREGRTCIVIAHRLSTIQNADLIVVFQNGRVKEHGTHQQLLAQKGIYFSMVSVQAGTQNL

SEQ ID NO: 6506 - protein, 1232 aa, Homo sapiens
MDLEAAKNGTAWRPTSAEGDFELGISSKQKRKKTKTVKMIGVLTLFRYSDWQDKLFMSLGTIMAIAHGSGLPLMMIVFGEMTDKFVDTAGNFSFPVNFSLSLLNPGKILEEEMTRYAYYYSGLGAGVLVAAYIQVSFWTLAAGRQIRKIRQKFFHAILRQEIGWFDINDTTELNTRLTDDISKISEGIGDKVGMFFQAVATFFAGFIVGFIRGWKLTLVIMAISPILGLSAAVWAKILSAFSDKELAAYAKAGAVAEEALGAIRTVIAFGGQNKELERYQKHLENAKEIGIKKAISANISMGIAFLLIYASYALAFWYGSTLVISKEYTIGNAMTVFFSILIGAFSVGQAAPCIDAFANARGAAYVIFDIIDNNPKIDSFSERGHKPDSIKGNLEFNDVHFSYPSRANVKILKGLNLKVQSGQTVALVGSSGCGKSTTVQLIQRLYDPDEGTINIDGQDIRNFNVNYLREIIGVVSQEPVLFSTTIAENICYGRGNVTMDEIKKAVKEANAYEFIMKLPQKFDTLVGERGAQLSGGQKQRIAIARALVRNPKILLLDEATSALDTESEAEVQAALDKAREGRTTIVIAHRLSTVRNADVIAGFEDGVIVEQGSHSELMKKEGVYFKLVNMQTSGSQIQSEEFELNDEKAATRMAPNGWKSRLFRHSTQKNLKNSQMCQKSLDVETDGLEANVPPVSFLKVLKLNKTEWPYFVVGTVCAIANGGLQPAFSVIFSEIIAIFGPGDDAVKQQKCNIFSLIFLFLGIISFFTFFLQGFTFGKAGEILTRRLRSMAFKAMLRQDMSWFDDHKNSTGALSTRLATDAAQVQGATGTRLALIAQNIANLGTGIIISFIYGWQLTLLLLAVVPIIAVSGIVEMKLLAGNAKRDKKELEAAGKIATEAIENIRTVVSLTQERKFESMYVEKLYGPYRVFSAIVFGAVALGHASSFAPDYAKAKLSAAHLFMLFERQPLIDSYSEEGLKPDKFEGNITFNEVVFNYPTRANVPVLQGLSLEVKKGQTLALVGSSGCGKSTVVQLLERFYDPLAGTVLLDGQEAKKLNVQWLRAQLGIVSQEPILFDCSIAENIAYGDNSRVVSQDEIVSAAKAANIHPFIETLPHKYETRVGDKGTQLSGGQKQRIAIARALIRQPQILLLDEATSALDTESEKVVQEALDKAREGRTCIVIAHRLSTIQNADLIVVFQNGRVKEHGTHQQLLAQKGIYFSMVSVQAGTQNL

SEQ ID NO: 6507 - protein, 1279 aa, Homo sapiens
MDLEAAKNGTAWRPTSAEGDFELGISSKQKRKKTKTVKMIGVLTLFRYSDWQDKLFMSLGTIMAIAHGSGLPLMMIVFGEMTDKFVDTAGNFSFPVNFSLSLLNPGKILEEEMTRYAYYYSGLGAGVLVAAYIQVSFWTLAAGRQIRKIRQKFFHAILRQEIGWFDINDTTELNTRLTDDISKISEGIGDKVGMFFQAVATFFAGFIVGFIRGWKLTLVIMAISPILGLSAAVWAKILSAFSDKELAAYAKAGAVAEEALGAIRTVIAFGGQNKELERYQKHLENAKEIGIKKAISANISMGIAFLLIYASYALAFWYGSTLVISKEYTIGNAMTVFFSILIGAFSVGQAAPCIDAFANARGAAYVIFDIIDNNPKIDSFSERGHKPDSIKGNLEFNDVHFSYPSRANVKILKGLNLKVQSGQTVALVGSSGCGKSTTVQLIQRLYDPDEGTINIDGQDIRNFNVNYLREIIGVVSQEPVLFSTTIAENICYGRGNVTMDEIKKAVKEANAYEFIMKLPQKFDTLVGERGAQLSGGQKQRIAIARALVRNPKILLLDEATSALDTESEAEVQAALDKAREGRTTIVIAHRLSTVRNADVIAGFEDGVIVEQGSHSELMKKEGVYFKLVNMQTSGSQIQSEEFELNDEKAATRMAPNGWKSRLFRHSTQKNLKNSQMCQKSLDVETDGLEANVPPVSFLKVLKLNKTEWPYFVVGTVCAIANGGLQPAFSVIFSEIIAIFGPGDDAVKQQKCNIFSLIFLFLGIISFFTFFLQGFTFGKAGEILTRRLRSMAFKAMLRQDMSWFDDHKNSTGALSTRLATDAAQVQGATGTRLALIAQNIANLGTGIIISFIYGWQLTLLLLAVVPIIAVSGIVEMKLLAGNAKRDKKELEAAGKIATEAIENIRTVVSLTQERKFESMYVEKLYGPYRNSVQKAHIYGITFSISQAFMYFSYAGCFRFGAYLIVNGHMRFRDVILVFSAIVFGAVALGHASSFAPDYAKAKLSAAHLFMLFERQPLIDSYSEEGLKPDKFEGNITFNEVVFNYPTRANVPVLQGLSLEVKKGQTLALVGSSGCGKSTVVQLLERFYDPLAGTVLLDGQEAKKLNVQWLRAQLGIVSQEPILFDCSIAENIAYGDNSRVVSQDEIVSAAKAANIHPFIETLPHKYETRVGDKGTQLSGGQKQRIAIARALIRQPQILLLDEATSALDTESEKVVQEALDKAREGRTCIVIAHRLSTIQNADLIVVFQNGRVKEHGTHQQLLAQKGIYFSMVSVQAGTQNL

SEQ ID NO: 6508 - protein, 351 aa, Homo sapiens
MTWSATARGAHQPDNTAFTQQRLPAWQPLLSASIALPLFFCAGLAFIGLGLGLYYSSNGIKELEYDYTGDPGTGNCSVCAAAGQGRALPPPCSCAWYFSLPELFQGPVYLYYELTNFYQNNRRYGVSRDDAQLSGLPSALRHPVNECAPYQRSAAGLPIAPCGAIANSLFNDSFSLWHQRQPGGPYVEVPLDRSGIAWWTDYHVKFRNPPLVNGSLALAFQGTAPPPNWRRPVYELSPDPNNTGFINQDFVVWMRTAALPTFRKLYARIRQGNYSAGLPRGAYRVNITYNYPVRAFGGHKLLIFSSISWMGGKNPFLGIAYLVVGSLCILTGFVMLVVYIRYQDQDDDDEE

SEQ ID NO: 6509 - protein, 1170 aa, Homo sapiens
MTNPSDRVLPANSMAESREGDFGCTVMELRKLMELRSRDALTQINVHYGGVQNLCSRLKTSPVEGLSGNPADLEKRRQVFGHNVIPPKKPKTFLELVWEALQDVTLIILEIAAIISLVLSFYRPAGEENELCGQVATTPEDENEAQAGWIEGAAILFSVIIVVLVTAFNDWSKEKQFRGLQCRIEQEQKFSIIRNGQLIQLPVAEIVVGDIAQVKYGDLLPADGILIQGNDLKIDESSLTGESDHVKKSLDKDPMLLSGTHVMEGSGRMVVTAVGVNSQTGIILTLLGVNEDDEGEKKKKGKKQGVPENRNKAKTQDGVALEIQPLNSQEGIDNEEKDKKAVKVPKKEKSVLQGKLTRLAVQIGKAGLLMSALTVFILILYFVIDNFVINRRPWLPECTPIYIQYFVKFFIIGITVLVVAVPEGLPLAVTISLAYSVKKMMKDNNLVRHLDACETMGNATAICSDKTGTLTMNRMTVVQAYIGGIHYRQIPSPDVFLPKVLDLIVNGISINSAYTSKILPPEKEGGLPRQVGNKTECALLGFVTDLKQDYQAVRNEVPEEKLYKVYTFNSVRKSMSTVIRNPNGGFRMYSKGASEIILRKCNRILDRKGEAVPFKNKDRDDMVRTVIEPMACDGLRTICIAYRDFDDTEPSWDNENEILTELTCIAVVGIEDPVRPEVPDAIAKCKQAGITVRMVTGDNINTARAIATKCGILTPGDDFLCLEGKEFNRLIRNEKGEVEQEKLDKIWPKLRVLARSSPTDKHTLVKGIIDSTVGEHRQVVAVTGDGTNDGPALKKADVGFAMGIAGTDVAKEASDIILTDDNFTSIVKAVMWGRNVYDSISKFLQFQLTVNVVAVIVAFTGACITQDSPLKAVQMLWVNLIMDTFASLALATEPPTESLLKRRPYGRNKPLISRTMMKNILGHAFYQLIVIFILVFAGEKFFDIDSGRKAPLHSPPSQHYTIVFNTFVLMQLFNEINSRKIHGEKNVFSGIYRNIIFCSVVLGTFICQIFIVEFGGKPFSCTSLSLSQWLWCLFIGIGELLWGQFISAIPTRSLKFLKEAGHGTTKEEITKDAEGLDEIDHAEMELRRGQILWFRGLNRIQTQIDVINTFQTGASFKGVLRRQNMGQHLDVKLVPSSSYVAVAPVKSSPTTSVPAVSSPPMGNQSGQSVP

SEQ ID NO: 6510 - protein, 1220 aa, Homo sapiens
MGDMANNSVAYSGVKNSLKEANHDGDFGITLAELRALMELRSTDALRKIQESYGDVYGICTKLKTSPNEGLSGNPADLERREAVFGKNFIPPKKPKTFLQLVWEALQDVTLIILEIAAIVSLGLSFYQPPEGDNALCGEVSVGEEEGEGETGWIEGAAILLSVVCVVLVTAFNDWSKEKQFRGLQSRIEQEQKFTVIRGGQVIQIPVADITVGDIAQVKYGDLLPADGILIQGNDLKIDESSLTGESDHVKKSLDKDPLLLSGTHVMEGSGRMVVTAVGVNSQTGIIFTLLGAGGEEEEKKDEKKKEKKNKKQDGAIENRNKAKAQDGAAMEMQPLKSEEGGDGDEKDKKKANLPKKEKSVLQGKLTKLAVQIGKAGLLMSAITVIILVLYFVIDTFWVQKRPWLAECTPIYIQYFVKFFIIGVTVLVVAVPEGLPLAVTISLAYSVKKMMKDNNLVRHLDACETMGNATAICSDKTGTLTMNRMTVVQAYINEKHYKKVPEPEAIPPNILSYLVTGISVNCAYTSKILPPEKEGGLPRHVGNKTECALLGLLLDLKRDYQDVRNEIPEEALYKVYTFNSVRKSMSTVLKNSDGSYRIFSKGASEIILKKCFKILSANGEAKVFRPRDRDDIVKTVIEPMASEGLRTICLAFRDFPAGEPEPEWDNENDIVTGLTCIAVVGIEDPVRPEVPDAIKKCQRAGITVRMVTGDNINTARAIATKCGILHPGEDFLCLEGKDFNRRIRNEKGEIEQERIDKIWPKLRVLARSSPTDKHTLVKGIIDSTVSDQRQVVAVTGDGTNDGPALKKADVGFAMGIAGTDVAKEASDIILTDDNFTSIVKAVMWGRNVYDSISKFLQFQLTVNVVAVIVAFTGACITQDSPLKAVQMLWVNLIMDTLASLALATEPPTESLLLRKPYGRNKPLISRTMMKNILGHAFYQLVVVFTLLFAGEKFFDIDSGRNAPLHAPPSEHYTIVFNTFVLMQLFNEINARKIHGERNVFEGIFNNAIFCTIVLGTFVVQIIIVQFGGKPFSCSELSIEQWLWSIFLGMGTLLWGQLISTIPTSRLKFLKEAGHGTQKEEIPEEELAEDVEEIDHAERELRRGQILWFRGLNRIQTQIRVVNAFRSSLYEGLEKPESRSSIHNFMTHPEFRIEDSEPHIPLIDDTDAEDDAPTKRNSSPPPSPNKNNNAVDSGIHLTIEMNKSATSSSPGSPLHSLETSL

SEQ ID NO: 6511 - protein, 1158 aa, Homo sapiens
MTNPSDRVLPANSMAESREGDFGCTVMELRKLMELRSRDALTQINVHYGGVQNLCSRLKTSPVEGLSGNPADLEKRRQVFGHNVIPPKKPKTFLELVWEALQDVTLIILEIAAIISLVLSFYRPAGEENELCGQVATTPEDENEAQAGWIEGAAILFSVIIVVLVTAFNDWSKEKQFRGLQCRIEQEQKFSIIRNGQLIQLPVAEIVVGDIAQVKYGDLLPADGILIQGNDLKIDESSLTGESDHVKKSLDKDPMLLSGTHVMEGSGRMVVTAVGVNSQTGIILTLLGVNEDDEGEKKKKAKTQDGVALEIQPLNSQEGIDNEEKDKKAVKVPKKEKSVLQGKLTRLAVQIGKAGLLMSALTVFILILYFVIDNFVINRRPWLPECTPIYIQYFVKFFIIGITVLVVAVPEGLPLAVTISLAYSVKKMMKDNNLVRHLDACETMGNATAICSDKTGTLTMNRMTVVQAYIGGIHYRQIPSPDVFLPKVLDLIVNGISINSAYTSKILPPEKEGGLPRQVGNKTECALLGFVTDLKQDYQAVRNEVPEEKLYKVYTFNSVRKSMSTVIRNPNGGFRMYSKGASEIILRKCNRILDRKGEAVPFKNKDRDDMVRTVIEPMACDGLRTICIAYRDFDDTEPSWDNENEILTELTCIAVVGIEDPVRPEVPDAIAKCKQAGITVRMVTGDNINTARAIATKCGILTPGDDFLCLEGKEFNRLIRNEKGEVEQEKLDKIWPKLRVLARSSPTDKHTLVKGIIDSTVGEHRQVVAVTGDGTNDGPALKKADVGFAMGIAGTDVAKEASDIILTDDNFTSIVKAVMWGRNVYDSISKFLQFQLTVNVVAVIVAFTGACITQDSPLKAVQMLWVNLIMDTFASLALATEPPTESLLKRRPYGRNKPLISRTMMKNILGHAFYQLIVIFILVFAGEKFFDIDSGRKAPLHSPPSQHYTIVFNTFVLMQLFNEINSRKIHGEKNVFSGIYRNIIFCSVVLGTFICQIFIVEFGGKPFSCTSLSLSQWLWCLFIGIGELLWGQFISAIPTRSLKFLKEAGHGTTKEEITKDAEGLDEIDHAEMELRRGQILWFRGLNRIQTQIDVINTFQTGASFKGVLRRQNMGQHLDVKLVPSSSYVAVAPVKSSPTTSVPAVSSPPMGNQSGQSVP

SEQ ID NO: 6512 - protein, 1206 aa, Homo sapiens
MGDMANSSIEFHPKPQQQRDVPQAGGFGCTLAELRTLMELRGAEALQKIEEAYGDVSGLCRRLKTSPTEGLADNTNDLEKRRQIYGQNFIPPKQPKTFLQLVWEALQDVTLIILEVAAIVSLGLSFYAPPGEESEACGNVSGGAEDEGEAEAGWIEGAAILLSVICVVLVTAFNDWSKEKQFRGLQSRIEQEQKFTVIRNGQLLQVPVAALVVGDIAQVKYGDLLPADGVLIQANDLKIDESSLTGESDHVRKSADKDPMLLSGTHVMEGSGRMVVTAVGVNSQTGIIFTLLGAGGEEEEKKDKKAKKQDGAVAMEMQPLKSAEGGEMEEREKKKANAPKKEKSVLQGKLTKLAVQIGKAGLVMSAITVIILVLYFVIETFVVEGRTWLAECTPVYVQYFVKFFIIGVTVLVVAVPEGLPLAVTISLAYSVKKMMKDNNLVRHLDACETMGNATAICSDKTGTLTTNRMTVVQSYLGDTHYKEIPAPSALTPKILDLLVHAISINSAYTTKILPPEKEGALPRQVGNKTECALLGFVLDLKRDFQPVREQIPEDKLYKVYTFNSVRKSMSTVVRMPDGGFRLFSKGASEILLKKCTNILNSNGELRGFRPRDRDDMVRKIIEPMACDGLRTICIAYRDFYAGQEPDWDNENEVVGDLTCIAVVGIEDPVRPEVPEAIRKCQRAGITVRMVTGDNINTARAIAAKCGIIQPGEDFLCLEGKEFNRRIRNEKGEIEQERLDKVWPKLRVLARSSPTDKHTLVKGIIDSTTGEQRQVVAVTGDGTNDGPALKKADVGFAMGIAGTDVAKEASDIILTDDNFTSIVKAVMWGRNVYDSISKFLQFQLTVNVVAVIVAFTGACITQDSPLKAVQMLWVNLIMDTFASLALATEPPTESLLLRKPYGRDKPLISRTMMKNILGHAVYQLAIIFTLLFVGELFFDIDSGRNAPLHSPPSEHYTIIFNTFVMMQLFNEINARKIHGERNVFDGIFSNPIFCTIVLGTFGIQIVIVQFGGKPFSCSPLSTEQWLWCLFVGVGELVWGQVIATIPTSQLKCLKEAGHGPGKDEMTDEELAEGEEEIDHAERELRRGQILWFRGLNRIQTQIRVVKAFRSSLYEGLEKPESKTSIHNFMATPEFLINDYTHNIPLIDDTDVDENEERLRAPPPPSPNQNNNAIDSGIYLTTHVTKSATSSVFSSSPGSPLHSVETSL

SEQ ID NO: 6513 - protein, 1193 aa, Homo sapiens
MTNPSDRVLPANSMAESREGDFGCTVMELRKLMELRSRDALTQINVHYGGVQNLCSRLKTSPVEGLSGNPADLEKRRQVFGHNVIPPKKPKTFLELVWEALQDVTLIILEIAAIISLVLSFYRPAGEENELCGQVATTPEDENEAQAGWIEGAAILFSVIIVVLVTAFNDWSKEKQFRGLQCRIEQEQKFSIIRNGQLIQLPVAEIVVGDIAQVKYGDLLPADGILIQGNDLKIDESSLTGESDHVKKSLDKDPMLLSGTHVMEGSGRMVVTAVGVNSQTGIILTLLGVNEDDEGEKKKKAKTQDGVALEIQPLNSQEGIDNEEKDKKAVKVPKKEKSVLQGKLTRLAVQIGKAGLLMSALTVFILILYFVIDNFVINRRPWLPECTPIYIQYFVKFFIIGITVLVVAVPEGLPLAVTISLAYSVKKMMKDNNLVRHLDACETMGNATAICSDKTGTLTMNRMTVVQAYIGGIHYRQIPSPDVFLPKVLDLIVNGISINSAYTSKILPPEKEGGLPRQVGNKTECALLGFVTDLKQDYQAVRNEVPEEKLYKVYTFNSVRKSMSTVIRNPNGGFRMYSKGASEIILRKCNRILDRKGEAVPFKNKDRDDMVRTVIEPMACDGLRTICIAYRDFDDTEPSWDNENEILTELTCIAVVGIEDPVRPEVPDAIAKCKQAGITVRMVTGDNINTARAIATKCGILTPGDDFLCLEGKEFNRLIRNEKGEVEQEKLDKIWPKLRVLARSSPTDKHTLVKGIIDSTVGEHRQVVAVTGDGTNDGPALKKADVGFAMGIAGTDVAKEASDIILTDDNFTSIVKAVMWGRNVYDSISKFLQFQLTVNVVAVIVAFTGACITQDSPLKAVQMLWVNLIMDTFASLALATEPPTESLLKRRPYGRNKPLISRTMMKNILGHAFYQLIVIFILVFAGEKFFDIDSGRKAPLHSPPSQHYTIVFNTFVLMQLFNEINSRKIHGEKNVFSGIYRNIIFCSVVLGTFICQIFIVEFGGKPFSCTSLSLSQWLWCLFIGIGELLWGQFISAIPTRSLKFLKEAGHGTTKEEITKDAEGLDEIDHAEMELRRGQILWFRGLNRIQTQIKVVKAFHSSLHESIQKPYNQKSIHSFMTHPEFAIEEELPRTPLLDEEEEENPDKASKFGTRVLLLDGEVTPYANTNNNAVDCNQVQLPQSDSSLQSLETSV

SEQ ID NO: 6514 - protein, 1241 aa, Homo sapiens
MTNPSDRVLPANSMAESREGDFGCTVMELRKLMELRSRDALTQINVHYGGVQNLCSRLKTSPVEGLSGNPADLEKRRQVFGHNVIPPKKPKTFLELVWEALQDVTLIILEIAAIISLVLSFYRPAGEENELCGQVATTPEDENEAQAGWIEGAAILFSVIIVVLVTAFNDWSKEKQFRGLQCRIEQEQKFSIIRNGQLIQLPVAEIVVGDIAQVKYGDLLPADGILIQGNDLKIDESSLTGESDHVKKSLDKDPMLLSGTHVMEGSGRMVVTAVGVNSQTGIILTLLGVNEDDEGEKKKKGKKQGVPENRNKAKTQDGVALEIQPLNSQEGIDNEEKDKKAVKVPKKEKSVLQGKLTRLAVQIGKAGLLMSALTVFILILYFVIDNFVINRRPWLPECTPIYIQYFVKFFIIGITVLVVAVPEGLPLAVTISLAYSVKKMMKDNNLVRHLDACETMGNATAICSDKTGTLTMNRMTVVQAYIGGIHYRQIPSPDVFLPKVLDLIVNGISINSAYTSKILPPEKEGGLPRQVGNKTECALLGFVTDLKQDYQAVRNEVPEEKLYKVYTFNSVRKSMSTVIRNPNGGFRMYSKGASEIILRKCNRILDRKGEAVPFKNKDRDDMVRTVIEPMACDGLRTICIAYRDFDDTEPSWDNENEILTELTCIAVVGIEDPVRPEVPDAIAKCKQAGITVRMVTGDNINTARAIATKCGILTPGDDFLCLEGKEFNRLIRNEKGEVEQEKLDKIWPKLRVLARSSPTDKHTLVKGIIDSTVGEHRQVVAVTGDGTNDGPALKKADVGFAMGIAGTDVAKEASDIILTDDNFTSIVKAVMWGRNVYDSISKFLQFQLTVNVVAVIVAFTGACITQDSPLKAVQMLWVNLIMDTFASLALATEPPTESLLKRRPYGRNKPLISRTMMKNILGHAFYQLIVIFILVFAGEKFFDIDSGRKAPLHSPPSQHYTIVFNTFVLMQLFNEINSRKIHGEKNVFSGIYRNIIFCSVVLGTFICQIFIVEFGGKPFSCTSLSLSQWLWCLFIGIGELLWGQFISAIPTRSLKFLKEAGHGTTKEEITKDAEGLDEIDHAEMELRRGQILWFRGLNRIQTQIDVINTFQTGASFKGVLRRQNMGQHLDVKLVPSSSYIKVVKAFHSSLHESIQKPYNQKSIHSFMTHPEFAIEEELPRTPLLDEEEEENPDKASKFGTRVLLLDGEVTPYANTNNNAVDCNQVQLPQSDSSLQSLETSV

SEQ ID NO: 6515 - protein, 1115 aa, Homo sapiens
MGDMANSSIEFHPKPQQQRDVPQAGGFGCTLAELRTLMELRGAEALQKIEEAYGDVSGLCRRLKTSPTEGLADNTNDLEKRRQIYGQNFIPPKQPKTFLQLVWEALQDVTLIILEVAAIVSLGLSFYAPPGEESEACGNVSGGAEDEGEAEAGWIEGAAILLSVICVVLVTAFNDWSKEKQFRGLQSRIEQEQKFTVIRNGQLLQVPVAALVVGDIAQVKYGDLLPADGVLIQANDLKIDESSLTGESDHVRKSADKDPMLLSGTHVMEGSGRMVVTAVGVNSQTGIIFTLLGAGGEEEEKKDKKAKKQDGAVAMEMQPLKSAEGGEMEEREKKKANAPKKEKSVLQGKLTKLAVQIGKAGLVMSAITVIILVLYFVIETFVVEGRTWLAECTPVYVQYFVKFFIIGVTVLVVAVPEGLPLAVTISLAYSVKKMMKDNNLVRHLDACETMGNATAICSDKTGTLTTNRMTVVQSYLGDTHYKEIPAPSALTPKILDLLVHAISINSAYTTKILPPEKEGALPRQVGNKTECALLGFVLDLKRDFQPVREQIPEDKLYKVYTFNSVRKSMSTVVRMPDGGFRLFSKGASEILLKKCTNILNSNGELRGFRPRDRDDMVRKIIEPMACDGLRTICIAYRDFYAGQEPDWDNENEVVGDLTCIAVVGIEDPVRPEVPEAIRKCQRAGITVRMVTGDNINTARAIAAKCGIIQPGEDFLCLEGKEFNRRIRNEKGEIEQERLDKVWPKLRVLARSSPTDKHTLVKGIIDSTTGEQRQVVAVTGDGTNDGPALKKADVGFAMGIAGTDVAKEASDIILTDDNFTSIVKAVMWGRNVYDSISKFLQFQLTVNVVAVIVAFTGACITQDSPLKAVQMLWVNLIMDTFASLALATEPPTESLLLRKPYGRDKPLISRTMMKNILGHAVYQLAIIFTLLFVGELFFDIDSGRNAPLHSPPSEHYTIIFNTFVMMQLFNEINARKIHGERNVFDGIFSNPIFCTIVLGTFGIQIVIVQFGGKPFSCSPLSTEQWLWCLFVGVGELVWGQVIATIPTSQLKCLKEAGHGPGKDEMTDEELAEGEEEIDHAERELRRGQILWFRGLNRIQTQVCWDGKKMLRTTEVG

SEQ ID NO: 6516 - protein, 1173 aa, Homo sapiens
MGDMANSSIEFHPKPQQQRDVPQAGGFGCTLAELRTLMELRGAEALQKIEEAYGDVSGLCRRLKTSPTEGLADNTNDLEKRRQIYGQNFIPPKQPKTFLQLVWEALQDVTLIILEVAAIVSLGLSFYAPPGEESEACGNVSGGAEDEGEAEAGWIEGAAILLSVICVVLVTAFNDWSKEKQFRGLQSRIEQEQKFTVIRNGQLLQVPVAALVVGDIAQVKYGDLLPADGVLIQANDLKIDESSLTGESDHVRKSADKDPMLLSGTHVMEGSGRMVVTAVGVNSQTGIIFTLLGAGGEEEEKKDKKGKQQDGAMESSQTKAKKQDGAVAMEMQPLKSAEGGEMEEREKKKANAPKKEKSVLQGKLTKLAVQIGKAGLVMSAITVIILVLYFVIETFVVEGRTWLAECTPVYVQYFVKFFIIGVTVLVVAVPEGLPLAVTISLAYSVKKMMKDNNLVRHLDACETMGNATAICSDKTGTLTTNRMTVVQSYLGDTHYKEIPAPSALTPKILDLLVHAISINSAYTTKILPPEKEGALPRQVGNKTECALLGFVLDLKRDFQPVREQIPEDKLYKVYTFNSVRKSMSTVVRMPDGGFRLFSKGASEILLKKCTNILNSNGELRGFRPRDRDDMVRKIIEPMACDGLRTICIAYRDFYAGQEPDWDNENEVVGDLTCIAVVGIEDPVRPEVPEAIRKCQRAGITVRMVTGDNINTARAIAAKCGIIQPGEDFLCLEGKEFNRRIRNEKGEIEQERLDKVWPKLRVLARSSPTDKHTLVKGIIDSTTGEQRQVVAVTGDGTNDGPALKKADVGFAMGIAGTDVAKEASDIILTDDNFTSIVKAVMWGRNVYDSISKFLQFQLTVNVVAVIVAFTGACITQDSPLKAVQMLWVNLIMDTFASLALATEPPTESLLLRKPYGRDKPLISRTMMKNILGHAVYQLAIIFTLLFVGELFFDIDSGRNAPLHSPPSEHYTIIFNTFVMMQLFNEINARKIHGERNVFDGIFSNPIFCTIVLGTFGIQIVIVQFGGKPFSCSPLSTEQWLWCLFVGVGELVWGQVIATIPTSQLKCLKEAGHGPGKDEMTDEELAEGEEEIDHAERELRRGQILWFRGLNRIQTQMEVVSTFKRSGSVQGAVRRRSSVLSQLHDVTNLSTPTHAILSAANPTSAAGNPGGESVP

SEQ ID NO: 6517 - protein, 1134 aa, Homo sapiens
MTNPSDRVLPANSMAESREGDFGCTVMELRKLMELRSRDALTQINVHYGGVQNLCSRLKTSPVEGLSGNPADLEKRRQVFGHNVIPPKKPKTFLELVWEALQDVTLIILEIAAIISLVLSFYRPAGEENELCGQVATTPEDENEAQAGWIEGAAILFSVIIVVLVTAFNDWSKEKQFRGLQCRIEQEQKFSIIRNGQLIQLPVAEIVVGDIAQVKYGDLLPADGILIQGNDLKIDESSLTGESDHVKKSLDKDPMLLSGTHVMEGSGRMVVTAVGVNSQTGIILTLLGVNEDDEGEKKKKGKKQGVPENRNKAKTQDGVALEIQPLNSQEGIDNEEKDKKAVKVPKKEKSVLQGKLTRLAVQIGKAGLLMSALTVFILILYFVIDNFVINRRPWLPECTPIYIQYFVKFFIIGITVLVVAVPEGLPLAVTISLAYSVKKMMKDNNLVRHLDACETMGNATAICSDKTGTLTMNRMTVVQAYIGGIHYRQIPSPDVFLPKVLDLIVNGISINSAYTSKILPPEKEGGLPRQVGNKTECALLGFVTDLKQDYQAVRNEVPEEKLYKVYTFNSVRKSMSTVIRNPNGGFRMYSKGASEIILRKCNRILDRKGEAVPFKNKDRDDMVRTVIEPMACDGLRTICIAYRDFDDTEPSWDNENEILTELTCIAVVGIEDPVRPEVPDAIAKCKQAGITVRMVTGDNINTARAIATKCGILTPGDDFLCLEGKEFNRLIRNEKGEVEQEKLDKIWPKLRVLARSSPTDKHTLVKGIIDSTVGEHRQVVAVTGDGTNDGPALKKADVGFAMGIAGTDVAKEASDIILTDDNFTSIVKAVMWGRNVYDSISKFLQFQLTVNVVAVIVAFTGACITQDSPLKAVQMLWVNLIMDTFASLALATEPPTESLLKRRPYGRNKPLISRTMMKNILGHAFYQLIVIFILVFAGEKFFDIDSGRKAPLHSPPSQHYTIVFNTFVLMQLFNEINSRKIHGEKNVFSGIYRNIIFCSVVLGTFICQFISAIPTRSLKFLKEAGHGTTKEEITKDAEGLDEIDHAEMELRRGQILWFRGLNRIQTQIDVINTFQTGASFKGVLRRQNMGQHLDVKLVPSSSYVAVAPVKSSPTTSVPAVSSPPMGNQSGQSVP

SEQ ID NO: 6518 - protein, 1176 aa, Homo sapiens
MGDMANNSVAYSGVKNSLKEANHDGDFGITLAELRALMELRSTDALRKIQESYGDVYGICTKLKTSPNEGLSGNPADLERREAVFGKNFIPPKKPKTFLQLVWEALQDVTLIILEIAAIVSLGLSFYQPPEGDNALCGEVSVGEEEGEGETGWIEGAAILLSVVCVVLVTAFNDWSKEKQFRGLQSRIEQEQKFTVIRGGQVIQIPVADITVGDIAQVKYGDLLPADGILIQGNDLKIDESSLTGESDHVKKSLDKDPLLLSGTHVMEGSGRMVVTAVGVNSQTGIIFTLLGAGGEEEEKKDEKKKEKKNKKQDGAIENRNKAKAQDGAAMEMQPLKSEEGGDGDEKDKKKANLPKKEKSVLQGKLTKLAVQIGKAGLLMSAITVIILVLYFVIDTFWVQKRPWLAECTPIYIQYFVKFFIIGVTVLVVAVPEGLPLAVTISLAYSVKKMMKDNNLVRHLDACETMGNATAICSDKTGTLTMNRMTVVQAYINEKHYKKVPEPEAIPPNILSYLVTGISVNCAYTSKILPPEKEGGLPRHVGNKTECALLGLLLDLKRDYQDVRNEIPEEALYKVYTFNSVRKSMSTVLKNSDGSYRIFSKGASEIILKKCFKILSANGEAKVFRPRDRDDIVKTVIEPMASEGLRTICLAFRDFPAGEPEPEWDNENDIVTGLTCIAVVGIEDPVRPEVPDAIKKCQRAGITVRMVTGDNINTARAIATKCGILHPGEDFLCLEGKDFNRRIRNEKGEIEQERIDKIWPKLRVLARSSPTDKHTLVKGIIDSTVSDQRQVVAVTGDGTNDGPALKKADVGFAMGIAGTDVAKEASDIILTDDNFTSIVKAVMWGRNVYDSISKFLQFQLTVNVVAVIVAFTGACITQDSPLKAVQMLWVNLIMDTLASLALATEPPTESLLLRKPYGRNKPLISRTMMKNILGHAFYQLVVVFTLLFAGEKFFDIDSGRNAPLHAPPSEHYTIVFNTFVLMQLFNEINARKIHGERNVFEGIFNNAIFCTIVLGTFVVQIIIVQFGGKPFSCSELSIEQWLWSIFLGMGTLLWGQLISTIPTSRLKFLKEAGHGTQKEEIPEEELAEDVEEIDHAERELRRGQILWFRGLNRIQTQMDVVNAFQSGSSIQGALRRQPSIASQHHDVTNISTPTHVVFSSSTASTTVGYSSGECIS

SEQ ID NO: 6519 - protein, 1154 aa, Homo sapiens
MGDMANSSIEFHPKPQQQRDVPQAGGFGCTLAELRTLMELRGAEALQKIEEAYGDVSGLCRRLKTSPTEGLADNTNDLEKRRQIYGQNFIPPKQPKTFLQLVWEALQDVTLIILEVAAIVSLGLSFYAPPGEESEACGNVSGGAEDEGEAEAGWIEGAAILLSVICVVLVTAFNDWSKEKQFRGLQSRIEQEQKFTVIRNGQLLQVPVAALVVGDIAQVKYGDLLPADGVLIQANDLKIDESSLTGESDHVRKSADKDPMLLSGTHVMEGSGRMVVTAVGVNSQTGIIFTLLGAGGEEEEKKDKKAKKQDGAVAMEMQPLKSAEGGEMEEREKKKANAPKKEKSVLQGKLTKLAVQIGKAGLVMSAITVIILVLYFVIETFVVEGRTWLAECTPVYVQYFVKFFIIGVTVLVVAVPEGLPLAVTISLAYSVKKMMKDNNLVRHLDACETMGNATAICSDKTGTLTTNRMTVVQSYLGDTHYKEIPAPSALTPKILDLLVHAISINSAYTTKILPPEKEGALPRQVGNKTECALLGFVLDLKRDFQPVREQIPEDKLYKVYTFNSVRKSMSTVVRMPDGGFRLFSKGASEILLKKCTNILNSNGELRGFRPRDRDDMVRKIIEPMACDGLRTICIAYRDFYAGQEPDWDNENEVVGDLTCIAVVGIEDPVRPEVPEAIRKCQRAGITVRMVTGDNINTARAIAAKCGIIQPGEDFLCLEGKEFNRRIRNEKGEIEQERLDKVWPKLRVLARSSPTDKHTLVKGIIDSTTGEQRQVVAVTGDGTNDGPALKKADVGFAMGIAGTDVAKEASDIILTDDNFTSIVKAVMWGRNVYDSISKFLQFQLTVNVVAVIVAFTGACITQDSPLKAVQMLWVNLIMDTFASLALATEPPTESLLLRKPYGRDKPLISRTMMKNILGHAVYQLAIIFTLLFVGELFFDIDSGRNAPLHSPPSEHYTIIFNTFVMMQLFNEINARKIHGERNVFDGIFSNPIFCTIVLGTFGIQIVIVQFGGKPFSCSPLSTEQWLWCLFVGVGELVWGQVIATIPTSQLKCLKEAGHGPGKDEMTDEELAEGEEEIDHAERELRRGQILWFRGLNRIQTQMEVVSTFKRSGSVQGAVRRRSSVLSQLHDVTNLSTPTHAILSAANPTSAAGSES

SEQ ID NO: 6520 - protein, 1220 aa, Homo sapiens [sequence omitted]

SEQ ID NO: 6521 - protein, 1168 aa, Homo sapiens
MGDMANSSIEFHPKPQQQRDVPQAGGFGCTLAELRTLMELRGAEALQKIEEAYGDVSGLCRRLKTSPTEGLADNTNDLEKRRQIYGQNFIPPKQPKTFLQLVWEALQDVTLIILEVAAIVSLGLSFYAPPGEESEACGNVSGGAEDEGEAEAGWIEGAAILLSVICVVLVTAFNDWSKEKQFRGLQSRIEQEQKFTVIRNGQLLQVPVAALVVGDIAQVKYGDLLPADGVLIQANDLKIDESSLTGESDHVRKSADKDPMLLSGTHVMEGSGRMVVTAVGVNSQTGIIFTLLGAGGEEEEKKDKKGKQQDGAMESSQTKAKKQDGAVAMEMQPLKSAEGGEMEEREKKKANAPKKEKSVLQGKLTKLAVQIGKAGLVMSAITVIILVLYFVIETFVVEGRTWLAECTPVYVQYFVKFFIIGVTVLVVAVPEGLPLAVTISLAYSVKKMMKDNNLVRHLDACETMGNATAICSDKTGTLTTNRMTVVQSYLGDTHYKEIPAPSALTPKILDLLVHAISINSAYTTKILPPEKEGALPRQVGNKTECALLGFVLDLKRDFQPVREQIPEDKLYKVYTFNSVRKSMSTVVRMPDGGFRLFSKGASEILLKKCTNILNSNGELRGFRPRDRDDMVRKIIEPMACDGLRTICIAYRDFYAGQEPDWDNENEVVGDLTCIAVVGIEDPVRPEVPEAIRKCQRAGITVRMVTGDNINTARAIAAKCGIIQPGEDFLCLEGKEFNRRIRNEKGEIEQERLDKVWPKLRVLARSSPTDKHTLVKGIIDSTTGEQRQVVAVTGDGTNDGPALKKADVGFAMGIAGTDVAKEASDIILTDDNFTSIVKAVMWGRNVYDSISKFLQFQLTVNVVAVIVAFTGACITQDSPLKAVQMLWVNLIMDTFASLALATEPPTESLLLRKPYGRDKPLISRTMMKNILGHAVYQLAIIFTLLFVGELFFDIDSGRNAPLHSPPSEHYTIIFNTFVMMQLFNEINARKIHGERNVFDGIFSNPIFCTIVLGTFGIQIVIVQFGGKPFSCSPLSTEQWLWCLFVGVGELVWGQVIATIPTSQLKCLKEAGHGPGKDEMTDEELAEGEEEIDHAERELRRGQILWFRGLNRIQTQMEVVSTFKRSGSVQGAVRRRSSVLSQLHDVTNLSTPTHAILSAANPTSAAGSES

SEQ ID NO: 6522 - protein, 1122 aa, Homo sapiens
MTNPSDRVLPANSMAESREGDFGCTVMELRKLMELRSRDALTQINVHYGGVQNLCSRLKTSPVEGLSGNPADLEKRRQVFGHNVIPPKKPKTFLELVWEALQDVTLIILEIAAIISLVLSFYRPAGEENELCGQVATTPEDENEAQAGWIEGAAILFSVIIVVLVTAFNDWSKEKQFRGLQCRIEQEQKFSIIRNGQLIQLPVAEIVVGDIAQVKYGDLLPADGILIQGNDLKIDESSLTGESDHVKKSLDKDPMLLSGTHVMEGSGRMVVTAVGVNSQTGIILTLLGVNEDDEGEKKKKAKTQDGVALEIQPLNSQEGIDNEEKDKKAVKVPKKEKSVLQGKLTRLAVQIGKAGLLMSALTVFILILYFVIDNFVINRRPWLPECTPIYIQYFVKFFIIGITVLVVAVPEGLPLAVTISLAYSVKKMMKDNNLVRHLDACETMGNATAICSDKTGTLTMNRMTVVQAYIGGIHYRQIPSPDVFLPKVLDLIVNGISINSAYTSKILPPEKEGGLPRQVGNKTECALLGFVTDLKQDYQAVRNEVPEEKLYKVYTFNSVRKSMSTVIRNPNGGFRMYSKGASEIILRKCNRILDRKGEAVPFKNKDRDDMVRTVIEPMACDGLRTICIAYRDFDDTEPSWDNENEILTELTCIAVVGIEDPVRPEVPDAIAKCKQAGITVRMVTGDNINTARAIATKCGILTPGDDFLCLEGKEFNRLIRNEKGEVEQEKLDKIWPKLRVLARSSPTDKHTLVKGIIDSTVGEHRQVVAVTGDGTNDGPALKKADVGFAMGIAGTDVAKEASDIILTDDNFTSIVKAVMWGRNVYDSISKFLQFQLTVNVVAVIVAFTGACITQDSPLKAVQMLWVNLIMDTFASLALATEPPTESLLKRRPYGRNKPLISRTMMKNILGHAFYQLIVIFILVFAGEKFFDIDSGRKAPLHSPPSQHYTIVFNTFVLMQLFNEINSRKIHGEKNVFSGIYRNIIFCSVVLGTFICQFISAIPTRSLKFLKEAGHGTTKEEITKDAEGLDEIDHAEMELRRGQILWFRGLNRIQTQIDVINTFQTGASFKGVLRRQNMGQHLDVKLVPSSSYVAVAPVKSSPTTSVPAVSSPPMGNQSGQSVP

SEQ ID NO: 6523 - protein, 1258 aa, Homo sapiens
MGDMANNSVAYSGVKNSLKEANHDGDFGITLAELRALMELRSTDALRKIQESYGDVYGICTKLKTSPNEGLSGNPADLERREAVFGKNFIPPKKPKTFLQLVWEALQDVTLIILEIAAIVSLGLSFYQPPEGDNALCGEVSVGEEEGEGETGWIEGAAILLSVVCVVLVTAFNDWSKEKQFRGLQSRIEQEQKFTVIRGGQVIQIPVADITVGDIAQVKYGDLLPADGILIQGNDLKIDESSLTGESDHVKKSLDKDPLLLSGTHVMEGSGRMVVTAVGVNSQTGIIFTLLGAGGEEEEKKDEKKKEKKNKKQDGAIENRNKAKAQDGAAMEMQPLKSEEGGDGDEKDKKKANLPKKEKSVLQGKLTKLAVQIGKAGLLMSAITVIILVLYFVIDTFWVQKRPWLAECTPIYIQYFVKFFIIGVTVLVVAVPEGLPLAVTISLAYSVKKMMKDNNLVRHLDACETMGNATAICSDKTGTLTMNRMTVVQAYINEKHYKKVPEPEAIPPNILSYLVTGISVNCAYTSKILPPEKEGGLPRHVGNKTECALLGLLLDLKRDYQDVRNEIPEEALYKVYTFNSVRKSMSTVLKNSDGSYRIFSKGASEIILKKCFKILSANGEAKVFRPRDRDDIVKTVIEPMASEGLRTICLAFRDFPAGEPEPEWDNENDIVTGLTCIAVVGIEDPVRPEVPDAIKKCQRAGITVRMVTGDNINTARAIATKCGILHPGEDFLCLEGKDFNRRIRNEKGEIEQERIDKIWPKLRVLARSSPTDKHTLVKGIIDSTVSDQRQVVAVTGDGTNDGPALKKADVGFAMGIAGTDVAKEASDIILTDDNFTSIVKAVMWGRNVYDSISKFLQFQLTVNVVAVIVAFTGACITQDSPLKAVQMLWVNLIMDTLASLALATEPPTESLLLRKPYGRNKPLISRTMMKNILGHAFYQLVVVFTLLFAGEKFFDIDSGRNAPLHAPPSEHYTIVFNTFVLMQLFNEINARKIHGERNVFEGIFNNAIFCTIVLGTFVVQIIIVQFGGKPFSCSELSIEQWLWSIFLGMGTLLWGQLISTIPTSRLKFLKEAGHGTQKEEIPEEELAEDVEEIDHAERELRRGQILWFRGLNRIQTQMDVVNAFQSGSSIQGALRRQPSIASQHHDVTNISTPTHIRVVNAFRSSLYEGLEKPESRSSIHNFMTHPEFRIEDSEPHIPLIDDTDAEDDAPTKRNSSPPPSPNKNNNAVDSGIHLTIEMNKSATSSSPGSPLHSLETSL

SEQ ID NO: 6524 - protein, 1159 aa, Homo sapiens
MGDMANSSIEFHPKPQQQRDVPQAGGFGCTLAELRTLMELRGAEALQKIEEAYGDVSGLCRRLKTSPTEGLADNTNDLEKRRQIYGQNFIPPKQPKTFLQLVWEALQDVTLIILEVAAIVSLGLSFYAPPGEESEACGNVSGGAEDEGEAEAGWIEGAAILLSVICVVLVTAFNDWSKEKQFRGLQSRIEQEQKFTVIRNGQLLQVPVAALVVGDIAQVKYGDLLPADGVLIQANDLKIDESSLTGESDHVRKSADKDPMLLSGTHVMEGSGRMVVTAVGVNSQTGIIFTLLGAGGEEEEKKDKKAKKQDGAVAMEMQPLKSAEGGEMEEREKKKANAPKKEKSVLQGKLTKLAVQIGKAGLVMSAITVIILVLYFVIETFVVEGRTWLAECTPVYVQYFVKFFIIGVTVLVVAVPEGLPLAVTISLAYSVKKMMKDNNLVRHLDACETMGNATAICSDKTGTLTTNRMTVVQSYLGDTHYKEIPAPSALTPKILDLLVHAISINSAYTTKILPPEKEGALPRQVGNKTECALLGFVLDLKRDFQPVREQIPEDKLYKVYTFNSVRKSMSTVVRMPDGGFRLFSKGASEILLKKCTNILNSNGELRGFRPRDRDDMVRKIIEPMACDGLRTICIAYRDFYAGQEPDWDNENEVVGDLTCIAVVGIEDPVRPEVPEAIRKCQRAGITVRMVTGDNINTARAIAAKCGIIQPGEDFLCLEGKEFNRRIRNEKGEIEQERLDKVWPKLRVLARSSPTDKHTLVKGIIDSTTGEQRQVVAVTGDGTNDGPALKKADVGFAMGIAGTDVAKEASDIILTDDNFTSIVKAVMWGRNVYDSISKFLQFQLTVNVVAVIVAFTGACITQDSPLKAVQMLWVNLIMDTFASLALATEPPTESLLLRKPYGRDKPLISRTMMKNILGHAVYQLAIIFTLLFVGELFFDIDSGRNAPLHSPPSEHYTIIFNTFVMMQLFNEINARKIHGERNVFDGIFSNPIFCTIVLGTFGIQIVIVQFGGKPFSCSPLSTEQWLWCLFVGVGELVWGQVIATIPTSQLKCLKEAGHGPGKDEMTDEELAEGEEEIDHAERELRRGQILWFRGLNRIQTQMEVVSTFKRSGSVQGAVRRRSSVLSQLHDVTNLSTPTHAILSAANPTSAAGNPGGESVP

SEQ ID NO: 6525 - protein, 1249 aa, Homo sapiens
MGDMANNSVAYSGVKNSLKEANHDGDFGITLAELRALMELRSTDALRKIQESYGDVYGICTKLKTSPNEGLSGNPADLERREAVFGKNFIPPKKPKTFLQLVWEALQDVTLIILEIAAIVSLGLSFYQPPEGDNALCGEVSVGEEEGEGETGWIEGAAILLSVVCVVLVTAFNDWSKEKQFRGLQSRIEQEQKFTVIRGGQVIQIPVADITVGDIAQVKYGDLLPADGILIQGNDLKIDESSLTGESDHVKKSLDKDPLLLSGTHVMEGSGRMVVTAVGVNSQTGIIFTLLGAGGEEEEKKDEKKKEKKNKKQDGAIENRNKAKAQDGAAMEMQPLKSEEGGDGDEKDKKKANLPKKEKSVLQGKLTKLAVQIGKAGLLMSAITVIILVLYFVIDTFWVQKRPWLAECTPIYIQYFVKFFIIGVTVLVVAVPEGLPLAVTISLAYSVKKMMKDNNLVRHLDACETMGNATAICSDKTGTLTMNRMTVVQAYINEKHYKKVPEPEAIPPNILSYLVTGISVNCAYTSKILPPEKEGGLPRHVGNKTECALLGLLLDLKRDYQDVRNEIPEEALYKVYTFNSVRKSMSTVLKNSDGSYRIFSKGASEIILKKCFKILSANGEAKVFRPRDRDDIVKTVIEPMASEGLRTICLAFRDFPAGEPEPEWDNENDIVTGLTCIAVVGIEDPVRPEVPDAIKKCQRAGITVRMVTGDNINTARAIATKCGILHPGEDFLCLEGKDFNRRIRNEKGEIEQERIDKIWPKLRVLARSSPTDKHTLVKGIIDSTVSDQRQVVAVTGDGTNDGPALKKADVGFAMGIAGTDVAKEASDIILTDDNFTSIVKAVMWGRNVYDSISKFLQFQLTVNVVAVIVAFTGACITQDSPLKAVQMLWVNLIMDTLASLALATEPPTESLLLRKPYGRNKPLISRTMMKNILGHAFYQLVVVFTLLFAGEKFFDIDSGRNAPLHAPPSEHYTIVFNTFVLMQLFNEINARKIHGERNVFEGIFNNAIFCTIVLGTFVVQIIIVQFGGKPFSCSELSIEQWLWSIFLGMGTLLWGQLISTIPTSRLKFLKEAGHGTQKEEIPEEELAEDVEEIDHAERELRRGQILWFRGLNRIQTQMDVVNAFQSGSSIQGALRRQPSIASQHHDIRVVNAFRSSLYEGLEKPESRSSIHNFMTHPEFRIEDSEPHIPLIDDTDAEDDAPTKRNSSPPPSPNKNNNAVDSGIHLTIEMNKSATSSSPGSPLHSLETSL

SEQ ID NO: 6526 - protein, 1184 aa, Homo sapiens
MGDMANNSVAYSGVKNSLKEANHDGDFGITLAELRALMELRSTDALRKIQESYGDVYGICTKLKTSPNEGLSGNPADLERREAVFGKNFIPPKKPKTFLQLVWEALQDVTLIILEIAAIVSLGLSFYQPPEGDNALCGEVSVGEEEGEGETGWIEGAAILLSVVCVVLVTAFNDWSKEKQFRGLQSRIEQEQKFTVIRGGQVIQIPVADITVGDIAQVKYGDLLPADGILIQGNDLKIDESSLTGESDHVKKSLDKDPLLLSGTHVMEGSGRMVVTAVGVNSQTGIIFTLLGAGGEEEEKKDEKKKEKKNKKQDGAIENRNKAKAQDGAAMEMQPLKSEEGGDGDEKDKKKANLPKKEKSVLQGKLTKLAVQIGKAGLLMSAITVIILVLYFVIDTFWVQKRPWLAECTPIYIQYFVKFFIIGVTVLVVAVPEGLPLAVTISLAYSVKKMMKDNNLVRHLDACETMGNATAICSDKTGTLTMNRMTVVQAYINEKHYKKVPEPEAIPPNILSYLVTGISVNCAYTSKILPPEKEGGLPRHVGNKTECALLGLLLDLKRDYQDVRNEIPEEALYKVYTFNSVRKSMSTVLKNSDGSYRIFSKGASEIILKKCFKILSANGEAKVFRPRDRDDIVKTVIEPMASEGLRTICLAFRDFPAGEPEPEWDNENDIVTGLTCIAVVGIEDPVRPEVPDAIKKCQRAGITVRMVTGDNINTARAIATKCGILHPGEDFLCLEGKDFNRRIRNEKGEIEQERIDKIWPKLRVLARSSPTDKHTLVKGIIDSTVSDQRQVVAVTGDGTNDGPALKKADVGFAMGIAGTDVAKEASDIILTDDNFTSIVKAVMWGRNVYDSISKFLQFQLTVNVVAVIVAFTGACITQDSPLKAVQMLWVNLIMDTLASLALATEPPTESLLLRKPYGRNKPLISRTMMKNILGHAFYQLVVVFTLLFAGEKFFDIDSGRNAPLHAPPSEHYTIVFNTFVLMQLFNEINARKIHGERNVFEGIFNNAIFCTIVLGTFVVQLISTIPTSRLKFLKEAGHGTQKEEIPEEELAEDVEEIDHAERELRRGQILWFRGLNRIQTQIRVVNAFRSSLYEGLEKPESRSSIHNFMTHPEFRIEDSEPHIPLIDDTDAEDDAPTKRNSSPPPSPNKNNNAVDSGIHLTIEMNKSATSSSPGSPLHSLETSL

SEQ ID NO: 6527 - protein, 1171 aa, Homo sapiens
MGDMANNSVAYSGVKNSLKEANHDGDFGITLAELRALMELRSTDALRKIQESYGDVYGICTKLKTSPNEGLSGNPADLERREAVFGKNFIPPKKPKTFLQLVWEALQDVTLIILEIAAIVSLGLSFYQPPEGDNALCGEVSVGEEEGEGETGWIEGAAILLSVVCVVLVTAFNDWSKEKQFRGLQSRIEQEQKFTVIRGGQVIQIPVADITVGDIAQVKYGDLLPADGILIQGNDLKIDESSLTGESDHVKKSLDKDPLLLSGTHVMEGSGRMVVTAVGVNSQTGIIFTLLGAGGEEEEKKDEKKKEKKNKKQDGAIENRNKAKAQDGAAMEMQPLKSEEGGDGDEKDKKKANLPKKEKSVLQGKLTKLAVQIGKAGLLMSAITVIILVLYFVIDTFWVQKRPWLAECTPIYIQYFVKFFIIGVTVLVVAVPEGLPLAVTISLAYSVKKMMKDNNLVRHLDACETMGNATAICSDKTGTLTMNRMTVVQAYINEKHYKKVPEPEAIPPNILSYLVTGISVNCAYTSKILPPEKEGGLPRHVGNKTECALLGLLLDLKRDYQDVRNEIPEEALYKVYTFNSVRKSMSTVLKNSDGSYRIFSKGASEIILKKCFKILSANGEAKVFRPRDRDDIVKTVIEPMASEGLRTICLAFRDFPAGEPEPEWDNENDIVTGLTCIAVVGIEDPVRPEVPDAIKKCQRAGITVRMVTGDNINTARAIATKCGILHPGEDFLCLEGKDFNRRIRNEKGEIEQERIDKIWPKLRVLARSSPTDKHTLVKGIIDSTVSDQRQVVAVTGDGTNDGPALKKADVGFAMGIAGTDVAKEASDIILTDDNFTSIVKAVMWGRNVYDSISKFLQFQLTVNVVAVIVAFTGACITQDSPLKAVQMLWVNLIMDTLASLALATEPPTESLLLRKPYGRNKPLISRTMMKNILGHAFYQLVVVFTLLFAGEKFFDIDSGRNAPLHAPPSEHYTIVFNTFVLMQLFNEINARKIHGERNVFEGIFNNAIFCTIVLGTFVVQIIIVQFGGKPFSCSELSIEQWLWSIFLGMGTLLWGQLISTIPTSRLKFLKEAGHGTQKEEIPEEELAEDVEEIDHAERELRRGQILWFRGLNRIQTQMDVVNAFQSGSSIQGALRRQPSIASQHHDVTNISTPTHVVFSSSTASTTVGFEW

SEQ ID NO: 6528 - protein, 1229 aa, Homo sapiens
MTNPSDRVLPANSMAESREGDFGCTVMELRKLMELRSRDALTQINVHYGGVQNLCSRLKTSPVEGLSGNPADLEKRRQVFGHNVIPPKKPKTFLELVWEALQDVTLIILEIAAIISLVLSFYRPAGEENELCGQVATTPEDENEAQAGWIEGAAILFSVIIVVLVTAFNDWSKEKQFRGLQCRIEQEQKFSIIRNGQLIQLPVAEIVVGDIAQVKYGDLLPADGILIQGNDLKIDESSLTGESDHVKKSLDKDPMLLSGTHVMEGSGRMVVTAVGVNSQTGIILTLLGVNEDDEGEKKKKAKTQDGVALEIQPLNSQEGIDNEEKDKKAVKVPKKEKSVLQGKLTRLAVQIGKAGLLMSALTVFILILYFVIDNFVINRRPWLPECTPIYIQYFVKFFIIGITVLVVAVPEGLPLAVTISLAYSVKKMMKDNNLVRHLDACETMGNATAICSDKTGTLTMNRMTVVQAYIGGIHYRQIPSPDVFLPKVLDLIVNGISINSAYTSKILPPEKEGGLPRQVGNKTECALLGFVTDLKQDYQAVRNEVPEEKLYKVYTFNSVRKSMSTVIRNPNGGFRMYSKGASEIILRKCNRILDRKGEAVPFKNKDRDDMVRTVIEPMACDGLRTICIAYRDFDDTEPSWDNENEILTELTCIAVVGIEDPVRPEVPDAIAKCKQAGITVRMVTGDNINTARAIATKCGILTPGDDFLCLEGKEFNRLIRNEKGEVEQEKLDKIWPKLRVLARSSPTDKHTLVKGIIDSTVGEHRQVVAVTGDGTNDGPALKKADVGFAMGIAGTDVAKEASDIILTDDNFTSIVKAVMWGRNVYDSISKFLQFQLTVNVVAVIVAFTGACITQDSPLKAVQMLWVNLIMDTFASLALATEPPTESLLKRRPYGRNKPLISRTMMKNILGHAFYQLIVIFILVFAGEKFFDIDSGRKAPLHSPPSQHYTIVFNTFVLMQLFNEINSRKIHGEKNVFSGIYRNIIFCSVVLGTFICQIFIVEFGGKPFSCTSLSLSQWLWCLFIGIGELLWGQFISAIPTRSLKFLKEAGHGTTKEEITKDAEGLDEIDHAEMELRRGQILWFRGLNRIQTQIDVINTFQTGASFKGVLRRQNMGQHLDVKLVPSSSYIKVVKAFHSSLHESIQKPYNQKSIHSFMTHPEFAIEEELPRTPLLDEEEEENPDKASKFGTRVLLLDGEVTPYANTNNNAVDCNQVQLPQSDSSLQSLETSV

SEQ ID NO: 6529 - protein, 1205 aa, Homo sapiens
MTNPSDRVLPANSMAESREGDFGCTVMELRKLMELRSRDALTQINVHYGGVQNLCSRLKTSPVEGLSGNPADLEKRRQVFGHNVIPPKKPKTFLELVWEALQDVTLIILEIAAIISLVLSFYRPAGEENELCGQVATTPEDENEAQAGWIEGAAILFSVIIVVLVTAFNDWSKEKQFRGLQCRIEQEQKFSIIRNGQLIQLPVAEIVVGDIAQVKYGDLLPADGILIQGNDLKIDESSLTGESDHVKKSLDKDPMLLSGTHVMEGSGRMVVTAVGVNSQTGIILTLLGVNEDDEGEKKKKGKKQGVPENRNKAKTQDGVALEIQPLNSQEGIDNEEKDKKAVKVPKKEKSVLQGKLTRLAVQIGKAGLLMSALTVFILILYFVIDNFVINRRPWLPECTPIYIQYFVKFFIIGITVLVVAVPEGLPLAVTISLAYSVKKMMKDNNLVRHLDACETMGNATAICSDKTGTLTMNRMTVVQAYIGGIHYRQIPSPDVFLPKVLDLIVNGISINSAYTSKILPPEKEGGLPRQVGNKTECALLGFVTDLKQDYQAVRNEVPEEKLYKVYTFNSVRKSMSTVIRNPNGGFRMYSKGASEIILRKCNRILDRKGEAVPFKNKDRDDMVRTVIEPMACDGLRTICIAYRDFDDTEPSWDNENEILTELTCIAVVGIEDPVRPEVPDAIAKCKQAGITVRMVTGDNINTARAIATKCGILTPGDDFLCLEGKEFNRLIRNEKGEVEQEKLDKIWPKLRVLARSSPTDKHTLVKGIIDSTVGEHRQVVAVTGDGTNDGPALKKADVGFAMGIAGTDVAKEASDIILTDDNFTSIVKAVMWGRNVYDSISKFLQFQLTVNVVAVIVAFTGACITQDSPLKAVQMLWVNLIMDTFASLALATEPPTESLLKRRPYGRNKPLISRTMMKNILGHAFYQLIVIFILVFAGEKFFDIDSGRKAPLHSPPSQHYTIVFNTFVLMQLFNEINSRKIHGEKNVFSGIYRNIIFCSVVLGTFICQIFIVEFGGKPFSCTSLSLSQWLWCLFIGIGELLWGQFISAIPTRSLKFLKEAGHGTTKEEITKDAEGLDEIDHAEMELRRGQILWFRGLNRIQTQIKVVKAFHSSLHESIQKPYNQKSIHSFMTHPEFAIEEELPRTPLLDEEEEENPDKASKFGTRVLLLDGEVTPYANTNNNAVDCNQVQLPQSDSSLQSLETSV

SEQ ID NO: 6530 - protein, 1129 aa, Homo sapiens
MGDMANSSIEFHPKPQQQRDVPQAGGFGCTLAELRTLMELRGAEALQKIEEAYGDVSGLCRRLKTSPTEGLADNTNDLEKRRQIYGQNFIPPKQPKTFLQLVWEALQDVTLIILEVAAIVSLGLSFYAPPGEESEACGNVSGGAEDEGEAEAGWIEGAAILLSVICVVLVTAFNDWSKEKQFRGLQSRIEQEQKFTVIRNGQLLQVPVAALVVGDIAQVKYGDLLPADGVLIQANDLKIDESSLTGESDHVRKSADKDPMLLSGTHVMEGSGRMVVTAVGVNSQTGIIFTLLGAGGEEEEKKDKKGKQQDGAMESSQTKAKKQDGAVAMEMQPLKSAEGGEMEEREKKKANAPKKEKSVLQGKLTKLAVQIGKAGLVMSAITVIILVLYFVIETFVVEGRTWLAECTPVYVQYFVKFFIIGVTVLVVAVPEGLPLAVTISLAYSVKKMMKDNNLVRHLDACETMGNATAICSDKTGTLTTNRMTVVQSYLGDTHYKEIPAPSALTPKILDLLVHAISINSAYTTKILPPEKEGALPRQVGNKTECALLGFVLDLKRDFQPVREQIPEDKLYKVYTFNSVRKSMSTVVRMPDGGFRLFSKGASEILLKKCTNILNSNGELRGFRPRDRDDMVRKIIEPMACDGLRTICIAYRDFYAGQEPDWDNENEVVGDLTCIAVVGIEDPVRPEVPEAIRKCQRAGITVRMVTGDNINTARAIAAKCGIIQPGEDFLCLEGKEFNRRIRNEKGEIEQERLDKVWPKLRVLARSSPTDKHTLVKGIIDSTTGEQRQVVAVTGDGTNDGPALKKADVGFAMGIAGTDVAKEASDIILTDDNFTSIVKAVMWGRNVYDSISKFLQFQLTVNVVAVIVAFTGACITQDSPLKAVQMLWVNLIMDTFASLALATEPPTESLLLRKPYGRDKPLISRTMMKNILGHAVYQLAIIFTLLFVGELFFDIDSGRNAPLHSPPSEHYTIIFNTFVMMQLFNEINARKIHGERNVFDGIFSNPIFCTIVLGTFGIQIVIVQFGGKPFSCSPLSTEQWLWCLFVGVGELVWGQVIATIPTSQLKCLKEAGHGPGKDEMTDEELAEGEEEIDHAERELRRGQILWFRGLNRIQTQVCWDGKKMLRTTEVG

SEQ ID NO: 6531 - protein, 261 aa, Homo sapiens
MSTTTCQVVAFLLSILGLAGCIAATGMDMWSTQDLYDNPVTSVFQYEGLWRSCVRQSSGFTECRPYFTILGLPAMLQAVRALMIVGIVLGAIGLLVSIFALKCIRIGSMEDSAKANMTLTSGIMFIVSGLCAIAGVSVFANMLVTNFWMSTANMYTGMGGMVQTVQTRYTFGAALFVGWVAGGLTLIGGVMMCIACRGLAPEETNYKAVSYHASGHSVAYKPGGFKASTGFGSNTKNKKIYDGGARTEDEVQSYPSKHDYV

SEQ ID NO: 6532 - protein, 261 aa, Homo sapiens
MAVTACQGLGFVVSLIGIAGIIAATCMDQWSTQDLYNNPVTAVFNYQGLWRSCVRESSGFTECRGYFTLLGLPAMLQAVRALMIVGIVLGAIGLLVSIFALKCIRIGSMEDSAKANMTLTSGIMFIVSGLCAIAGVSVFANMLVTNFWMSTANMYTGMGGMVQTVQTRYTFGAALFVGWVAGGLTLIGGVMMCIACRGLAPEETNYKAVSYHASGHSVAYKPGGFKASTGFGSNTKNKKIYDGGARTEDEVQSYPSKHDYV

SEQ ID NO: 6533 - protein, 310 aa, Homo sapiens
MVKAGNETQISEFLLLGFSEKQELQPFLFGLFLSMYLVTVLGNLLIILAAISDSCLHTPMYFFLSNLSFVDICFASTMVPKMLVNIQTQSKVITYAGCITQMCFFVLFIVLDSLLLTVMAYDQFVAICHPLHYTVIMSPQLCGLLVLVSWIMSVLNSMLQSLVTLQLSFCTDLEIPHFFCELNEMIHLACSDTFVNNMVMHFAAVLLDGGPLVGILYSYCRIVSSIRAISSTQGKYKALSTCASHLSVVSIFYGTGLGVYLSSTMTQNLHSTAVASVMYTVVTPMLNPFIYSLRNKDIKGALTQFFRGKQ

SEQ ID NO: 6534 - protein, 314 aa, Homo sapiens [sequence omitted]

SEQ ID NO: 6535 - protein, 1393 aa, Homo sapiens
MFSWIIEEFNFPIRNPSETEGLDKEMLKLVFIPSCFVGSRLRQEDFPPRIVEHPSDVIVSKGEPTTLNCKAEGRPTPTIEWYKDGERVETDKDDPRSHRMLLPSGSLFFLRIVHGRRSKPDEGSYVCVARNYLGEAVSRNASLEVALLRDDFRQNPTDVVVAAGEPAILECQPPRGHPEPTIYWKKDKVRIDDKEERISIRGGKLMISNTRKSDAGMYTCVGTNMVGERDSDPAELTVFERPTFLRRPINQVVLEEEAVEFRCQVQGDPQPTVRWKKDDADLPRGRYDIKDDYTLRIKKTMSTDEGTYMCIAENRVGKMEASATLTVRAPPQFVVRPRDQIVAQGRTVTFPCETKGNPQPAVFWQKEGSQNLLFPNQPQQPNSRCSVSPTGDLTITNIQRSDAGYYICQALTVAGSILAKAQLEVTDVLTDRPPPIILQGPANQTLAVDGTALLKCKATGDPLPVISWLKEGFTFPGRDPRATIQEQGTLQIKNLRISDTGTYTCVATSSSGETSWSAVLDVTESGATISKNYDLSDLPGPPSKPQVTDVTKNSVTLSWQPGTPGTLPASAYIIEAFSQSVSNSWQTVANHVKTTLYTVRGLRPNTIYLFMVRAINPQGLSDPSPMSDPVRTQDISPPAQGVDHRQVQKELGDVLVRLHNPVVLTPTTVQVTWTVDRQPQFIQGYRVMYRQTSGLQATSSWQNLDAKVPTERSAVLVNLKKGVTYEIKVRPYFNEFQGMDSESKTVRTTEEAPSAPPQSVTVLTVGSYNSTSISVSWDPPPPDHQNGIIQEYKIWCLGNETRFHINKTVDAAIRSVIIGGLFPGIQYRVEVAASTSAGVGVKSEPQPIIIGRRNEVVITENNNSITEQITDVVKQPAFIAGIGGACWVILMGFSIWLYWRRKKRKGLSNYAVTFQRGDGGLMSNGSRPGLLNAGDPSYPWLADSWPATSLPVNNSNSGPNEIGNFGRGDVLPPVPGQGDKTATMLSDGAIYSSIDFTTKTSYNSSSQITQATPYATTQILHSNSIHELAVDLPDPQWKSSIQQKTDLMGFGYSLPDQNKGNNGGKGGKKKKNKNSSKPQKNNGSTWANVPLPPPPVQPLPGTELEHYAVEQQENGYDSDSWCPPLPVQTYLHQGLEDELEEDDDRVPTPPVRGVASSPAISFGQQSTATLTPSPREEMQPMLQAHLDELTRAYQFDIAKQTWHIQSNNQPPQPPVPPLGYVSGALISDLETDVADDDADDEEEALEIPRPLRALDQTPGSSMDNLDSSVTGKAFTSSQRPRPTSPFSTDSNTSAALSQSQRPRPTKKHKGGRMDQQPALPHRREGMTDEEALVPYSKPSFPSPGGHSSSGTASSKGSTGPRKTEVLRAGHQRNASDLLDIGYMGSNSQGQFTE

SEQ ID NO: 6536 - protein, 507 aa, Homo sapiens
EVWDCPGNSRVSGPRPILGAMGVIGIQLVVTMVMASVMQKIIPHYSLARWLLCNGSLRWYQHPTEEELRILAGKQQKGKTKKDRKYNGHIESKPLTIPKDIDLHLETKSVTEVDTLALHYFPEYQWLVDFTVAATVVYLVTEVYYNFMKPTQEMNISLVWCLLVLSFAIKVLFSLTTHYFKVEDGGERSVCVTFGFFFFVKAMAVLIVTENYLEFGLETGFTNFSDSAMQFLEKQGLESQSPVSKLTFKFFLAIFCSFIGAFLTFPGLRLAQMHLDALNLATEKITQTLLHINFLAPLFMVLLWVKPITKDYIMNPPLGKESIPLMTEATFDTLRLWLIILLCALRLAMMRSHLQAYLNLAQKCVDQMKKEAGRISTVELQKMVARVFYYLCVIALQYVAPLVMLLHTTLLLKTLGNHSWGIYPESISTLPVDNSLLSNSVYSELPSAEGKMKVTVTQITVALSSLKNIFTPLLFRGLLSFLTWWIAACLFSTSLFGLFYHQYLTVA

SEQ ID NO: 6537 - protein, 3859 aa, Homo sapiens [sequence omitted]

SEQ ID NO: 6538 - protein, 3830 aa, Homo sapiens
MAFVATQGATVVDQTTLMKKYLQFVAALTDVNTPDETKLKMMQEVSENFENVTSSPQYSTFLEHIIPRFLTFLQDGEVQFLQEKPAQQLRKLVLEIIHRIPTNEHLRPHTKNVLSVMFRFLETENEENVLICLRIIIELHKQFRPPITQEIHHFLDFVKQIYKELPKVVNRYFENPQVIPENTVPPPEMVGMITTIAVKVNPEREDSETRTHSIIPRGSLSLKVLAELPIIVVLMYQLYKLNIHNVVAEFVPLIMNTIAIQVSAQARQHKLYNKELYADFIAAQIKTLSFLAYIIRIYQELVTKYSQQMVKGMLQLLSNCPAETAHLRKELLIAAKHILTTELRNQFIPCMDKLFDESILIGSGYTARETLRPLAYSTLADLVHHVRQHLPLSDLSLAVQLFAKNIDDESLPSSIQTMSCKLLLNLVDCIRSKSEQESGNGRDVLMRMLEVFVLKFHTIARYQLSAIFKKCKPQSELGAVEAALPGVPTAPAAPGPAPSPAPVPAPPPPPPPPPPATPVTPAPVPPFEKQGEKDKEDKQTFQVTDCRSLVKTLVCGVKTITWGITSCKAPGEAQFIPNKQLQPKETQIYIKLVKYAMQALDIYQVQIAGNGQTYIRVANCQTVRMKEEKEVLEHFAGVFTMMNPLTFKEIFQTTVPYMVDRISKNYALQIVANSFLANPTTSALFATILVEYLLDRLPEMGSNVELSNLYLKLFKLVFGSVSLFAAENEQMLKPHLHKIVNSSMELAQTAKEPYNYFLLLRALFRSIGGGSHDLLYQEFLPLLPNLLQGLNMLQSGLHKQHMKDLFVELCLTVPVRLSSLLPYLPMLMDPLVSALNGSQTLVSQGLRTLELCVDNLQPDFLYDHIQPVRAELMQALWRTLRNPADSISHVAYRVLGKFGGSNRKMLKESQKLHYVVTEVQGPSITVEFSDCKASLQLPMEKAIETALDCLKSANTEPYYRRQAWEVIKCFLVAMMSLEDNKHALYQLLAHPNFTEKTIPNVIISHRYKAQDTPARKTFEQALTGAFMSAVIKDLRPSALPFVASLIRHYTMVAVAQQCGPFLLPCYQVGSQPSTAMFHSEENGSKGMDPLVLIDAIAICMAYEEKELCKIGEVALAVIFDVASIILGSKERACQLPLFSYIVERLCACCYEQAWYAKLGGVVSIKFLMERLPLTWVLQNQQTFLKALLFVMMDLTGEVSNGAVAMAKTTLEQLLMRCATPLKDEERAEEIVAAQEKSFHHVTHDLVREVTSPNSTVRKQAMHSLQVLAQVTGKSVTVIMEPHKEVLQDMVPPKKHLLRHQPANAQIGLMEGNTFCTTLQPRLFTMDLNVVEHKVFYTELLNLCEAEDSALTKLPCYKSLPSLVPLRIAALNALAACNYLPQSREKIIAALFKALNSTNSELQEAGEACMRKFLEGATIEVDQIHTHMRPLLMMLGDYRSLTLNVVNRLTSVTRLFPNSFNDKFCDQMMQHLRKWMEVVVITHKGGQRSDGNEMKICSAIINLFHLIPAAPQTLVKPLLEVVMKTERAMLIEAGSPFREPLIKFLTRHPSQTVELFMMEATLNDPQWSRMFMSFLKHKDARPLRDVLAANPNRFITLLLPGGAQTAVRPGSPSTSTMRLDLQFQAIKIISIIVKNDDSWLASQHSLVSQLRRVWVSENFQERHRKENMAATNWKEPKLLAYCLLNYCKRNYGDIELLFQLLRAFTGRFLCNMTFLKEYMEEEIPKNYSIAQKRALFFRFVDFNDPNFGDELKAKVLQHILNPAFLYSFEKGEGEQLLGPPNPEGDNPESITSVFITKVLDPEKQADMLDSLRIYLLQYATLLVEHAPHHIHDNNKNRNSKLRRLMTFAWPCLLSKACVDPACKYSGHLLLAHIIAKFAIHKKIVLQVFHSLLKAHAMEARAIVRQAMAILTPAVPARMEDGHQMLTHWTRKIIVEEGHTVPQLVHILHLIVQHFKVYYPVRHHLVQHMVSAMQRLGFTPSVTIEQRRLAVDLSEVVIKWELQRIKDQQPDSDMDPNSSGEGVNSVSSSIKRGLSVDSAQEVKRFRTATGAISAVFGRSQSLPGADSLLAKPIDKQHTDTVVNFLIRVACQVNDNTNTAGSPGEVLSRRCVNLLKTALRPDMWPKSELKLQWFDKLLMTVEQPNQVNYGNICTGLEVLSFLLTVLQSPAILSSFKPLQRGIAACMTCGNTKVLRAVHSLLSRLMSIFPTEPSTSSVASKYEELECLYAAVGKVIYEGLTNYEKATNANPSQLFGTLMILKSACSNNPSYIDRLISVFMRSLQKMVREHLNPQAASGSTEATSGTSELVMLSLELVKTRLAVMSMEMRKNFIQAILTSLIEKSPDAKILRAVVKIVEEWVKNNSPMAANQTPTLREKSILLVKMMTYIEKRFPEDLELNAQFLDLVNYVYRDETLSGSELTAKLEPAFLSGLRCAQPLIRAKFFEVFDNSMKRRVYERLLYVTCSQNWEAMGNHFWIKQCIELLLAVCEKSTPIGTSCQGAMLPSITNVINLADSHDRAAFAMVTHVKQEPRERENSESKEEDVEIDIELAPGDQTSTPKTKELSEKDIGNQLHMLTNRHDKFLDTLREVKTGALLSAFVQLCHISTTLAEKTWVQLFPRLWKILSDRQQHALAGEISPFLCSGSHQVQRDCQPSALNCFVEAMSQCVPPIPIRPCVLKYLGKTHNLWFRSTLMLEHQAFEKGLSLQIKPKQTTEFYEQESITPPQQEILDSLAELYSLLQEEDMWAGLWQKRCKYSETATAIAYEQHGFFEQAQESYEKAMDKAKKEHERSNASPAIFPEYQLWEDHWIRCSKELNQWEALTEYGQSKGHINPYLVLECAWRVSNWTAMKEALVQVEVSCPKEMAWKVNMYRGYLAICHPEEQQLSFIERLVEMASSLAIREWRRLPHVVSHVHTPLLQAAQQIIELQEAAQINAGLQPTNLGRNNSLHDMKTVVKTWRNRLPIVSDDLSHWSSIFMWRQHHYQAIVTAYENSSQHDPSSNNAMLGVHASASAIIQYGKIARKQGLVNVALDILSRIHTIPTVPIVDCFQKIRQQVKCYLQLAGVMGKNECMQGLEVIESTNLKYFTKEMTAEFYALKGMFLAQINKSEEANKAFSAAVQMHDVLVKAWAMWGDYLENIFVKERQLHLGVSAITCYLHACRHQNESKSRKYLAKVLWLLSFDDDKNTLADAVDKYCIGVPPIQWLAWIPQLLTCLVGSEGKLLLNLISQVGRVYPQAVYFPIRTLYLTLKIEQRERYKSDPGPIRATAPMWRCSRIMHMQRELHPTLLSSLEGIVDQMVWFRENWHEEVLRQLQQGLAKCYSVAFEKSGAVSDAKITPHTLNFVKKLVSTFGVGLENVSNVSTMFSSAASESLARRAQATAQDPVFQKLKGQFTTDFDFSVPGSMKLHNLISKLKKWIKILEAKTKQLPKFFLIEEKCRFLSNFSAQTAEVEIPGEFLMPKPTHYYIKIARFMPRVEIVQKHNTAARRLYIRGHNGKIYPYLVMNDACLTESRREERVLQLLRLLNPCLEKRKETTKRHLFFTVPRVVAVSPQMRLVEDNPSSLSLVEIYKQRCAKKGIEHDNPISRYYDRLATVQARGTQASHQVLRDILKEVQSNMVPRSMLKEWALHTFPNATDYWTFRKMFTIQLALIGFAEFVLHLNRLNPEMLQIAQDTGKLNVAYFRFDINDATGDLDANRPVPFRLTPNISEFLTTIGVSGPLTASMIAVARCFAQPNFKVDGILKTVLRDEIIAWHKKTQEDTSSPLSAAGQPENMDSQQLVSLVQKAVTAIMTRLHNLAQFEGGESKVNTLVAAANSLDNLCRMDPAWHPWL

SEQ ID NO: 6539 - protein, 1443 aa, Homo sapiens
EQPNQVNYGNICTGLEVLSFLLTVLQSPAILSSFKPLQRGIAACMTCGNTKVLRAVHSLLSRLMSIFPTEPKYIVLNNVLLSLCFSWLLLFCETLGNFYILGTLMILKSACSNNPSYIDRLISVFMRSLQKMVREHLNPQAASGSTEATSGTSELVMLSLELVKTRLAVMSMEMRKNFIQAILTSLIEKSPDAKILRAVVKIVEEWVKNNSPMAANQTPTLREKSILLVKMMTYIEKRFPEDLELNAQFLDLVNYVYRDETLSGSELTAKLEPAFLSGLRCAQPLIRAKFFEVFDNSMKRRVYERLLYVTCSQNWEAMGNHFWIKQCIETGALLSAFVQLCHISTTLAEKTWVQLFPRLWKILSDRQQHALAGEISPFLCSGSHQVQRDCQPSALNCFVEAMSQCVPPIPIRPCVLKYLGKTHNLWFRSTLMLEHQAFEKGLSLQIKPKQTTEFYEQESITPPQQEILDSLAELYSLLQEEDMWAGLWQKRCKYSETATAIAYEQHGFFEQAQESYEKAMDKAKKEHERSNASPAIFPEYQLWEDHWIRCSKELNQWEALTEYGQSKGHINPYLVLECAWRVSNWTAMKEALVQVEVSCPKEMAWKVNMYRGYLAICHPEEQQLSFIERLVEMASSLAIREWRRLPHVVSHVHTPLLQSLLCWSHQAAQQIIELQEAAQINAGLQPTNLGRNNSLHDMKTVVKTWRNRLPIVSDDLSHWSSIFMWRQHHYQAIVTAYENSSQHDPSSNNAMLGVHASASAIIQYGKIARKQGLVNVALDILSRIHTIPTVPIVDCFQKIRQQVKCYLQLAGVMGKNECMQGLEVIESTNLKYFTKEMTAEFYALKGMFLAQINKSEEANKAFSAAVQMHDVLVKAWAMWGDYLENIFVKERQLHLGVSAITCYLHACRHQNESKSRKYLAKVLWLLSFDDDKNTLADAVDKYCIGVPPIQWLAWIPQLLTCLVGSEGKLLLNLISQVGRVYPQAVYFPIRTLYLTLKIEQRERYKSDFDFSVPGSMKLHNLISKLKKWIKILEAKTKQLPKFFLIEEKCRFLSNFSAQTAEVEIPGEFLMPKPTHYYIKIARFMPRVEIVQKHNTAARRLYIRGHNGKIYPYLVMNDACLTESRREERVLQLLRLLNPCLEKRKETTKRHLFFTVPRVVAVSPQMRLVEDNPSSLSLVEIYKQRCAKKGIEHDNPISRYYDRLATVQARGTQASHQVLRDILKEVQSNMVPRSMLKEWALHTFPNATDYWTFRKMFTIQLALIGFAEFVLHLNRLNPEMLQIAQDTGKLNVAYFRFDINDATGDLDANRPVPFRLTPNISEFLTTIGVSGPLTASMIAVARCFAQPNFKVDGILKTVLRDEIIAWHKKTQEDTSSPLSAAGQPENMDSQQLVSLVQKAVTAIMTRLHNLAQFEGGESKVNTLVAAANSLDNLCRMDPAWHPWL

SEQ ID NO: 6540 - protein, 129 aa, Homo sapiens
MILSNTTAVTPFLTKLWQETVQQGGNMSGLARRSPRSSDGKLEALYVLMVLGFFGFFTLGIMLSYIRSKKLEHSNDPFNVYIESDAWQEKDKAYVQARVLESYRSCYVVENHLAIEQPNTHLPETKPSP

SEQ ID NO: 6541 - protein, 1615 aa, Homo sapiens
MDNLTKVTEFLLMEFSGIWELQVLHAGLFLLIYLAVLVGNLLIIAVITLDQHLHTPMYFFLKNLSVLDLCYISVTVPKSIRNSLTRRSSISYLGCVAQVYFFSAFASAELAFLTVMSYDRYVAICHPLQYRAVMTSGGCYQMAVTTWLSCFSYAAVHTGNMFREHVCRSSVIHQFFRDIPHVLALVSCEVFFVEFLTLALSSCLVLGCFILMMISYFQIFSTVLRIPSGQSRAKAFSTCSPQLIVIMLFLTTGLFAALGPIAKALSIQDLVIALTYTVLPPFLNPIIYSLRNKEIKTAMWRLFVKIYFLQNTDSLQSIRGTSGDPPACGDSLQSLRQMSGDPPASRDSLQSIRGTSGDPPACGDSLQSLRRMSGDPPASRDSLKSLSRTSGDPPASTDSLQSIRGTSGDPPACRDSLQSLRWMSGDPPASRDSLQSIRGTSGDPPACGDSLQSLRWMSGDPPASRDSLQSLSRTSGDPPASVDSLQSLRQTSGDPPASGDSLQSLRQTSGDPPASTDSLHSLRRTSGDPPASADSLQNLRWTSGDPSASGDSLQSLRAMEQSNYSVYADFILLGLFSNARFPWLLFALILLVFLTSIASNVVKIILIHIDSRLHTPMYFLLSQLSLRDILYISTIVPKMLVDQVMSQRAISFAGCTAQHFLYLTLAGAEFFLLGLMSYDRYVAICNPLHYPVLMSRKICWLIVAAAWLGGSIDGFLLTPVTMQFPFCASREINHFFCEVPALLKLSCTDTSAYETAMYVCCIMMLLIPFSVISGSYTRILITVYRMSEAEGRGKAVATCSSHMVVVSLFYGAAMYTYVLPHSYHTPEQDKAVSAFYTILTPMLNPLIYSLRNKDVTGALQKVVGRMEWKTLPFQALQVRCVKWRRSVLVSSFIATERTLADTSHSSSHAEFPERGVRMNCSKLFSLVEEPVTSLGDLFNFRPRSLSWTMGMEGLLQNSTNFVLTGLITHPAFPGLLFAVVFSIFVVAITANLVMILLIHMDSRLHTPMYFLLSQLSIMDTIYICITVPKMLQDLLSKDKTISFLGCAVQIFYLTLIGGEFFLLGLMAYDRYVAVCNPLRYPLLMNRRVCLFMVVGSWVGGSLDGFMLTPVTMSFPFCRSREINHFFCEIPAVLKLSCTDTSLYETLMYACCVLMLLIPLSVISVSYTHILLTVHRMNSAEGRRKAFATCSSHIMVVSVFYGAAFYTNVLPHSYHTPEKDKVVSAFYTILTPMLNPLIYSLRNKDVAAALRKPLAWKLHPDGTLRSVTSTADLSHLDRVLLPPSWSLCLPVALGRSWAISMTNTSSSDFTLLGLLVNSEAAGIVFTVILAVFLGAVTANLVMIFLIQVDSRLHTPMYFLLSQLSIMDTLFICTTVPKLLADMVSKEKIISFVACGIQIFLYLTMIGSEFFLLGLMAYDCYVAVCNPLRYPVLMNRKKCLLLAAGAWFGGSLDGFLLTPITMNVPYCGSRSINHFFCEIPAVLKLACADTSLYETLMYICCVLMLLIPISIISTSYSLILLTIHRMPSAEGRKKAFTTCSSHLTVVSIFYGAAFYTYVLPQSFHTPEQDKVVSAFYTIVTPMLNPLIYSLRNKDVIGAFKKVFACCSSAQKVATSDA

SEQ ID NO: 6542 - protein, 1717 aa, Homo sapiens
MDNLTKVTEFLLMEFSGIWELQVLHAGLFLLIYLAVLVGNLLIIAVITLDQHLHTPMYFFLKNLSVLDLCYISVTVPKSIRNSLTRRSSISYLGCVAQVYFFSAFASAELAFLTVMSYDRYVAICHPLQYRAVMTSGGCYQMAVTTWLSCFSYAAVHTGNMFREHVCRSSVIHQFFRDIPHVLALVSCEVFFVEFLTLALSSCLVLGCFILMMISYFQIFSTVLRIPSGQSRAKAFSTCSPQLIVIMLFLTTGLFAALGPIAKALSIQDLVIALTYTVLPPFLNPIIYSLRNKEIKTAMWRLFVKIYFLQNASVSTPVLIFNVLIHTELFPGSEFLVTAGDYHHRHCHYFVRTPERESLGTWAVCHSQSYDPDVREANGPGWGKCASFLQLLDLKFMEVDSGPAIPDKAQMTPVPPEQSIRGTSGDPPACGDSLQSLRQMSGDPPASRDSLQSIRGTSGDPPACGDSLQSLRRMSGDPPASRDSLKSLSRTSGDPPASTDSLQSIRGTSGDPPACRDSLQSLRWMSGDPPASRDSLQSIRGTSGDPPACGDSLQSLRWMSGDPPASRDSLQSLSRTSGDPPASVDSLQSLRQTSGDPPASGDSLQSLRQTSGDPPASTDSLHSLRRTSGDPPASADSLQNLRWTSGDPSASGDSLQSLRAMEQSNYSVYADFILLGLFSNARFPWLLFALILLVFLTSIASNVVKIILIHIDSRLHTPMYFLLSQLSLRDILYISTIVPKMLVDQVMSQRAISFAGCTAQHFLYLTLAGAEFFLLGLMSYDRYVAICNPLHYPVLMSRKICWLIVAAAWLGGSIDGFLLTPVTMQFPFCASREINHFFCEVPALLKLSCTDTSAYETAMYVCCIMMLLIPFSVISGSYTRILITVYRMSEAEGRGKAVATCSSHMVVVSLFYGAAMYTYVLPHSYHTPEQDKAVSAFYTILTPMLNPLIYSLRNKDVTGALQKVVGRMEWKTLPFQALQVRCVKWRRSVLVSSFIATERTLADTSHSSSHAEFPERGVRMNCSKLFSLVEEPVTSLGDLFNFRPRSLSWTMGMEGLLQNSTNFVLTGLITHPAFPGLLFAVVFSIFVVAITANLVMILLIHMDSRLHTPMYFLLSQLSIMDTIYICITVPKMLQDLLSKDKTISFLGCAVQIFYLTLIGGEFFLLGLMAYDRYVAVCNPLRYPLLMNRRVCLFMVVGSWVGGSLDGFMLTPVTMSFPFCRSREINHFFCEIPAVLKLSCTDTSLYETLMYACCVLMLLIPLSVISVSYTHILLTVHRMNSAEGRRKAFATCSSHIMVVSVFYGAAFYTNVLPHSYHTPEKDKVVSAFYTILTPMLNPLIYSLRNKDVAAALRKPLAWKLHPDGTLRSVTSTADLSHLDRVLLPPSWSLCLPVALGRSWAISMTNTSSSDFTLLGLLVNSEAAGIVFTVILAVFLGAVTANLVMIFLIQVDSRLHTPMYFLLSQLSIMDTLFICTTVPKLLADMVSKEKIISFVACGIQIFLYLTMIGSEFFLLGLMAYDCYVAVCNPLRYPVLMNRKKCLLLAAGAWFGGSLDGFLLTPITMNVPYCGSRSINHFFCEIPAVLKLACADTSLYETLMYICCVLMLLIPISIISTSYSLILLTIHRMPSAEGRKKAFTTCSSHLTVVSIFYGAAFYTYVLPQSFHTPEQDKVVSAFYTIVTPMLNPLIYSLRNKDVIGAFKKVFACCSSAQKVATSDA

SEQ ID NO: 6543 - protein, 735 aa, Homo sapiens
MFYVNQIPFQLYHISFVYPTELWSRAIIPCMPTLSFWVCSATPVSPGFFALILLVFVTSIASNVVKIILIHIDSRLHTPMYFLLSQLSLRDILYISTIVPKMLVDQVMSQRAISFAGCTAQHFLYLTLAGAEFFLLGLMSCDRYVAICNPLHYPDLMSRKICWLIVAAAWLGGSIDGFLLTPVTMQFPFCASREINHFFCEVPALLKLSCTDTSAYETAMYVCCIMMLLIPFSVISGSYTRILITVYRMSEAEGRRKAVATCSSHMVVVSLFYGAAMYTYVLPHSYHTPEQDKAVSAFYTILTPMLNPLIYSLRNKDVTGALQKVVGRMEWKTLPFQALQVRCVKWRRSVLVSSFIATERTLADTSHSSSHAEFPERGVRMNCSKLFSLVEEPVTSLGDLFNFRPRSLSWTMGMEGLLQNSTNFVLTGLITHPAFPGLLFAIVFSIFVVAITANLVMILLIHMDSRLHTPMYFLLSQLSIMDTIYICITVPKMLQDLLSKDKTISFLGCAVQIFLYLTLIGGEFFLLGLMAYDRYVAVCNPLRYPLLMNRRVCLFMVVGSWVGGSLDGFMLTPVTMSFPFCRSREINHFFCEIPAVLKLSCTDTSLYETLMYACCVLMLLIPLSVISVSYTHILLTVHRMNSAEGRRKAFATCSSHIMVVSVFYGAAFYTNVLPHSYHTPEKDKVVSAFYTILTPMLNPLIYSLRNKDVAAALRKVLGRCGSSQSIRVATVIRKG

SEQ ID NO: 6544 - protein, 312 aa, Homo sapiens
MENGSYTSYFILLGLFNHTRAHQVLFMMVLSIVLTSLFGNSLMILLIHWDHRLHTPMYFLLSQLSLMDVMLVSTTVPKMAADYLTGSKAISRAGCGAQIFFLPTLGGGECFLLAAMAYDRYAAVCHPLRYPTLMSWQLCLRMNLSCWLLGAADGLLQAVATLSFPYCGAHEIDHFFCETPVLVRLACADTSVFENAMYICCVLMLLVPFSLILSSYGLILAAVLHMRSTEARKKAFATCSSHVAVVGLFYGAAIFTYMRPKSHRSTNHDKVVSAFYTMFTPLLNPLIYSVKNSEVKGALTRCMGRCVALSRE

SEQ ID NO: 6545 - protein, 678 aa, Homo sapiens
MACLMAAFSVGTAMNASSYSAEMTEPKSVCVSVDEVVSSNMEATETDLLNGHLKKVDNNLTEAQRFSSLPRRAAVNIEFRDLSYSVPEGPWWRKKGYKTLLKGISGKFNSGELVAIMGPSGAGKSTLMNILAGYRETGMKGAVLINGLPRDLRCFRKVSCYIMQDDMLLPHLTVQEAMMVSAHLKLQEKDEGRREMVKEILTALGLLSCANTRTGSLSGGQRKRLAIALELVNNPPVMFFDEPTSGLDSASCFQVVSLMKGLAQGGRSIICTIHQPSAKLFELFDQLYVLSQGQCVYRGKVCNLVPYLRDLGLNCPTYHNPADFVMEVASGEYGDQNSRLVRAVREGMCDSDHKRDLGGDAEVNPFLWHRPSEEVKQTKRLKGLRKDSSSMEGCHSFSASCLTQFCILFKRTFLSIMRDSVLTHLRITSHIGIGLLIGLLYLGIGNEAKKVLSNSGFLFFSMLFLMFAALMPTVLTFPLEMGVFLREHLNYWYSLKAYYLAKTMADVPFQIMFPVAYCSIVYWMTSQPSDAVRFVLFAALGTMTSLVAQSLGLLIGAASTSLQVATFVGPVTAIPVLLFSGFFVSFDTIPTYLQWMSYISYVRYGFEGVILSIYGLDREDLHCDIDETCHFQKSEAILRELDVENAKLYLDFIVLGIFFISLRLIAYFVLRYKIRAER

SEQ ID NO: 6546 - protein, 666 aa, Homo sapiens
MACLMAAFSVGTAMNASSYSAEMTEPKSVCVSVDEVVSSNMEATETDLLNGHLKKVDNNLTEAQRFSSLPRRAAVNIEFRDLSYSVPEGPWWRKKGYKTLLKGISGKFNSGELVAIMGPSGAGKSTLMNILAGYRETGMKGAVLINGLPRDLRCFRKVSCYIMQDDMLLPHLTVQEAMMVSAHLKLQEKDEGRREMVKEILTALGLLSCANTRTGSLSGGQRKRLAIALELVNNPPVMFFDEPTSGLDSASCFQVVSLMKGLAQGGRSIICTIHQPSAKLFELFDQLYVLSQGQCVYRGKVCNLVPYLRDLGLNCPTYHNPADFVMEVASGEYGDQNSRLVRAVREGMCDSDHKRDLGGDAEVNPFLWHRPSEEDSSSMEGCHSFSASCLTQFCILFKRTFLSIMRDSVLTHLRITSHIGIGLLIGLLYLGIGNEAKKVLSNSGFLFFSMLFLMFAALMPTVLTFPLEMGVFLREHLNYWYSLKAYYLAKTMADVPFQIMFPVAYCSIVYWMTSQPSDAVRFVLFAALGTMTSLVAQSLGLLIGAASTSLQVATFVGPVTAIPVLLFSGFFVSFDTIPTYLQWMSYISYVRYGFEGVILSIYGLDREDLHCDIDETCHFQKSEAILRELDVENAKLYLDFIVLGIFFISLRLIAYFVLRYKIRAER

SEQ ID NO: 6547 - protein, 298 aa, Homo sapiens
MKTLQSTLLLLLLVPLIKPAPPTQQDSRIIYDYGTDNFEESIFSQDYEDKYLDGKNIKEKETVIIPNEKSLQLQKDEAITPLPPKKENDEMPTCLLCVCLSGSVYCEEVDIDAVPPLPKESAYLYARFNKIKKLTAKDFADIPNLRRLDFTGNLIEDIEDGTFSKLSLLEELSLAENQLLKLPVLPPKLTLFNAKYNKIKSRGIKANAFKKLNNLTFLYLDHNALESVPLNLPESLRVIHLQFNNIASITDDTFCKANDTSYIRDRIEEIRLEGNPIVLGKHPNSFICLKRLPIGSYF

SEQ ID NO: 6548 - protein, 333 aa, Homo sapiens [sequence omitted]

SEQ ID NO: 6549 - protein, 583 aa, Homo sapiens
MESKGASSCRLLFCLLISATVFRPGLGWYTVNSAYGDTIIIPCRLDVPQNLMFGKWKYEKPDGSPVFIAFRSSTKKSVQYDDVPEYKDRLNLSENYTLSISNARISDEKRFVCMLVTEDNVFEAPTIVKVFKQPSKPEIVSKALFLETEQLKKLGDCISEDSYPDGNITWYRNGKVLHPLEGAVVIIFKKEMDPVTQLYTMTSTLEYKTTKADIQMPFTCSVTYYGPSGQKTIHSEQAVFDIYYPTEQVTIQVLPPKNAIKEGDNITLKCLGNGNPPPEEFLFYLPGQPEGIRSSNTYTLMDVRRNATGDYKCSLIDKKSMIASTAITVHYLDLSLNPSGEVTRQIGDALPVSCTISASRNATVVWMKDNIRLRSSPSFSSLHYQDAGNYVCETALQEVEGLKKRESLTLIVEGKPQIKMTKKTDPSGLSKTIICHVEGFPKPAIQWTITGSGSVINQTEESPYINGRYYSKIIISPEENVTLTCTAENQLERTVNSLNVSAISIPEHDEADEISDENREKVNDQAKLIVGIVVGLLLAALVAGVVYWLYMKKSKTASKHVNKDLGNMEENKKLEENNHKTEA

SEQ ID NO: 6550 - protein, 3122 aa, Homo sapiens
MPGAAGVLLLLLLSGGLGGVQAQRPQQQRQSQAHQQRGLFPAVLNLASNALITTNATCGEKGPEMYCKLVEHVPGQPVRNPQCRICNQNSSNPNQRHPITNAIDGKNTWWQSPSIKNGIEYHYVTITLDLQQVFQIAYVIVKAANSPRPGNWILERSLDDVEYKPWQYHAVTDTECLTLYNIYPRTGPPSYAKDDEVICTSFYSKIHPLENGEIHISLINGRPSADDPSPELLEFTSARYIRLRFQRIRTLNADLMMFAHKDPREIDPIVTRRYYYSVKDISVGGMCICYGHARACPLDPATNKSRCECEHNTCGDSCDQCCPGFHQKPWRAGTFLTKTECEACNCHGKAEECYYDENVARRNLSLNIRGKYIGGGVCINCTQNTAGINCETCTDGFFRPKGVSPNYPRPCQPCHCDPIGSLNEVCVKDEKHARRGLAPGSCHCKTGFGGVSCDRCARGYTGYPDCKACNCSGLGSKNEDPCFGPCICKENVEGGDCSRCKSGFFNLQEDNWKGCDECFCSGVSNRCQSSYWTYGKIQDMSGWYLTDLPGRIRVAPQQDDLDSPQQISISNAEARQALPHSYYWSAPAPYLGNKLPAVGGQLTFTISYDLEEEEEDTERVLQLMIILEGNDLSISTAQDEVYLHPSEEHTNVLLLKEESFTIHGTHFPVRRKEFMTVLANLKRVLLQITYSFGMDAIFRLSSVNLESAVSYPTDGSIAAAVEVCQCPPGYTGSSCESCWPRHRRVNGTIFGGICEPCQCFGHAESCDDVTGECLNCKDHTGGPYCDKCLPGFYGEPTKGTSEDCQPCACPLNIPSNNFSPTCHLDRSLGLICDGCPVGYTGPRCERCAEGYFGQPSVPGGSCQPCQCNDNLDFSIPGSCDSLSGSCLICKPGTTGRYCELCADGYFGDAVDAKNCQPCRCNAGGSFSEVCHSQTGQCECRANVQGQRCDKCKAGTFGLQSARGCVPCNCNSFGSKSFDCEESGQCWCQPGVTGKKCDRCAHGYFNFQEGGCTACECSHLGNNCDPKTGRCICPPNTIGEKCSKCAPNTWGHSITTGCKACNCSTVGSLDFQCNVNTGQCNCHPKFSGAKCTECSRGHWNYPRCNLCDCFLPGTDATTCDSETKKCSCSDQTGQCTCKVNVEGIHCDRCRPGKFGLDAKNPLGCSSCYCFGTTTQCSEAKGLIRTWVTLKAEQTILPLVDEALQHTTTKGIVFQHPEIVAHMDLMREDLHLEPFYWKLPEQFEGKKLMAYGGKLKYAIYFEAREETGFSTYNPQVIIRGGTPTHARIIVRHMAAPLIGQLTRHEIEMTEKEWKYYGDDPRVHRTVTREDFLDILYDIHYILIKATYGNFMRQSRISEISMEVAEQGRGTTMTPPADLIEKCDCPLGYSGLSCEACLPGFYRLRSQPGGRTPGPTLGTCVPCQCNGHSSLCDPETSICQNCQHHTAGDFCERCALGYYGIVKGLPNDCQQCACPLISSSNNFSPSCVAEGLDDYRCTACPRGYEGQYCERCAPGYTGSPGNPGGSCQECECDPYGSLPVPCDPVTGFCTCRPGATGRKCDGCKHWHAREGWECVFCGDECTGLLLGDLARLEQMVMSINLTGPLPAPYKMLYGLENMTQELKHLLSPQRAPERLIQLAEGNLNTLVTEMNELLTRATKVTADGEQTGQDAERTNTRAKSLGEFIKELARDAEAVNEKAIKLNETLGTRDEAFERNLEGLQKEIDQMIKELRRKNLETQKEIAEDELVAAEALLKKVKKLFGESRGENEEMEKDLREKLADYKNKVDDAWDLLREATDKIREANRLFAVNQKNMTALEKKKEAVESGKRQIENTLKEGNDILDEANRLADEINSIIDYVEDIQTKLPPMSEELNDKIDDLSQEIKDRKLAEKVSQAESHAAQLNDSSAVLDGILDEAKNISFNATAAFKAYSNIKDYIDEAEKVAKEAKDLAHEATKLATGPRGLLKEDAKGCLQKSFRILNEAKKLANDVKENEDHLNGLKTRIENADARNGDLLRTLNDTLGKLSAIPNDTAAKLQAVKDKARQANDTAKDVLAQITELHQNLDGLKKNYNKLADSVAKTNAVVKDPSKNKIIADADATVKNLEQEADRLIDKLKPIKELEDNLKKNISEIKELINQARKQANSIKVSVSSGGDCIRTYKPEIKKGSYNNIVVNVKTAVADNLLFYLGSAKFIDFLAIEMRKGKVSFLWDVGSGVGRVEYPDLTIDDSYWYRIVASRTGRNGTISVRALDGPKASIVPSTHHSTSPPGYTILDVDANAMLFVGGLTGKLKKADAVRVITFTGCMGETYFDNKPIGLWNFREKEGDCKGCTVSPQVEDSEGTIQFDGEGYALVSRPIRWYPNISTVMFKFRTFSSSALLMYLATRDLRDFMSVELTDGHIKVSYDLGSGMASVVSNQNHNDGKWKSFTLSRIQKQANISIVDIDTNQEENIATSSSGNNFGLDLKADDKIYFGGLPTLRNLSMKARPEVNLKKYSGCLKDIEISRTPYNILSSPDYVGVTKGCSLENVYTVSFPKPGFVELSPVPIDVGTEINLSFSTKNESGIILLGSGGTPAPPRRKRRQTGQAYYVILLNRGRLEVHLSTGARTMRKIVIRPEPNLFHDGREHSVHVERTRGIFTVQVDENRRYMQNLTVEQPIEVKKLFVGGAPPEFQPSPLRNIPPFEGCIWNLVINSVPMDFARPVSFKNADIGRCAHQKLREDEDGAAPAEIVIQPEPVPTPAFPTPTPVLTHGPCAAESEPALLIGSKQFGLSRNSHIAIAFDDTKVKNRLTIELEVRTEAESGLLFYMARINHADFATVQLRNGLPYFSYDLGSGDTHTMIPTKINDGQWHKIKIMRSKQEGILYVDGASNRTISPKKADILDVVGMLYVGGLPINYTTRRIGPVTYSIDGCVRNLHMAEAPADLEQPTSSFHVGTCFANAQRGTYFDGTGFAKAVGGFKVGLDLLVEFEFRTTTTTGVLLGISSQKMDGMGIEMIDEKLMFHVDNGAGRFTAVYDAGVPGHLCDGQWHKVTANKIKHRIELTVDGNQVEAQSPNPASTSADTNDPVFVGGFPDDLKQFGLTTSIPFRGCIRSLKLTKGTGKPLEVNFAKALELRGVQPVSCPAN

SEQ ID NO: 6551 - protein, 628 aa, Homo sapiens
MEPPDAPAQARGAPRLLLLAVLLAAHPDAQAEVRLSVPPLVEVMRGKSVILDCTPTGTHDHYMLEWFLTDRSGARPRLASAEMQGSELQVTMHDTRGRSPPYQLDSQGRLVLAEAQVGDERDYVCVVRAGAAGTAEATARLNVFAKPEATEVSPNKGTLSVMEDSAQEIATCNSRNGNPAPKITWYRNGQRLEVPVEMNPEGYMTSRTVREASGLLSLTSTLYLRLRKDDRDASFHCAAHYSLPEGRHGRLDSPTFHLTLHYPTEHVQFWVGSPSTPAGWVREGDTVQLLCRGDGSPSPEYTLFRLQDEQEEVLNVNLEGNLTLEGVTRGQSGTYGCRVEDYDAADDVQLSKTLELRVAYLDPLELSEGKVLSLPLNSSAVVNCSVHGLPTPALRWTKDSTPLGDGPMLSLSSITFDSNGTYVCEASLPTVPVLSRTQNFTLLVQGSPELKTAEIEPKADGSWREGDEVTLICSARGHPDPKLSWSQLGGSPAEPIPGRQGWVSSSLTLKVTSALSRDGISCEASNPHGNKRHVFHFGTVSPQTSQAGVAVMAVAVSVGLLLLVVAVFYCVRRKGGPCCRQRREKGAPPPGEPGLSHSGSEQPEQTGLLMGGASGGARGGSGGFGDEC

SEQ ID NO: 6552 - protein, 628 aa, Homo sapiens
MEPPDAPAQARGAPRLLLLAVLLAAHPDAQAEVRLSVPPLVEVMRGKSVILDCTPTGTHDHYMLEWFLTDRSGARPRLASAEMQGSELQVTMHDTRGRSPPYQLDSQGRLVLAEAQVGDERDYVCVVRAGAAGTAEATARLNVFAKPEATEVSPNKGTLSVMEDSAQEIATCNSRNGNPAPKITWYRNGQRLEVPVEMNPEGYMTSRTVREASGLLSLTSTLYLRLRKDDRDASFHCAAHYSLPEGRHGRLDSPTFHLTLHYPTEHVQFWVGSPSTPAGWVREGDTVQLLCRGDGSPSPEYTLFRLQDEQEEVLNVNLEGNLTLEGVTRGQSGTYGCRVEDYDAADDVQLSKTLELRVAYLDPLELSEGKVLSLPLNSSAVVNCSVHGLPTPALRWTKDSTPLGDGPMLSLSSITFDSNGTYVCEASLPTVPVLSRTQNFTLLVQGSPELKTAEIEPKADGSWREGDEVTLICSARGHPDPKLSWSQLGGSPAEPIPGRQGWVSSSLTLKVTSALSRDGISCEASNPHGNKRHVFHFGAVSPQTSQAGVAVMAVAVSVGLLLLVVAVFYCVRRKGGPCCRQRREKGAPPPGEPGLSHSGSEQPEQTGLLMGGASGGARGGSGGFGDEC

SEQ ID NO: 6553 - protein, 4391 aa, Homo sapiens
MGWRAPGALLLALLLHGRLLAVTHGLRAYDGLSLPEDIETVTASQMRWTHSYLSDDEDMLADSISGDDLGSGDLGSGDFQMVYFRALVNFTRSIEYSPQLEDAGSREFREVSEAVVDTLESEYLKIPGDQVVSVVFIKELDGWVFVELDVGSEGNADGAQIQEMLLRVISSGSVASYVTSPQGFQFRRLGTVPQFPRACTEAEFACHSYNECVALEYRCDRRPDCRDMSDELNCEEPVLGISPTFSLLVETTSLPPRPETTIMRQPPVTHAPQPLLPGSVRPLPCGPQEAACRNGHCIPRDYLCDGQEDCEDGSDELDCGPPPPCEPNEFPCGNGHCALKLWRCDGDFDCEDRTDEANCPTKRPEEVCGPTQFRCVSTNMCIPASFHCDEESDCPDRSDEFGCMPPQVVTPPRESIQASRGQTVTFTCVAIGVPTPIINWRLNWGHIPSHPRVTVTSEGGRGTLIIRDVKESDQGAYTCEAMNARGMVFGIPDGVLELVPQRGPCPDGHFYLEHSAACLPCFCFGITSVCQSTRRFRDQIRLRFDQPDDFKGVNVTMPAQPGTPPLSSTQLQIDPSLHEFQLVDLSRRFLVHDSFWALPEQFLGNKVDSYGGSLRYNVRYELARGMLEPVQRPDVVLVGAGYRLLSRGHTPTQPGALNQRQVQFSEEHWVHESGRPVQRAELLQVLQSLEAVLIQTVYNTKMASVGLSDIAMDTTVTHATSHGRAHSVEECRCPIGYSGLSCESCDAHFTRVPGGPYLGTCSGCSCNGHASSCDPVYGHCLNCQHNTEGPQCNKCKAGFFGDAMKATATSCRPCPCPYIDASRRFSDTCFLDTDGQATCDACAPGYTGRRCESCAPGYEGNPIQPGGKCRPVNQEIVRCDERGSMGTSGEACRCKNNVVGRLCNECADGSFHLSTRNPDGCLKCFCMGVSRHCTSSSWSRAQLHGASEEPGHFSLTNAASTHTTNEGIFSPTPGELGFSSFHRLLSGPYFWSLPSRFLGDKVTSYGGELRFTVTQRSQPGSTPLHGQPLVVLQGNNIILEHHVAQEPSPGQPSTFIVPFREQAWQRPDGQPATREHLLMALAGIDTLLIRASYAQQPAESRVSGISMDVAVPEETGQDPALEVEQCSCPPGYRGPSCQDCDTGYTRTPSGLYLGTCERCSCHGHSEACEPETGACQGCQHHTEGPRCEQCQPGYYGDAQRGTPQDCQLCPCYGDPAAGQAAHTCFLDTDGHPTCDACSPGHSGRHCERCAPGYYGNPSQGQPCQRDSQVPGPIGCNCDPQGSVSSQCDAAGQCQCKAQVEGLTCSHCRPHHFHLSASNPDGCLPCFCMGITQQCASSAYTRHLISTHFAPGDFQGFALVNPQRNSRLTGEFTVEPVPEGAQLSFGNFAQLGHESFYWQLPETYQGDKVAAYGGKLRYTLSYTAGPQGSPLSDPDVQITGNNIMLVASQPALQGPERRSYEIMFREEFWRRPDGQPATREHLLMALADLDELLIRATFSSVPLVASISAVSLEVAQPGPSNRPRALEVEECRCPPGYIGLSCQDCAPGYTRTGSGLYLGHCELCECNGHSDLCHPETGACSQCQHNAAGEFCELCAPGYYGDATAGTPEDCQPCACPLTNPENMFSRTCESLGAGGYRCTACEPGYTGQYCEQCGPGYVGNPSVQGGQCLPETNQAPLVVEVHPARSIVPQGGSHSLRCQVSGSPPHYFYWSREDGRPVPSGTQQRHQGSELHFPSVQPSDAGVYICTCRNLHQSNTSRAELLVTEAPSKPITVTVEEQRSQSVRPGADVTFICTAKSKSPAYTLVWTRLHNGKLPTRAMDFNGILTIRNVQLSDAGTYVCTGSNMFAMDQGTATLHVQASGTLSAPVVSIHPPQLTVQPGQLAEFRCSATGSPTPTLEWTGGPGGQLPAKAQIHGGILRLPAVEPTDQAQYLCRAHSSAGQQVARAVLHVHGGGGPRVQVSPERTQVHAGRTVRLYCRAAGVPSATITWRKEGGSLPPQARSERTDIATLLIPAITTADAGFYLCVATSPAGTAQARIQVVVLSASDASPPPVKIESSSPSVTEGQTLDLNCVVAGSAHAQVTWYRRGGSLPPHTQVHGSRLRLPQVSPADSGEYVCRVENGSGPKEASITVSVLHGTHSGPSYTPVPGSTRPIRIEPSSSHVAEGQTLDLNCVVPGQAHAQVTWHKRGGSLPARHQTHGSLLRLHQVTPADSGEYVCHVVGTSGPLEASVLVTIEASVIPGPIPPVRIESSSSTVAEGQTLDLSCVVAGQAHAQVTWYKRGGSLPARHQVRGSRLYIFQASPADAGQYVCRASNGMEASITVTVTGTQGANLAYPAGSTQPIRIEPSSSQVAEGQTLDLNCVVPGQSHAQVTWHKRGGSLPVRHQTHGSLLRLYQASPADSGEYVCRVLGSSVPLEASVLVTIEPAGSVPALGVTPTVRIESSSSQVAEGQTLDLNCLVAGQAHAQVTWHKRGGSLPARHQVHGSRLRLLQVTPADSGEYVCRVVGSSGTQEASVLVTIQQRLSGSHSQGVAYPVRIESSSASLANGHTLDLNCLVASQAPHTITWYKRGGSLPSRHQIVGSRLRIPQVTPADSGEYVCHVSNGAGSRETSLIVTIQGSGSSHVPSVSPPIRIESSSPTVVEGQTLDLNCVVARQPQAIITWYKRGGSLPSRHQTHGSHLRLHQMSVADSGEYVCRANNNIDALEASIVISVSPSAGSPSAPGSSMPIRIESSSSHVAEGETLDLNCVVPGQAHAQVTWHKRGGSLPSHHQTRGSRLRLHHVSPADSGEYVCRVMGSSGPLEASVLVTIEASGSSAVHVPAPGGAPPIRIEPSSSRVAEGQTLDLKCVVPGQAHAQVTWHKRGGNLPARHQVHGPLLRLNQVSPADSGEYSCQVTGSSGTLEASVLVTIEPSSPGPIPAPGLAQPIYIEASSSHVTEGQTLDLNCVVPGQAHAQVTWYKRGGSLPARHQTHGSQLRLHLVSPADSGEYVCRAASGPGPEQEASFTVTVPPSEGSSYRLRSPVISIDPPSSTVQQGQDASFKCLIHDGAAPISLEWKTRNQELEDNVHISPNGSIITIVGTRPSNHGTYRCVASNAYGVAQSVVNLSVHGPPTVSVLPEGPVWVKVGKAVTLECVSAGEPRSSARWTRISSTPAKLEQRTYGLMDSHAVLQISSAKPSDAGTYVCLAQNALGTAQKQVEVIVDTGAMAPGAPQVQAEEAELTVEAGHTATLRCSATGSPAPTIHWSKLRSPLPWQHRLEGDTLIIPRVAQQDSGQYICNATSPAGHAEATIILHVESPPYATTVPEHASVQAGETVQLQCLAHGTPPLTFQWSRVGSSLPGRATARNELLHFERAAPEDSGRYRCRVTNKVGSAEAFAQLLVQGPPGSLPATSIPAGSTPTVQVTPQLETKSIGASVEFHCAVPSDRGTQLRWFKEGGQLPPGHSVQDGVLRIQNLDQSCQGTYICQAHGPWGKAQASAQLVIQALPSVLINIRTSVQTVVVGHAVEFECLALGDPKPQVTWSKVGGHLRPGIVQSGGVVRIAHVELADAGQYRCTATNAAGTTQSHVLLLVQALPQISMPQEVRVPAGSAAVFPCIASGYPTPDISWSKLDGSLPPDSRLENNMLMLPSVRPQDAGTYVCTATNRQGKVKAFAHLQVPERVVPYFTQTPYSFLPLPTIKDAYRKFEIKITFRPDSADGMLLYNGQKRVPGSPTNLANRQPDFISFGLVGGRPEFRFDAGSGMATIRHPTPLALGHFHTVTLLRSLTQGSLIVGDLAPVNGTSQGKFQGLDLNEELYLGGYPDYGAIPKAGLSSGFIGCVRELRIQGEEIVFHDLNLTAHGISHCPTCRDRPCQNGGQCHDSESSSYVCVCPAGFTGSRCEHSQALHCHPEACGPDATCVNRPDGRGYTCRCHLGRSGLRCEEGVTVTTPSLSGAGSYLALPALTNTHHELRLDVEFKPLAPDGVLLFSGGKSGPVEDFVSLAMVGGHLEFRYELGSGLAVLRSAEPLALGRWHRVSAERLNKDGSLRVNGGRPVLRSSPGKSQGLNLHTLLYLGGVEPSVPLSPATNMSAHFRGCVGEVSVNGKRLDLTYSFLGSQGIGQCYDSSPCERQPCQHGATCMPAGEYEFQCLCRDGFKGDLCEHEENPCQLREPCLHGGTCQGTRCLCLPGFSGPRCQQGSGHGIAESDWHLEGSGGNDAPGQYGAYFHDDGFLAFPGHVFSRSLPEVPETIELEVRTSTASGLLLWQGVEVGEAGQGKDFISLGLQDGHLVFRYQLGSGEARLVSEDPINDGEWHRVTALREGRRGSIQVDGEELVSGRSPGPNVAVNAKGSVYIGGAPDVATLTGGRFSSGITGCVKNLVLHSARPGAPPPQPLDLQHRAQAGANTRPCPS

SEQ ID NO: 6554 - protein, 316 aa, Homo sapiens
MLRRRGSPGMGVHVGAALGALWFCLTGALEVQVPEDPVVALVGTDATLCCSFSPEPGFSLAQLNLIWQLTDTKQLVHSFAEGQDQGSAYANRTALFPDLLAQGNASLRLQRVRVADEGSFTCFVSIRDFGSAAVSLQVAAPYSKPSMTLEPNKDLRPGDTVTITCSSYRGYPEAEVFWQDGQGVPLTGNVTTSQMANEQGLFDVHSVLRVVLGANGTYSCLVRNPVLQQDAHGSVTITGQPMTFPPEALWVTVGLSVCLIALLVALAFVCWRKIKQSCEEENAGAEDQDGEGEGSKTALQPLKHSDSKEDDGQEIA

SEQ ID NO: 6555 - protein, 388 aa, Homo sapiens
MTLEPNKDLRPGDTVTITCSSYQGYPEAEVFWQDGQGVPLTGNVTTSQMANEQGLFDVHSILRVVLGANGTYSCLVRNPVLQQDAHSSVTITPQRSPTGAVEVQVPEDPVVALVGTDATLRCSFSPEPGFSLAQLNLIWQLTDTKQLVHSFTEGRDQGSAYANRTALFPDLLAQGNASLRLQRVRVADEGSFTCFVSIRDFGSAAVSLQVAAPYSKPSMTLEPNKDLRPGDTVTITCSSYRGYPEAEVFWQDGQGVPLTGNVTTSQMANEQGLFDVHSVLRVVLGANGTYSCLVRNPVLQQDAHGSVTITGQPMTFPPEALWVTVGLSVCLIALLVALAFVCWRKIKQSCEEENAGAEDQDGEGEGSKTALQPLKHSDSKEDDGQEIA

SEQ ID NO: 6556 - protein, 750 aa, Homo sapiens
MWNLLHETDSAVATARRPRWLCAGALVLAGGFFLLGFLFGWFIKSSNEATNITPKHNMKAFLDELKAENIKKFLYNFTQIPHLAGTEQNFQLAKQIQSQWKEFGLDSVELAHYDVLLSYPNKTHPNYISIINEDGNEIFNTSLFEPPPPGYENVSDIVPPFSAFSPQGMPEGDLVYVNYARTEDFFKLERDMKINCSGKIVIARYGKVFRGNKVKNAQLAGAKGVILYSDPADYFAPGVKSYPDGWNLPGGGVQRGNILNLNGAGDPLTPGYPANEYAYRRGIAEAVGLPSIPVHPIGYYDAQKLLEKMGGSAPPDSSWRGSLKVPYNVGPGFTGNFSTQKVKMHIHSTNEVTRIYNVIGTLRGAVEPDRYVILGGHRDSWVFGGIDPQSGAAVVHEIVRSFGTLKKEGWRPRRTILFASWDAEEFGLLGSTEWAEENSRLLQERGVAYINADSSIEGNYTLRVDCTPLMYSLVHNLTKELKSPDEGFEGKSLYESWTKKSPSPEFSGMPRISKLGSGNDFEVFFQRLGIASGRARYTKNWETNKFSGYPLYHSVYETYELVEKFYDPMFKYHLTVAQVRGGMVFELANSIVLPFDCRDYAVVLRKYADKIYSISMKHPQEMKTYSVSFDSLFSAVKNFTEIASKFSERLQDFDKSNPIVLRMMNDQLMFLERAFIDPLGLPDRPFYRHVIYAPSSHNKYAGESFPGIYDALFDIESKVDPSKAWGEVKRQIYVAAFTVQAAAETLSEVA

SEQ ID NO: 6557 - protein, 693 aa, Homo sapiens
MKAFLDELKAENIKKFLYNFTQIPHLAGTEQNFQLAKQIQSQWKEFGLDSVELAHYDVLLSYPNKTHPNYISIINEDGNEIFNTSLFEPPPPGYENVSDIVPPFSAFSPQGMPEGDLVYVNYARTEDFFKLERDMKINCSGKIVIARYGKVFRGNKVKNAQLAGAKGVILYSDPADYFAPGVKSYPDGWNLPGGGVQRGNILNLNGAGDPLTPGYPANEYAYRRGIAEAVGLPSIPVHPIGYYDAQKLLEKMGGSAPPDSSWRGSLKVPYNVGPGFTGNFSTQKVKMHIHSTNEVTRIYNVIGTLRGAVEPDRYVILGGHRDSWVFGGIDPQSGAAVVHEIVRSFGTLKKEGWRPRRTILFASWDAEEFGLLGSTEWAEENSRLLQERGVAYINADSSIEGNYTLRVDCTPLMYSLVHNLTKELKSPDEGFEGKSLYESWTKKSPSPEFSGMPRISKLGSGNDFEVFFQRLGIASGRARYTKNWETNKFSGYPLYHSVYETYELVEKFYDPMFKYHLTVAQVRGGMVFELANSIVLPFDCRDYAVVLRKYADKIYSISMKHPQEMKTYSVSFDSLFSAVKNFTEIASKFSERLQDFDKSNPIVLRMMNDQLMFLERAFIDPLGLPDRPFYRHVIYAPSSHNKYAGESFPGIYDALFDIESKVDPSKAWGEVKRQIYVAAFTVQAAAETLSEVA

SEQ ID NO: 6558 - protein, 243 aa, Homo sapiens
MWNLLHETDSAVATARRPRWLCAGALVLAGGFFLLGFLFGWFIKSSNEATNITPKHNMKAFLDELKAENIKKFLYNFTQIPHLAGTEQNFQLAKQIQSQWKEFGLDSVELAHYDVLLSYPNKTHPNYISIINEDGNEIFNTSLFEPPPPGYENVSDIVPPFSAFSPQGMPEGDLVYVNYARTEDFFKLERDMKINCSGKIVIARYGKVFRGNKNMLIGVELQRLLVFQVFLFIQLDTMMHRSS

SEQ ID NO: 6559 - protein, 718 aa, Homo sapiens
MWNLLHETDSAVATARRPRWLCAGALVLAGGFFLLGFLFGWFIKSSNEATNITPKHNMKAFLDELKAENIKKFLYNFTQIPHLAGTEQNFQLAKQIQSQWKEFGLDSVELAHYDVLLSYPNKTHPNYISIINEDGNEIFNTSLFEPPPPGYENVSDIVPPFSAFSPQGMPEGDLVYVNYARTEDFFKLERDMKINCSGKIVIARYGKVFRGNKVKNAQLAGAKGVILYSDPADYFAPGVKSYPDGWNLPGGGVQRGNILNLNGAGDPLTPGYPANEYAYRRGIAEAVGLPSIPVHPIGYYDAQKLLEKMGGSAPPDSSWRGSLKVPYNVGPGFTGNFSTQKVKMHIHSTNEVTRIYNVIGTLRGAVEPDRYVILGGHRDSWVFGGIDPQSGAAVVHEIVRSFGTLKKEGWRPRRTILFASWDAEEFGLLGSTEWAEENSRLLQERGVAYINADSSIEGNYTLRVDCTPLMYSLVHNLTKELKSPDEGFEGKSLYESWTKKSPSPEFSGMPRISKLGSGNDFEVFFQRLGIASGRARYTKNWETNKFSGYPLYHSVYETYELVEKFYDPMFKYHLTVAQVRGGMVFELANSIVLPFDCRDYAVVLRKYADKIYSISMKHPQEMKTYSVSFDSLFSAVKNFTEIASKFSERLQDFDKSHVIYAPSSHNKYAGESFPGIYDALFDIESKVDPSKAWGEVKRQIYVAAFTVQAAAETLSEVA

SEQ ID NO: 6560 - protein, 695 aa, Homo sapiens
MWNLLHETDSAVATARRPRWLCAGALVLAGGFFLLGFLFGWFIKSSNEATNITPKHNMKAFLDELKAENIKKFLYNFTQIPHLAGTEQNFQLAKQIQSQWKEFGLDSVELAHYDVLLSYPNKTHPNYISIINEDGNEIFNTSLFEPPPPGYENVSDIVPPFSAFSPQGMPEGDLVYVNYARTEDFFKLERDMKINCSGKIVIARYGKVFRGNKVKNAQLAGAKGVILYSDPADYFAPGVKSYPDGWNLPGGGVQRGNILNLNGAGDPLTPGYPANEYAYRRGIAEAVGLPSIPVHPIGYYDAQKLLEKMGGSAPPDSSWRGSLKVPYNVGPGFTGNFSTQKVKMHIHSTNEVTRIYNVIGTLRGAVEPDRYVILGGHRDSWVFGGIDPQSGAAVVHEIVRSFGTLKKEGWRPRRTILFASWDAEEFGLLGSTEWAEENSRLLQERGVAYINADSSIEGNYTLRVDCTPLMYSLVHNLTKELKSPDEGFEGKSLYESWTKKSPSPEFSGMPRISKLGSGNDFEVFFQRLGIASGRARYTKNWETNKFSGYPLYHSVYETYELVEKFYDPMFKYHLTVAQVRGGMVFELANSIVLPFDCRDYAVVLRKYADKIYSISMKHPQEMKTYSVSFDSLFSAVKNFTEIASKFSERLQDFDKSMSSMLQAATTSMQGSHSQEFMMLCLILKAKWTLPRPGEK

SEQ ID NO: 6561 - protein, 233 aa, Homo sapiens
MRPQQLHATEITSSGFRLAWPPLLTADSGYYVLELVPSAQPGAARRQQLPGNATDWIWAGLDPDTDYDVALVPESNVRLLRPQILRVRTRPGEAGPGASGPESGAGPAPTQLAALPAPEEAGPERIVISHARPRSLRVSWAPALGSAAALGYHVQFGPLRGGEAQRVEVPAGRNCTTLQGLAPGTAYLVTVTAAFRSGRESALSAKACTPDGPRPRPRPVPRAPTPGTASREP

SEQ ID NO: 6562 - protein, 445 aa, Homo sapiens
MLPWTALGLALSLRLALARSGAERGPPASAPRGDLMFLLDSSASVSHYEFSRVREFVGQLVAPLPLGTGALRASLVHVGSRPYTEFPFGQHSSGEAAQDAVRASAQRMGDTHTGLALVYAKEQLFAEASGARPGVPKVLVWVTDGGSSDPVGPPMQELKDLGVTVFIVSTGRGNFLELSAAASAPAEKHLHFVDVDDLHIIVQELRGSILDAMRPQQLHATEITSSGFRLAWPPLLTADSGYYVLELVPSAQPGAARRQQLPGNATDWIWAGLDPDTDYDVALVPESNVRLLRPQILRVRTRPGEAGPGASGPESGAGPAPTQLAALPAPEEAGPERIVISHARPRSLRVSWAPALGSAAALGYHVQFGPLRGGEAQRVEVPAGRNCTTLQGLAPGTAYLVTVTAAFRSGRESALSAKACTPDGPRPRPRPVPRAPTPGTASREP

SEQ ID NO: 6563 - protein, 437 aa, Homo sapiens [sequence omitted]

SEQ ID NO: 6564 - protein, 437 aa, Homo sapiens
MSAVLLLALLGFILPLPGVQALLCQFGTVQHVWKVSDLPRQWTPKNTSCDSGLGCQDTLMLIESGPQVSLVLSKGCTEAKDQEPRVTEHRMGPGLSLISYTFVCRQEDFCNNLVNSLPLWAPQPPADPGSLRCPVCLSMEGCLEGTTEEICPKGTTHCYDGLLRLRGGGIFSNLRVQGCMPQPGCNLLNGTQEIGPVGMTENCNRKDFLTCHRGTTIMTHGNLAQEPTDWTTSNTEMCEVGQVCQETLLLIDVGLTSTLVGTKGCSTVGAQNSQKTTIHSAPPGVLVASYTHFCSSDLCNSASSSSVLLNSLPPQAAPVPGDRQCPTCVQPLGTCSSGSPRMTCPRGATHCYDGYIHLSGGGLSTKMSIQGCVAQPSSFLLNHTRQIGIFSAREKRDVQPPASQHEGGGAEGLESLTWGVGLALAPALWWGVVCPSC

SEQ ID NO: 6565 - protein, 853 aa, Homo sapiens
MGTPRAQHPPPPQLLFLILLSCPWIQGLPLKEEEILPEPGSETPTVASEALAELLHGALLRRGPEMGYLPGPPLGPEGGEEETTTTIITTTTVTTTVTSPVLCNNNISEGEGYVESPDLGSPVSRTLGLLDCTYSIHVYPGYGIEIQVQTLNLSQEEELLVLAGGGSPGLAPRLLANSSMLGEGQVLRSPTNRLLLHFQSPRVPRGGGFRIHYQAYLLSCGFPPRPAHGDVSVTDLHPGGTATFHCDSGYQLQGEETLICLNGTRPSWNGETPSCMASCGGTIHNATLGRIVSPEPGGAVGPNLTCRWVIEAAEGRRLHLHFERVSLDEDNDRLMVRSGGSPLSPVIYDSDMDDVPERGLISDAQSLYVELLSETPANPLLLSLRFEAFEEDRCFAPFLAHGNVTTTDPEYRPGALATFSCLPGYALEPPGPPNAIECVDPTEPHWNDTEPACKAMCGGELSEPAGVVLSPDWPQSYSPGQDCVWGVHVQEEKRILLQVEILNVREGDMLTLFDGDGPSARVLAQLRGPQPRRRLLSSGPDLTLQFQAPPGPPNPGLGQGFVLHFKEVPRNDTCPELPPPEWGWRTASHGDLIRGTVLTYQCEPGYELLGSDILTCQWDLSWSAAPPACQKIMTCADPGEIANGHRTASDAGFPVGSHVQYRCLPGYSLEGAAMLTCYSRDTGTPKWSDRVPKCALKYEPCLNPGVPENGYQTLYKHHYQAGESLRFFCYEGFELIGEVTITCVPGHPSQWTSQPPLCKVAYEELLDNRKLEVTQTTDPSRQLEGGNLALAILLPLGLVIVLGSGVYIYYTKLQGKSLFGFSGSHSYSPITVESDFSNPLYEAGDTREYEVSI

SEQ ID NO: 6566 - protein, 840 aa, Homo sapiens
MGTPRAQHPPPPQLLFLILLSCPWIQGLPLKEEEILPEPGSETPTVASEALAELLHGALLRRGPEMGYLPGPPLGPEGGEEETTTTIITTTTVTTTVTSPVLCNNNISEGEGYVESPDLGSPVSRTLGLLDCTYSIHVYPGYGIEIQVQTLNLSQEEELLVLAGGGSPGLAPRLLANSSMLGEGQVLRSPTNRLLLHFQSPRVPRGGGFRIHYQAYLLSCGFPPRPAHGDVSVTDLHPGGTATFHCDSGYQLQGEETLICLNGTRPSWNGETPSCMASCGGTIHNATLGRIVSPEPGGAVGPNLTCRWVIEAAEGRRLHLHFERVSLDEDNDRLMVRSGGSPLSPVIYDSDMDDVPERGLISDAQSLYVELLSETPANPLLLSLRFEAFEEDRCFAPFLAHGNVTTTDPEYRPGALATFSCLPGYALEPPGPPNAIECVDPTEPHWNDTEPACKAMCGGELSEPAGVVLSPDWPQSYSPGQDCVWGVHVQEEKRILLQVEILNVREGDMLTLFDGDGPSARVLAQLRGPQPRRRLLSSGPDLTLQFQAPPGPPNPGLGQGFVLHFKEVPRNDTCPELPPPEWGWRTASHGDLIRGTVLTYQCEPGYELLGSDILTCQWDLSWSAAPPACQKIMTCADPGEIANGHRTASDAGFPVGSHVQYRCLPGYSLEGAAMLTCYSRDTGTPKWSDRVPKCALKYEPCLNPGVPENGYQTLYKHHYQAGESLRFFCYEGFELIGEVTITCVPGHPSQWTSQPPLCKVTQTTDPSRQLEGGNLALAILLPLGLVIVLGSGVYIYYTKLQGKSLFGFSGSHSYSPITVESDFSNPLYEAGDTREYEVSI

SEQ ID NO: 6567 - protein, 1304 aa, Homo sapiens
MYLWLKLLAFGFAFLDTEVFVTGQSPTPSPTGLTTAKMPSVPLSSDPLPTHTTAFSPASTFERENDFSETTTSLSPDNTSTQVSPDSLDNASAFNTTGVSSVQTPHLPTHADSQTPSAGTDTQTFSGSAANAKLNPTPGSNAISDVPGERSTASTFPTDPVSPLTTTLSLAHHSSAALPARTSNTTITANTSDAYLNASETTTLSPSGSAVISTTTIATTPSKPTCDEKYANITVDYLYNKETKLFTAKLNVNENVECGNNTCTNNEVHNLTECKNASVSISHNSCTAPDKTLILDVPPGVEKFQLHDCTQVEKADTTICLKWKNIETFTCDTQNITYRFQCGNMIFDNKEIKLENLEPEHEYKCDSEILYNNHKFTNASKIIKTDFGSPGEPQIIFCRSEAAHQGVITWNPPQRSFHNFTLCYIKETEKDCLNLDKNLIKYDLQNLKPYTKYVLSLHAYIIAKVQRNGSAAMCHFTTKSAPPSQVWNMTVSMTSDNSMHVKCRPPRDRNGPHERYHLEVEAGNTLVRNESHKNCDFRVKDLQYSTDYTFKAYFHNGDYPGEPFILHHSTSYNSKALIAFLAFLIIVTSIALLVVLYKIYDLHKKRSCNLDEQQELVERDDEKQLMNVEPIHADILLETYKRKIADEGRLFLAEFQSIPRVFSKFPIKEARKPFNQNKNRYVDILPYDYNRVELSEINGDAGSNYINASYIDGFKEPRKYIAAQGPRDETVDDFWRMIWEQKATVIVMVTRCEEGNRNKCAEYWPSMEEGTRAFGDVVVKINQHKRCPDYIIQKLNIVNKKEKATGREVTHIQFTSWPDHGVPEDPHLLLKLRRRVNAFSNFFSGPIVVHCSAGVGRTGTYIGIDAMLEGLEAENKVDVYGYVVKLRRQRCLMVQVEAQYILIHQALVEYNQFGETEVNLSELHPYLHNMKKRDPPSEPSPLEAEFQRLPSYRSWRTQHIGNQEENKSKNRNSNVIPYDYNRVPLKHELEMSKESEHDSDESSDDDSDSEEPSKYINASFIMSYWKPEVMIAAQGPLKETIGDFWQMIFQRKVKVIVMLTELKHGDQEICAQYWGEGKQTYGDIEVDLKDTDKSSTYTLRVFELRHSKRKDSRTVYQYQYTNWSVEQLPAEPKELISMIQVVKQKLPQKNSSEGNKHHKSTPLLIHCRDGSQQTGIFCALLNLLESAETEEVVDIFQVVKALRKARPGMVSTFEQYQFLYDVIASTYPAQNGQVKKNNHQEDKIEFDNEVDKVKQDANCVNPLGAPEKLPEAKEQAEGSEPTSGTEGPEHSVNGPASPALNQGS

SEQ ID NO: 6568 - protein, 1143 aa, Homo sapiens
MYLWLKLLAFGFAFLDTEVFVTGQSPTPSPTDAYLNASETTTLSPSGSAVISTTTIATTPSKPTCDEKYANITVDYLYNKETKLFTAKLNVNENVECGNNTCTNNEVHNLTECKNASVSISHNSCTAPDKTLILDVPPGVEKFQLHDCTQVEKADTTICLKWKNIETFTCDTQNITYRFQCGNMIFDNKEIKLENLEPEHEYKCDSEILYNNHKFTNASKIIKTDFGSPGEPQIIFCRSEAAHQGVITWNPPQRSFHNFTLCYIKETEKDCLNLDKNLIKYDLQNLKPYTKYVLSLHAYIIAKVQRNGSAAMCHFTTKSAPPSQVWNMTVSMTSDNSMHVKCRPPRDRNGPHERYHLEVEAGNTLVRNESHKNCDFRVKDLQYSTDYTFKAYFHNGDYPGEPFILHHSTSYNSKALIAFLAFLIIVTSIALLVVLYKIYDLHKKRSCNLDEQQELVERDDEKQLMNVEPIHADILLETYKRKIADEGRLFLAEFQSIPRVFSKFPIKEARKPFNQNKNRYVDILPYDYNRVELSEINGDAGSNYINASYIDGFKEPRKYIAAQGPRDETVDDFWRMIWEQKATVIVMVTRCEEGNRNKCAEYWPSMEEGTRAFGDVVVKINQHKRCPDYIIQKLNIVNKKEKATGREVTHIQFTSWPDHGVPEDPHLLLKLRRRVNAFSNFFSGPIVVHCSAGVGRTGTYIGIDAMLEGLEAENKVDVYGYVVKLRRQRCLMVQVEAQYILIHQALVEYNQFGETEVNLSELHPYLHNMKKRDPPSEPSPLEAEFQRLPSYRSWRTQHIGNQEENKSKNRNSNVIPYDYNRVPLKHELEMSKESEHDSDESSDDDSDSEEPSKYINASFIMSYWKPEVMIAAQGPLKETIGDFWQMIFQRKVKVIVMLTELKHGDQEICAQYWGEGKQTYGDIEVDLKDTDKSSTYTLRVFELRHSKRKDSRTVYQYQYTNWSVEQLPAEPKELISMIQVVKQKLPQKNSSEGNKHHKSTPLLIHCRDGSQQTGIFCALLNLLESAETEEVVDIFQVVKALRKARPGMVSTFEQYQFLYDVIASTYPAQNGQVKKNNHQEDKIEFDNEVDKVKQDANCVNPLGAPEKLPEAKEQAEGSEPTSGTEGPEHSVNGPASPALNQGS

SEQ ID NO: 6569 - protein, 180 aa, Homo sapiens
MLRVLVGAVLPAMLLAAPPPINKLALFPDKSAWCEAKNITQIVGHSGCEAKSIQNRACLGQCFSYSVPNTFPQSTESLVHCDSCMPAQSMWEIVTLECPGHEEVPRVDKLVEKILHCSCQACGKEPSHEGLSVYVQGEDGPGSQPGTHPHPHPHPHPGGQTPEPEDPPGAPHTEEEGAED

SEQ ID NO: 6570 - protein, 1445 aa, Homo sapiens
MQGPPLLTAAHLLCVCTAALAVAPGPRFLVTAPGIIRPGGNVTIGVELLEHCPSQVTVKAELLKTASNLTVSVLEAEGVFEKGSFKTLTLPSLPLNSADEIYELRVTGRTQDEILFSNSTRLSFETKRISVFIQTDKALYKPKQEVKFRIVTLFSDFKPYKTSLNILIKDPKSNLIQQWLSQQSDLGVISKTFQLSSHPILGDWSIQVQVNDQTYYQSFQVSEYVLPKFEVTLQTPLYCSMNSKHLNGTITAKYTYGKPVKGDVTLTFLPLSFWGKKKNITKTFKINGSANFSFNDEEMKNVMDSSNGLSEYLDLSSPGPVEILTTVTESVTGISRNVSTNVFFKQHDYIIEFFDYTTVLKPSLNFTATVKVTRADGNQLTLEERRNNVVITVTQRNYTEYWSGSNSGNQKMEAVQKINYTVPQSGTFKIEFPILEDSSELQLKAYFLGSKSSMAVHSLFKSPSKTYIQLKTRDENIKVGSPFELVVSGNKRLKELSYMVVSRGQLVAVGKQNSTMFSLTPENSWTPKACVIVYYIEDDGEIISDVLKIPVQLVFKNKIKLYWSKVKAEPSEKVSLRISVTQPDSIVGIVAVDKSVNLMNASNDITMENVVHELELYNTGYYLGMFMNSFAVFQECGLWVLTDANLTKDYIDGVYDNAEYAERFMEENEGHIVDIHDFSLGSSPHVRKHFPETWIWLDTNMGYRIYQEFEVTVPDSITSWVATGFVISEDLGLGLTTTPVELQAFQPFFIFLNLPYSVIRGEEFALEITIFNYLKDATEVKVIIEKSDKFDILMTSNEINATGHQQTLLVPSEDGATVLFPIRPTHLGEIPITVTALSPTASDAVTQMILVKAEGIEKSYSQSILLDLTDNRLQSTLKTLSFSFPPNTVTGSERVQITAIGDVLGPSINGLASLIRMPYGCGEQNMINFAPNIYILDYLTKKKQLTDNLKEKALSFMRQGYQRELLYQREDGSFSAFGNYDPSGSTWLSAFVLRCFLEADPYIDIDQNVLHRTYTWLKGHQKSNGEFWDPGRVIHSELQGGNKSPVTLTAYIVTSLLGYRKYQPNIDVQESIHFLESEFSRGISDNYTLALITYALSSVGSPKAKEALNMLTWRAEQEGGMQFWVSSESKLSDSWQPRSLDIEVAAYALLSHFLQFQTSEGIPIMRWLSRQRNSLGGFASTQDTTVALKALSEFAALMNTERTNIQVTVTGPSSPSPVKFLIDTHNRLLLQTAELAVVQPMAVNISANGFGFAICQLNVVYNVKASGSSRRRRSIQNQEAFDLDVAVKENKDDLNHVDLNVCTSFSGPGRSGMALMEVNLLSGFMVPSEAISLSETVKKVEYDHGKLNLYLDSVNETQFCVNIPAVRNFKVSNTQDASVSIVDYYEPRRQAVRSYNSEVKLSSCDLCSDVQGCRPCEDGASGSHHHSSVIFIFCFKLLYFMELWL

SEQ ID NO: 6571 - protein, 422 aa, Homo sapiens
GRDALRDGGSAVDAAIAALLCVGLMNAHSMGIGGGLFLTIYNSTTRKAEVINAREVAPRLAFATMFNSSEQSQKGGLSVAVPGEIRGYELAHQRHGRLPWARLFQPSIQLARQGFPVGKGLAAALENKRTVIEQQPVLCEVFCRDRKVLREGERLTLPQLADTYETLAIEGAQAFYNGSLTAQIVKDIQAAGEWVTSGAWVRNSAVETLSCSPELWGPPVLPEPAGSSWWRRVRYNFSRESVESPEQKGLTYHRIVEAFRFAYAKRTLLGDPKFVDVTEVVRNMTSEFFAAQLRAQISDDTTHPISYYKPEFYTPDDGGTAHLSVVAEDGSAVSATSTINLYFGSKVRSPVSGILFNNEMDDFSSPSITNEFGVPPSPANFIQPGKQPLSSMCPTIMVGQDGQVRMVVGAAGGTQITTATAL

SEQ ID NO: 6572 - protein, 366 aa, Homo sapiens [sequence omitted]

SEQ ID NO: 6573 - protein, 569 aa, Homo sapiens
MKKKLVVLGLLAVVLVLVIVGLCLWLPSASKEPDNHVYTRAAVAADAKQCSKIGRDALRDGGSAVDAAIAALLCVGLMNAHSMGIGGGLFLTIYNSTTRKAEVINAREVAPRLAFATMFNSSEQSQKGGLSVAVPGEIRGYELAHQRHGRLPWARLFQPSIQLARQGFPVGKGLAAALENKRTVIEQQPVLCEVFCRDRKVLREGERLTLPQLADTYETLAIEGAQAFYNGSLTAQIVKDIQAAGGIVTAEDLNNYRAELIEHPLNISLGDAVLYMPSAPLSGPVLALILNILKGYNFSRESVESPEQKGLTYHRIVEAFRFAYAKRTLLGDPKFVDVTEVVRNMTSEFFAAQLRAQISDDTTHPISYYKPEFYTPDDGGTAHLSVVAEDGSAVSATSTINLYFGSKVRSPVSGILFNNEMDDFSSPSITNEFGVPPSPANFIQPGKQPLSSMCPTIMVGQDGQVRMVVGAAGGTQITTATALAIIYNLWFGYDVKRAVEEPRLHNQLLPNVTTVERNIDQAVTAALETRHHHTQIASTFIAVVQAIVRTAGGWAAASDSRKGGEPAGY

SEQ ID NO: 6574 - protein, 439 aa, Homo sapiens
MKLANWYWLSSAVLATYGFLVVANNETEEIKDERAKDVCPVRLESRGKCEEAGECPYQVSLPPLTIQLPKQFSRIEEVFKEVQNLKEIVNSLKKSCQDCKLQADDNGDPGRNGLLLPSTGAPGEVGDNRVRELESEVNKLSSELKNAKEEINVLHGRLEKLNLVNMNNIENYVDSKVANLTFVVNSLDGKCSKCPSQEQIQSRPVQHLIYKDCSDYYAIGKRSSETYRVTPDPKNSSFEVYCDMETMGGGWTVLQARLDGSTNFTRTWQDYKAGFGNLRREFWLGNDKIHLLTKSKEMILRIDLEDFNGVELYALYDQFYVANEFLKYRLHVGNYNGTAGDALRFNKHYNHDLKFFTTPDKDNDRYPSGNCGLYYSSGWWFDACLSANLNGKYYHQKYRGVRNGIFWGTWPGVSEAHPGGYKSSFKEAKMMIRPKHFKP

SEQ ID NO: 6575 - protein, 609 aa, Homo sapiens
MSGWESYYKTEGDEEAEEEQEENLEASGDYKYSGRDSLIFLVDASKAMFESQSEDELTPFDMSIQCIQSVYISKIISSDRDLLAVVFYGTEKDKNSVNFKNIYVLQELDNPGAKRILELDQFKGQQGQKRFQDMMGHGSDYSLSEVLWVCANLFSDVQFKMSHKRIMLFTNEDNPHGNDSAKASRARTKAGDLRDTGIFLDLMHLKKPGGFDISLFYRDIISIAEDEDLRVHFEESSKLEDLLRKVRAKETRKRALSRLKLKLNKDIVISVGIYNLVQKALKPPPIKLYRETNEPVKTKTRTFNTSTGGLLLPSDTKRSQIYGSRQIILEKEETEELKRFDDPGLMLMGFKPLVLLKKHHYLRPSLFVYPEESLVIGSSTLFSALLIKCLEKEVAALCRYTPRRNIPPYFVALVPQEEELDDQKIQVTPPGFQLVFLPFADDKRKMPFTEKIMATPEQVGKMKAIVEKLRFTYRSDSFENPVLQQHFRNLEALALDLMEPEQAVDLTLPKVEAMNKRLGSLVDEFKELVYPPDYNPEGKVTKRKHDNEGSGSKRPKVEYSEEELKTHISKGTLGKFTVPMLKEACRAYGLKSGLKKQELLEALTKHFQD

SEQ ID NO: 6576 - protein, 608 aa, Homo sapiens
SGWESYYKTEGDEEAEEEQEENLEASGDYKYSGRDSLIFLVDASKAMFESQSEDELTPFDMSIQCIQSVYISKIISSDRDLLAVVFYGTEKDKNSVNFKNIYVLQELDNPGAKRILELDQFKGQQGQKRFQDMMGHGSDYSLSEVLWVCANLFSDVQFKMSHKRIMLFTNEDNPHGNDSAKASRARTKAGDLRDTGIFLDLMHLKKPGGFDISLFYRDIISIAEDEDLRVHFEESSKLEDLLRKVRAKETRKRALSRLKLKLNKDIVISVGIYNLVQKALKPPPIKLYRETNEPVKTKTRTFNTSTGGLLLPSDTKRSQIYGSRQIILEKEETEELKRFDDPGLMLMGFKPLVLLKKHHYLRPSLFVYPEESLVIGSSTLFSALLIKCLEKEVAALCRYTPRRNIPPYFVALVPQEEELDDQKIQVTPPGFQLVFLPFADDKRKMPFTEKIMATPEQVGKMKAIVEKLRFTYRSDSFENPVLQQHFRNLEALALDLMEPEQAVDLTLPKVEAMNKRLGSLVDEFKELVYPPDYNPEGKVTKRKHDNEGSGSKRPKVEYSEEELKTHISKGTLGKFTVPMLKEACRAYGLKSGLKKQELLEALTKHFQD

SEQ ID NO: 6577 - protein, 1358 aa, Homo sapiens
MIEPSEDSFETMMEHKNPSSKQMESSEGSSNTTEATSGSGVRGEAGPASGPAQEKKEPPSGPLQEMEELPTDLLQDMEEPSSGPRKEIEDPPNDLLQDLEESCNGSHQARGDPLSGASDRMKEASVNPSGAREEQEAHTDLKESGREETPQEQNQTEHSTAELMAMVRSIISLYFRMQDLKEQQRVAEEILIKGINAGQLPAPKHFSGDRREFHEFIVLCQLTLQSYPRMFYNDRLRVGYVINHLSGLALEWAKALLQENSPLIGDFPAFLEAMSEVFEYRQALRVAEEAMFTIRQGGRSATEYIDEFQSLVPILGWPDEVLQAHLCQGLNEEIRHYLFRVPQPDSLDSLIVLILQIEEKLAERRAMLRLPPEARPRNLTWIDSPAPERWMVSSWLPSEVHPDINRAHLFLLLMVRVNPYHSVAVQALVDSGADGNFMDEKFAQEHYVELYEKPYPQPVQSVDGSLIGNEPVWLYTEPLVCIHQNHQESIEFDIVPSPNFSVVLGIRWLRVHAPEVDWIKGRCTFHSPYCLKNCFRPPPPCIALERHGMSLLPGLPHPYSDLADVFNPKEADDETSDQPSSDGSDDLSESEPSELQQAGDSDHSETFYECPSTAPWEPVGARMQERARLQEEYWDLQDMLTNRQDYIQMIPELFDQLHGAEWFTKLELRGTIVEESVNGHRTEDVWKAAFGLELEEMKSYQPFALSPDPIIPQNVIHFILKDMLGFFVLSYGQEVLIYSMSQEEHLHHVRQVLVRFRHHNVYCSLDKSQFHRQTVEFLGFVVTPKGVKLNKNVMTIITGYPTPGSKLSLRNFIEFVFPYRHFVERFSIIAEPLVRQLLSSYQFYWGVEEQEAFECLKRAFRKAPLLHHPKPQNPFYLETGVTGTALHASLIQIDDQTGKRACCAFYSRNISPIEVEYSQAEMKILPIRAAFMVWCRYLENTEEPIMILLNTEDLASLNNDRLTVLLPGHWVFFFSHFNFDVMELPEQDGGRALPPVRNLRWRRAFQRNTAARQTLLLASRGFPRDPSTESGEEENEEQDELNEQILRQELLAMIPIDQILNSFLAHFSMAQIRAVILHFFRGLLYWKNTLALAAILVLLRVRQCLSLRPAPAMRVARPQPQRSLRLILDSSLIAGSSITTAITQLLTQMPALVGANTIPAQELAELFLGPGRWQRNALHSQAHRGLQFTPGFWLTLCEFFGVRVTPQEGHLPALRQNRYLELHVVGDEDVVLREALQDDLQRYRQCGLHDGLQDTSQDKQDNDVQEAPPSHTAATHPPRPRHLMDPQVLEFLGSRLLHIHSADGQLHLLSREQAARALSQFLTLIYRRALPIPAWESQPREQARLEELPDEDEDANLD

SEQ ID NO: 6578 - protein, 2124 aa, Homo sapiens
MRASLLHPPSQQFVEEDAVGGDGRRSCPCSHWVKEAETTDMTESSMKKLASTLLDAITDKDPLVQEQVCSALCSLGEARPVETLRACEEYLRQHDKLAHPYRAAVLRAMERVLSSRASELDKDTASTIILLASSEMTKTKDLVWDWQQAASGVLVAVGRQFISKVMEELLRRLHPGTLPHCAVLHTLASLSVANAFGVVPFLPSVLSSLLPVLGVAKQDTVRVAFCSGDLRLLWALPCWHFPPCVKHMGSASEDSMGPPRVGRVLPTTNGTFPVCIWRGWWSCWLEQPGARGSRINRTQRCQLLCESIITDSGELLMRVPQGLSQPLGLRLEVLVTLKAVLEGGQWPHEGDEGYSHLPLAGFVALQRFSEGALEYLANLDRAPDPTVRKDAFATDIFSAYDVLFHQWLQSREAKLRLAVVEALGPMSHLLPSERLEEQLPKLLPGILALYKKHAETFYLSKALIDLSQFGRLEVGLTASSPYPEQSLGQILEAAVSVGSRTLETQLDALLAALHSQICVPVESSSPLVMSNQKEVLRCFTVLGGLWLLALVTCQPPMTHLEVPCILSPPPLDAVPMPCTGPHSHPGGAADACSSPDRLLAFLLPRLDTSNERTRVGTLQVVRHVINSAAAQMEDKKPFILSSMRLPLLDTNSKVKRAVVQVISAMAHHGYLEQPGGEAMIEYIVQQCALPPEQEALSPVCVLTFVFLVEYVLTVRYQPEKPGPGSKDPKADSVRAISVRTLYLVSTTVDRMSHVLWPYLLQFLTPVRFTGALTPLCRSLVHLAQKRQEAGADAFLIQYDAHASLPSPYAVTGRLLVVSSSPYLGDGRGAAALRLLSVLHPNIHPLLGQHWETTVPLLLGYLDEHTEETLPQEEWEEKLLMVRAGVRPILGLKFLRDTLAIISDNAWICQLSLELCRQLPCYDEAPQEKNFLYKCIGTTLGAASSKEVVRKHLQELLETARYQEEAEREGLACCFGICAISHLEDTLAQLEDFVRSEVFRKSIGILNIFKDRSENEVEKVKSALILCYGHVAARAPRELVLAKVESDILRNICQHFSTKVLGIKVETKEAFESITRAPSLAWALDGSGKKGGVCASEGPGRGLSPPREFSQPHPSQDSWNLLWLCSPVLMGAVPPRTPDPALKLCLVQSVCMVSRAICSSTQAGSFHFTRKAELVAQMMEFIRAEPPDSLRTPIRKKAMLTCTYLPALDEQARADVIHGCLHSIMALLPEPKEEDGGCQKSLYLETLHALEDLLTSLLQRNMTPQGLQIMIEHLSPWIKSPRGHERARALGLSALLLRYFLEHLRVSALVPFHNLGLLIGLFSPRCADLWPATRQEAVDCVYSLLYLQLGYEGFSRDYRDDVAERLLSLKDGLVHPDPAILFHTCHSVGQIIAKRLPPDQLISLLLTMFEALGDPEKNCSRAATVMINCLLQERGGVLQEKVPEIVSVLRSKLQEAQGEHVLPAAQHSVYLLATQHCAAVVSSLLGSPLPLDSHTCMLWRALAVEPRLAAQVLGLLLEKMSRDVPFKESRAFLLGRTPDRVATLLPLSATCALFEVMSTPAAGPAVLELYPQLFVVLLLRVSCTVGVQLPRNLQAQERRGASPALATRNLEPCRAGSPLGTQATWAQRSGPNTGTMGLQAFPELPSRTSDLGEGTREREEPGDTHQGLCEGLALLLAHSTSQHTRGPVGHLAGGDQGSGTVTTTSGHHTARAARGLSAFGPGAPEDEALWGQRSKGGGGLSVSSAVDTLRSMLLRSGSEDVVQRMDLEGGWELLRTSAGHEEGATRLARAMAEHAGPRLPLVLKTLACTHSSAYENQRVTTTAFLAELLNSNVANDLMLLDSLLESLAARQKDTCASVRRLVLRGLANLASGCPDKVRTHGPQLLTAMIGGLDDGDNPHSPVALEAMLGLARLVHLVESWDLRSGLLHVAIRIRPFFDSEKMEFRTASIRLFGHLNKVCHGDCEDVFLDQVVGGLAPLLLHLQDPQATVASVSSQGACRFALRMCGPNLACEELSAAFQKHLQEGRALHFGEFLNTTCKHLMHHFPDLLGRLLTTCLFYFKSSWENVRAAAPLFTGFLVLHSEPRQQPQVDLDQLIAALQILLKDPAPEVRTRAAEALGRLVKLA

SEQ ID NO: 6579 - protein, 548 aa, Homo sapiens
MGFVLGTQALQCLPSWGQGWASLVGNDCGPHRFSSSTEQSSASRLMRRHKRRRRKQKVSRIERSSSFSSITDSTMSLNIITVTLNMEKYNFLGISIVGQSNERGDGGIYIGSIMKGGAVAADGRIEPGDMLLQVNEINFENMSNDDAVRVLREIVHKPGPITLTVAKCWDPSPRGCFTLPRSEPIRPIDPAAWVSHTAAMTGTFPAYGMSPSLSTITSTSSSITSSIPDTERLDDFHLSIHSDMAAIVKAMASPESGLEVRDRMWLKITIPNAFIGSDVVDWLYHNVEGFTDRREARKYASNLLKAGFIRHTVNKITFSEQCYYIFGDLCGNMANLSLHDHDGSSGASDQDTLAPLPHPGAAPWPMAFPYQYPPPPHPYNPHPGFPELGYSYGGGSASSQHSEGSRSSGSNRSGSDRRKEKDPKAGDSKSGGSGSESDHTTRSSLRGPRERAPSERSGPAASEHSHRSHHSLASSLRSHHTHPSYGPPGVPPLYGPPMLMMPPPPAAMGPPGAPPGRDLASVPPELTASRQSFRMAMGNPSEFFVDVM

SEQ ID NO: 6580 - protein, 716 aa, Homo sapiens
MGETKIIYHLDGQETPYLVKLPLPAERVTLADFKGVLQRPSYKFFFKSMDDDFGVVKEEISDDNAKLPCFNGRVVSWLVSAEGSHPDPAPFCADNPSELPPPMERTGGIGDSRPPSFHPHAGGGSQENLDNDTETDSLVSAQRERPRRRDGPEHATRLNGTAKGERRREPGGYDSSSTLMSSELETTSFFDSDEDDSTSRFSSSTEQSSASRLMRRHKRRRRKQKVSRIERSSSFSSITDSTMSLNIITVTLNMEKYNFLGISIVGQSNERGDGGIYIGSIMKGGAVAADGRIEPGDMLLQVNEINFENMSNDDAVRVLREIVHKPGPITLTVAKCWDPSPRGCFTLPRSEPIRPIDPAAWVSHTAAMTGTFPAYGMSPSLSTITSTSSSITSSIPDTERLDDFHLSIHSDMAAIVKAMASPESGLEVRDRMWLKITIPNAFIGSDVVDWLYHNVEGFTDRREARKYASNLLKAGFIRHTVNKITFSEQCYYIFGDLCGNMANLSLHDHDGSSGASDQDTLAPLPHPGAAPWPMAFPYQYPPPPHPYNPHPGFPELGYSYGGGSASSQHSEGSRSSGSNRSGSDRRKEKDPKAGDSKSGGSGSESDHTTRSSLRGPRERAPSERSGPAASEHSHRSHHSLASSLRSHHTHPSYGPPGVPPLYGPPMLMMPPPPAAMGPPGAPPGRDLASVPPELTASRQSFRMAMGNPSEFFVDVM

SEQ ID NO: 6581 - protein, 457 aa, Homo sapiens
NSEKYNFLGISIVGQSNERGDGGIYIGSIMKGGAVAADGRIEPGDMLLQVNEINFENMSNDDAVRVLREIVHKPGPITLTVAKCWDPSPRGCFTLPRSEPIRPIDPAAWVSHTAAMTGTFPAYGMSPSLSTITSTSSSITSSIPDTERLDDFHLSIHSDMAAIVKAMASPESGLEVRDRMWLKITIPNAFIGSDVVDWLYHNVEGFTDRREARKYASNLLKAGFIRHTVNKITFSEQCYYIFGDFCGNMANLSLHDHDGSSGASDQDTLALLPHPGAAPWPMAFPYQYPPPPHPYNPHPGFPELGYSYGGGSASSQHSEGSRSSGSNRSGSDRRKEKDPKAGDSKSGGSGSESDHTTRSSLRGPRERAPSERSGPAASEHSHRSHHSLASSLRSHHTHPSYGPPGVPPLYGPPMLMMPPPPAAMGPPGAPPGRDPGLSAPGTDRQQTVLPHGHGKPQ

SEQ ID NO: 6582 - protein, 2181 aa, Homo sapiens
MMMMMMMKKMQHQRQQQADHANEANYARGTRLPLSGEGPTSQPNSSKQTVLSWQAAIDAARQAKAAQTMSTSAPPPVGSLSQRKRQQYAKSKKQGNSSNSRPARALFCLSLNNPIRRACISIVEWKPFDIFILLAIFANCVALAIYIPFPEDDSNSTNHNLEKVEYAFLIIFTVETFLKIIAYGLLLHPNAYVRNGWNLLDFVIVIVGLFSVILEQLTKETEGGNHSSGKSGGFDVKALRAFRVLRPLRLVSGVPSLQVVLNSIIKAMVPLLHIALLVLFVIIIYAIIGLELFIGKMHKTCFFADSDIVAEEDPAPCAFSGNGRQCTANGTECRSGWVGPNGGITNFDNFAFAMLTVFQCITMEGWTDVLYWVNDAIGWEWPWVYFVSLIILGSFFVLNLVLGVLSGEFSKEREKAKARGDFQKLREKQQLEEDLKGYLDWITQAEDIDPENEEEGGEEGKRNTSMPTSETESVNTENVSGEGENRGCCGSLWCWWRRRGAAKAGPSGCRRWGQAISKSKLSRRWRRWNRFNRRRCRAAVKSVTFYWLVIVLVFLNTLTISSEHYNQPDWLTQIQDIANKVLLALFTCEMLVKMYSLGLQAYFVSLFNRFDCFVVCGGITETILVELEIMSPLGISVFRCVRLLRIFKVTRHWTSLCNLVASLLNSMKSSASLLLLLFLFIIIFSLLGMQLFGGKFNFDETQTKRSTFDNFPQALLTVFQILTGEDWNAVMYDGIMAYGGPSSSGMIVCIYFIILFICGNYILLNVFLAIAVDNLADAESLNTAQKEEAEEKERKKIARKESLENKKNNKPEVNQIANSDNKVTIDDYREEDEDKDPYPPCDVPVGEEEEEEEEDEPEVPAGPRPRRISELNMKEKIAPIPEGSAFFILSKTNPIRVGCHKLINHHIFTNLILVFIMLSSAALAAEDPIRSHSFRNTILGYFDYAFTAIFTVEILLKMTTFGAFLHKGAFCRNYFNLLDMLVVGVSLVSFGIQSSAISVVKILRVLRVLRPLRAINRAKGLKHVVQCVFVAIRTIGNIMIVTTLLQFMFACIGVQLFKGKFYRCTDEAKSNPEECRGLFILYKDGDVDSPVVRERIWQNSDFNFDNVLSAMMALFTVSTFEGWPALLYKAIDSNGENIGPIYNHRVEISIFFIIYIIIVAFFMMNIFVGFVIVTFQEQGEKEYKNCELDKNQRQCVEYALKARPLRRYIPKNPYQYKFWYVVNSSPFEYMMFVLIMLNTLCLAMQHYEQSKMFNDAMDILNMVFTGVFTVEMVLKVIAFKPKGYFSDAWNTFDSLIVIGSIIDVALSEADPTESENVPVPTATPGNSEESNRISITFFRLFRVMRLVKLLSRGEGIRTLLWTFIKFFQALPYVALLIAMLFFIYAVIGMQMFGKVAMRDNNQINRNNNFQTFPQAVLLLFRCATGEAWQEIMLACLPGKLCDPESDYNPGEEHTCGSNFAIVYFISFYMLCAFLIINLFVAVIMDNFDYLTRDWSILGPHHLDEFKRIWSEYDPEAKGRIKHLDVVTLLRRIQPPLGFGKLCPHRVACKRLVAMNMPLNSDGTVMFNATLFALVRTALKIKTEGNLEQANEELRAVIKKIWKKTSMKLLDQVVPPAGDDEVTVGKFYATFLIQDYFRKFKKRKEQGLVGKYPAKNTTIALQAGLRTLHDIGPEIRRAISCDLQDDEPEETKREEEDDVFKRNGALLGNHVNHVNSDRRDSLQQTNTTHRPLHVQRPSIPPASDTEKPLFPPAGNSVCHNHHNHNSIGKQVPTSTNANLNNANMSKAAHGKRPSIGNLEHVSENGHHSSHKHDREPQRRSSVKRTRYYETYIRSDSGDEQLPTICREDPEIHGYFRDPHCLGEQEYFSSEECYEDDSSPTWSRQNYGYYSRYPGRNIDSERPRGYHHPQGFLEDDDSPVCYDSRRSPRRRLLPPTPASHRRSSFNFECLRRQSSQEEVPSSPIFPHRTALPLHLMQQQIMAVAGLDSSKAQKYSPSHSTRSWATPPATPPYRDWTPCYTPLIQVEQSEALDQVNGSLPSLHRSSWYTDEPDISYRTFTPASLTVPSSFRNKNSDKQRSADSLVEAVLISEGLGRYARDPKFVSATKHEIADACDLTIDEMESAASTLLNGNVRPRANGDVGPLSHRQDYELQDFGPGYSDEEPDPGRDEEDLADEMICITTL

SEQ ID NO: 6583 - protein, 2161 aa, Homo sapiens [sequence omitted]

SEQ ID NO: 6584 - protein, 523 aa, Homo sapiens
MTVVPGDHLLEPEVADGGGAPPQGGCGGGGCDRYEPLPPSLPAAGEQDCCGERVVINISGLRFETQLKTLCQFPETLLGDPKRRMRYFDPLRNEYFFDRNRPSFDAILYYYQSGGRIRRPVNVPIDIFSEEIRFYQLGEEAMEKFREDEGFLREEERPLPRRDFQRQVWLLFEYPESSGPARGIAIVSVLVILISIVIFCLETLPEFRDEKDYPASTSQDSFEAAGNSTSGSRAGASSFSDPFFVVETLCIIWFSFELLVRFFACPSKATFSRNIMNLIDIVAIIPYFITLGTELAERQGNGQQAMSLAILRVIRLVRVFRIFKLSRHSKGLQILGQTLKASMRELGLLIFFLFIGVILFSSAVYFAEADDPTSGFSSIPDAFWWAVVTMTTVGYGDMHPVTIGGKIVGSLCAIAGVLTIALPVPVIVSNFNYFYHRETEGEEQSQYMHVGSCQHLSSSAEELRKARSNSTLSKSEYMVIEEGGMNHSAFPQTPFKTGNSTATCTTNNNPNSCVNIKKIFTDV

SEQ ID NO: 6585 - protein, 536 aa, Homo sapiens
MEFSSPSREECPKPLSRVSIMAGSLTGLLLLQAVSWASGARPCIPKSFGYSSVVCVCNATYCDSFDPPTFPALGTFSRYESTRSGRRMELSMGPIQANHTGTGLLLTLQPEQKFQKVKGFGGAMTDAAALNILALSPPAQNLLLKSYFSEEGIGYNIIRVPMASCDFSIRTYTYADTPDDFQLHNFSLPEEDTKLKIPLIHRALQLAQRPVSLLASPWTSPTWLKTNGAVNGKGSLKGQPGDIYHQTWARYFVKFLDAYAEHKLQFWAVTAENEPSAGLLSGYPFQCLGFTPEHQRDFIARDLGPTLANSTHHNVRLLMLDDQRLLLPHWAKVVLTDPEAAKYVHGIAVHWYLDFLAPAKATLGETHRLFPNTMLFASEACVGSKFWEQSVRLGSWDRGMQYSHSIITNLLYHVVGWTDWNLALNPEGGPNWVRNFVDSPIIVDITKDTFYKQPMFYHLGHFSKFIPEGSQRVGLVASQKNDLDAVALMHPDGSAVVVVLNRSSKDVPLTIKDPAVGFLETISPGYSIHTYLWHRQ

SEQ ID NO: 6586 - protein, 286 aa, Homo sapiens
MRLLPRLLLLLLLVFPATVLFRGGPRGLLAVAQDLTEDEETVEDSIIEDEDDEAEVEEDEPTDLVEDKEEEDVSGEPEASPSADTTILFVKGEDFPANNIVKFLVGFTNKGTEDFIVESLDASFRYPQDYQFYIQNFTALPLNTVVPPQRQATFEYSFIPAEPMGGRPFGLVINLNYKDLNGNVFQDAVFNQTVTVIEREDGLDGETIFMYMFLAGLGLLVIVGLHQLLESRKRKRPIQKVEMGTSSQNDVDMSWIPQETLNQINKASPRRLPRKRAQKRSVGSDE

SEQ ID NO: 6587 - protein, 1366 aa, Homo sapiens
MLSFVDTRTLLLLAVTLCLATCQSLQEETVRKGPAGDRGPRGERGPPGPPGRDGEDGPTGPPGPPGPPGPPGLGGNFAAQYDGKGVGLGPGPMGLMGPRGPPGAAGAPGPQGFQGPAGEPGEPGQTGPAGARGPAGPPGKAGEDGHPGKPGRPGERGVVGPQGARGFPGTPGLPGFKGIRGHNGLDGLKGQPGAPGVKGEPGAPGENGTPGQTGARGLPGERGRVGAPGPAGARGSDGSVGPVGPAGPNGSAGPPGFPGAPGPKGEIGAVGNAGPTGPAGPRGEVGLPGLSGPVGPPGNPGANGLTGAKGAAGLPGVAGAPGLPGPRGIPGPVGAAGATGARGLVGEPGPAGSKGESGNKGEPGSAGPQGPPGPSGEEGKRGPNGEAGSAGPPGPPGLRGSPGSRGLPGADGRAGVMGPPGSRGASGPAGVRGPNGDAGRPGEPGLMGPRGLPGSPGNIGPAGKEGPVGLPGIDGRPGPIGPAGARGEPGNIGFPGPKGPTGDPGKNGDKGHAGLAGARGAPGPDGNNGAQGPPGPQGVQGGKGEQGPDGPPGFQGLPGPSGPAGEVGKPGERGLHGEFGLPGPAGPRGERGPPGESGAAGPTGPIGSRGPSGPPGPDGNKGEPGVVGAVGTAGPSGPSGLPGERGAAGIPGGKGEKGEPGLRGEIGNPGRDGARGAHGAVGAPGPAGATGDRGEAGAAGPAGPAGPRGSPGERGEVGPAGPNGFAGPAGAAGQPGAKGERGGKGPKGENGVVGPTGPVGAAGPAGPNGPPGPAGSRGDGGPPGMTGFPGAAGRTGPPGPSGISGPPGPPGPAGKEGLRGPRGDQGPVGRTGEVGAVGPPGFAGEKGPSGEAGTAGPPGTPGPQGLLGAPGILGLPGSRGERGLPGVAGAVGEPGPLGIAGPPGARGPPGAVGSPGVNGAPGEAGRDGNPGNDGPPGRDGQPGHKGERGYPGNIGPVGAAGAPGPHGPVGPAGKHGNRGETGPSGPVGPAGAVGPRGPSGPQGIRGDKGEPGEKGPRGLPGFKGHNGLQGLPGIAGHHGDQGAPGSVGPAGPRGPAGPSGPAGKDGRTGHPGTVGPAGIRGPQGHQGPAGPPGPPGPPGPPGVSGGGYDFGYDGDFYRADQPRSAPSLRPKDYEVDATLKSLNNQIETLLTPEGSRKNPARTCRDLRLSHPEWSSGYYWIDPNQGCTMEAIKVYCDFPTGETCIRAQPENIPAKNWYRSSKDKKHVWLGETINAGSQFEYNVEGVTSKEMATQLAFMRLLANYASQNITYHCKNSIAYMDEETGNLKKAVILQGSNDVELVAEGNSRFTYTVLVDGCSKKTNEWGKTIIEYKTNKPSRLPFLDIAPLDIGGADHEFFVDIGPVCFK

SEQ ID NO: 6588 - protein, 1239 aa, Homo sapiens
MLSFVDTRTLLLLAVTLCLATCQCKCLQLVWGRLGREGPPGPPGRDGEDGPTGPPGPPGPPGPPGLGGNFAAQYDGKGVGLGPGPMGLMGPRGPPGAAGAPGPQGFQGPAGEPGEPGQTGPAGARGPAGPPGKAGEDGHPGKPGRPGERGVVGPQGARGFPGTPGLPGFKGIRGHNGLDGLKGQPGAPGVKGEPGAPGENGTPGQTGEIGAVGNAGPAGPAGPRGEVGLPGLSGPVGPPGNPGANGLTGAKGAAGLPGVAGAPGLPGPRGIPGPVGAAGATGARGLVGEPGPAGSKGESGNKGEPGSAGPQGPPGPSGEEGKRGPNGEAGSAGPPGPPGLRGSPGSRGLPGADGRAGVMGPPGSRGASGPAGVRGPNGDAGRPGEPGLMGPRGLPGSPGNIGPAGKEGPVGLPGIDGRPGPIGPAGARGEPGNIGFPGPKGPTGDPGKNGDKGHAGLAGARGAPGPDGNNGAQGPPGPQGVQGGKGEQGPPGPPGFQGLPGPSGPAGEVGKPGERGERGPPGESGAAGPTGPIGSRGPSGPPGPDGNKGEPGVVGAVGTAGPSGPSGLPGERGAAGIPGGKGEKGEPGLRGEIGNPGRDGARGEAGAAGPAGPAGPRGSPGERGEVGPAGPNGFAGPAGAAGQPGAKGERGAKGPKGENGVVGPTGPVGAAGPAGISGPPGPPGPAGKEGLRGPRGDQGPVGRTGEVGAVGPPGFAGEKGPSGEAGTAGPPGTPGPQGLLGAPGILGLPGSRGERGLPGVAGAVGEPGPLGIAGPPGARGPPGAVGSPGVNGAPGEAGRDGNPGNDGPPGRDGQPGHKGERGYPGNIGPVGAAGAPGPHGPVGPAGKHGNRGETGPSGPVGPAGAVGPRGPSGPQGIRGDKGEPGEKGPRGLPGLKGHNGLQGLPGIAGHHGDQGAPGSVGPAGPRGPAGPSGPAGKDGRTGHPGTVGPAGIRGPQGHQGPAGPPGPPGPPGPPGVSGGGYDFGYDGDFYRADQPRSAPSLRPKDYEVDATLKSLNNQIETLLTPEGSRKNPARTCRDLRLSHPEWSSGYYWIDPNQGCTMDAIKVYCDFSTGETCIRAQPENIPAKNWYRSSKDKKHVWLGETINAGSQFEYNVEGVTSKEMATQLAFMRLLANYASQNITYHCKNSIAYMDEETGNLKKAVILQGSNDVELVAEGNSRFTYTVLVDGCSKKTNEWGKTIIEYKTNKPSRLPFLDIAPLDIGGADQEFFVDIGPVCFK

SEQ ID NO: 6589 - protein, 1366 aa, Homo sapiens [sequence omitted]

SEQ ID NO: 6590 - protein, 807 aa, Homo sapiens
MRLSPAPLKLSRTPALLALALPLAAALAFSDETLDKVPKSEGYCSRILRAQGTRREGYTEFSLRVEGDPDFYKPGTSYRVTLSAAPPSYFRGFTLIALRENREGDKEEDHAGTFQIIDEEETQFMSNCPVAVTESTPRRRTRIQVFWIAPPAGTGCVILKASIVQKRIIYFQDEGSLTKKLCEQDSTFDGVTDKPILDCCACGTAKYRLTFYGNWSEKTHPKDYPRRANHWSAIIGGSHSKNYVLWEYGGYASEGVKQVAELGSPVKMEEEIRQQSDEVLTVIKAKAQWPAWQPLNVRAAPSAEFSVDRTRHLMSFLTMMGPSPDWNVGLSAEDLCTKECGWVQKVVQDLIPWDAGTDSGVTYESPNKPTIPQEKIRPLTSLDHPQSPFYDPEGGSITQVARVVIERIARKGEQCNIVPDNVDDIVADLAPEEKDEDDTPETCIYSNWSPWSACSSSTCDKGKRMRQRMLKAQLDLSVPCPDTQDFQPCMGPGCSDEDGPTCTMSEWITWSPCSISCGMGMRSRERYVKQFPEDGSVCTLPTEETEKCTVNEECSPSSCLMTEWGEWDEYSATCGMGMKKRHRMIKMNPADGSMCKAETSQAEKRMMPECHTIPCLLSPWSEWSDCSVTCGKGMRTRQRMLKSLAELGDCNEDLEQVEKCMLPECPIDCELTEWSQWSECNKSCGKGHVIRTRMIQMEPQFGGAPCPETVQRKKCRIRKCLRNPSIQKLRWREARESRRSEQLKEESEGEQFPGCRMRPWTAWSECTKLCGGGIQERYMTVKKRFKSSQFTSCKDKKEIRACNVHPC

SEQ ID NO: 6591 - protein, 1117 aa, Homo sapiens
MARTRDRVRLLLLLICFNVGSGLHLQVLSTRNENKLLPKHPHLVRQKRAWITAPVALREGEDLSKKNPIAKIHSDLAEERGLKITYKYTGKGITEPPFGIFVFNKDTGELNVTSILDREETPFFLLTGYALDARGNNVEKPLELRIKVLDINDNEPVFTQDVFVGSVEELSAAHTLVMKINATDADEPNTLNSKISYRIVSLEPAYPPVFYLNKDTGEIYTTSVTLDREEHSSYTLTVEARDGNGEVTDKPVKQAQVQIRILDVNDNIPVVENKVLEGMVEENQVNVEVTRIKVFDADEIGSDNWLANFTFASGNEGGYFHIETDAQTNEGIVTLIKEVDYEEMKNLDFSVIVANKAAFHKSIRSKYKPTPIPIKVKVKNVKEGIHFKSSVISIYVSESMDRSSKGQIIGNFQAFDEDTGLPAHARYVKLEDRDNWISVDSVTSEIKLAKLPDFESRYVQNGTYTVKIVAISEDYPRKTITGTVLINVEDINDNCPTLIEPVQTICHDAEYVNVTAEDLDGHPNSGPFSFSVIDKPPGMAEKWKIARQESTSVLLQQSEKKLGRSEIQFLISDNQGFSCPEKQVLTLTVCEVLHGSGCREAQHDSYVGLGPAAIALMILAFLLLLLVPLLLLMCHCGKGAKAFTPIPGTIEMLHPWNNEGAPPEDKVVPSFLPVDQGGSLVGRNGVGGMAKEATMKGSSSASIVKGQHEMSEMDGRWEEHRSLLSGRATQFTGATGAIMTTETTKTARATGASRDMAGAQAAAVALNEEFLRNYFTDKAASYTEEDENHTAKDCLLVYSQEETESLNASIGCCSFIEGELDDRFLDDLGLKFKTLAEVCLGQKIDINKEIEQRQKPATETSMNTASHSLCEQTMVNSENTYSSGSSFPVPKSLQEANAEKVTQEIVTERSVSSRQAQKVATPLPDPMASRNVIATETSYVTGSTMPPTTVILGPSQPQSLIVTERVYAPASTLVDQPYANEGTVVVTERVIQPHGGGSNPLEGTQHLQDVPYVMVRERESFLAPSSGVQPTLAMPNIAVGQNVTVTERVLAPASTLQSSYQIPTENSMTARNTTVSGAGVPGPLPDFGLEESGHSNSTITTSSTRVTKHSTVQHSYS

SEQ ID NO: 6592 - protein, 1890 aa, Homo sapiens
RVDPIGPGLDRERLYWELSQLTNSITELGPYTLDRDSLYVNGFNPWSSVPTTSTPGTSTVHLATSGTPSSLPGHTAPVPLLIPFTLNFTITNLHYEENMQHPGSRKFNTTERVLQGLLKPLFKSTSVGPLYSGCRLTLLRPEKHGAATGVDAICTLRLDPTGPGLDRERLYWELSQLTNSVTELGPYTLDRDSLYVNGFTHRSSVPTTSIPGTSAVHLETSGTPASLPGHTAPGPLLVPFTLNFTITNLQYEEDMRHPGSRKFNTTERVLQGLLKPLFKSTSVGPLYSGCRLTLLRPEKRGAATGVDTICTHRLDPLNPGLDREQLYWELSKLTRGIIELGPYLLDRGSLYVNGFTHRNFVPITSTPGTSTVHLGTSETPSSLPRPIVPGPLLVPFTLNFTITNLQYEEAMRHPGSRKFNTTERVLQGLLRPLFKNTSIGPLYSSCRLTLLRPEKDKAATRVDAICTHHPDPQSPGLNREQLYWELSQLTHGITELGPYTLDRDSLYVDGFTHWSPIPTTSTPGTSIVNLGTSGIPPSLPETTATGPLLVPFTLNFTITNLQYEENMGHPGSRKFNITESVLQGLLKPLFKSTSVGPLYSGCRLTLLRPEKDGVATRVDAICTHRPDPKIPGLDRQQLYWELSQLTHSITELGPYTLDRDSLYVNGFTQRSSVPTTSTPGTFTVQPETSETPSSLPGPTATGPVLLPFTLNFTIINLQYEEDMHRPGSRKFNTTERVLQGLLMPLFKNTSVSSLYSGCRLTLLRPEKDGAATRVDAVCTHRPDPKSPGLDRERLYWKLSQLTHGITELGPYTLDRHSLYVNGFTHQSSMTTTRTPDTSTMHLATSRTPASLSGPTTASPLLVLFTINFTITNLRYEENMHHPGSRKFNTTERVLQGLLRPVFKNTSVGPLYSGCRLTLLRPKKDGAATKVDAICTYRPDPKSPGLDREQLYWELSQLTHSITELGPYTLDRDSLYVNGFTQRSSVPTTSIPGTPTVDLGTSGTPVSKPGPSAASPLLVLFTLNFTITNLRYEENMQHPGSRKFNTTERVLQGLLRSLFKSTSVGPLYSGCRLTLLRPEKDGTATGVDAICTHHPDPKSPRLDREQLYWELSQLTHNITELGPYALDNDSLFVNGFTHRSSVSTTSTPGTPTVYLGASKTPASIFGPSAASHLLILFTLNFTITNLRYEENMWPGSRKFNTTERVLQGLLRPLFKNTSVGPLYSGCRLTLLRPEKDGEATGVDAICTHRPDPTGPGLDREQLYLELSQLTHSITELGPYTLDRDSLYVNGFTHRSSVPTTSTGVVSEEPFTLNFTINNLRYMADMGQPGSLKFNITDNVMQHLLSPLFQRSSLGARYTGCRVIALRSVKNGAETRVDLLCTYLQPLSGPGLPIKQVFHELSQQTHGITRLGPYSLDKDSLYLNGYNEPGPDEPPTTPKPATTFLPPLSEATTAMGYHLKTLTLNFTISNLQYSPDMGKGSATFNSTEGVLQHLLRPLFQKSSMGPFYLGCQLISLRPEKDGAATGVDTTCTYHPDPVGPGLDIQQLYWELSQLTHGVTQLGFYVLDRDSLFINGYAPQNLSIRGEYQINFHIVNWNLSNPDPTSSEYITLLRDIQDKVTTLYKGSQLHDTFRFCLVTNLTMDSVLVTVKALFSSNLDPSLVEQVFLDKTLNASFHWLGSTYQLVDIHVTEMESSVYQPTSSSSTQHFYPNFTITNLPYSQDKAQPGTTNYQRNKRNIEDALNQLFRNSSIKSYFSDCQVSTFRSVPNRHHTGVDSLCNFSPLARRVDRVAIYEEFLRMTRNGTQLQNFTLDRSSVLVDGYSPNRNEPLTGNSDLPFWAVILIGLAGLLGLITCLICGVLVTTRRRKKEGEYNVQQQCPGYYQSHLDLEDLQ

SEQ ID NO: 6593 - protein, 22152 aa, Homo sapiens
  misc_feature (13877)..(13878): Xaa can be any naturally occurring amino acid
  misc_feature (13880)..(13880): Xaa can be any naturally occurring amino acid
  misc_feature (13887)..(13887): Xaa can be any naturally occurring amino acid
  misc_feature (13890)..(13891): Xaa can be any naturally occurring amino acid
  misc_feature (13893)..(13893): Xaa can be any naturally occurring amino acid
  misc_feature (13903)..(13903): Xaa can be any naturally occurring amino acid
  misc_feature (13913)..(13914): Xaa can be any naturally occurring amino acid
  misc_feature (13916)..(13916): Xaa can be any naturally occurring amino acid
  misc_feature (13928)..(13929): Xaa can be any naturally occurring amino acid
  misc_feature (13938)..(13938): Xaa can be any naturally occurring amino acid
  misc_feature (13940)..(13941): Xaa can be any naturally occurring amino acid
  misc_feature (14569)..(14571): Xaa can be any naturally occurring amino acid
  misc_feature (14575)..(14575): Xaa can be any naturally occurring amino acid
  misc_feature (14579)..(14579): Xaa can be any naturally occurring amino acid
  misc_feature (14581)..(14581): Xaa can be any naturally occurring amino acid
  misc_feature (14587)..(14591): Xaa can be any naturally occurring amino acid
  misc_feature (14593)..(14594): Xaa can be any naturally occurring amino acid
  misc_feature (14725)..(14727): Xaa can be any naturally occurring amino acid
  misc_feature (14731)..(14731): Xaa can be any naturally occurring amino acid
  misc_feature (14735)..(14735): Xaa can be any naturally occurring amino acid
  misc_feature (14737)..(14737): Xaa can be any naturally occurring amino acid
  misc_feature (14743)..(14747): Xaa can be any naturally occurring amino acid
  misc_feature (14749)..(14750): Xaa can be any naturally occurring amino acid
  misc_feature (15661)..(15663): Xaa can be any naturally occurring amino acid
  misc_feature (15667)..(15667): Xaa can be any naturally occurring amino acid
  misc_feature (15671)..(15671): Xaa can be any naturally occurring amino acid
  misc_feature (15673)..(15673): Xaa can be any naturally occurring amino acid
  misc_feature (15679)..(15683): Xaa can be any naturally occurring amino acid
  misc_feature (15685)..(15686): Xaa can be any naturally occurring amino acid
  misc_feature (15972)..(15974): Xaa can be any naturally occurring amino acid
  misc_feature (15978)..(15978): Xaa can be any naturally occurring amino acid
  misc_feature (15982)..(15982): Xaa can be any naturally occurring amino acid
  misc_feature (15984)..(15984): Xaa can be any naturally occurring amino acid
  misc_feature (15990)..(15994): Xaa can be any naturally occurring amino acid
  misc_feature (15996)..(15997): Xaa can be any naturally occurring amino acid
  misc_feature (16008)..(16008): Xaa can be any naturally occurring amino acid
  misc_feature (16015)..(16015): Xaa can be any naturally occurring amino acid
  misc_feature (16017)..(16017): Xaa can be any naturally occurring amino acid
  misc_feature (16021)..(16021): Xaa can be any naturally occurring amino acid
  misc_feature (16025)..(16025): Xaa can be any naturally occurring amino acid
  misc_feature (16034)..(16034): Xaa can be any naturally occurring amino acid
  misc_feature (16037)..(16037): Xaa can be any naturally occurring amino acid
  misc_feature (16040)..(16040): Xaa can be any naturally occurring amino acid
  misc_feature (16046)..(16046): Xaa can be any naturally occurring amino acid
  misc_feature (16051)..(16051): Xaa can be any naturally occurring amino acid
  misc_feature (16053)..(16055): Xaa can be any naturally occurring amino acid
  misc_feature (16058)..(16058): Xaa can be any naturally occurring amino acid
  misc_feature (16062)..(16063): Xaa can be any naturally occurring amino acid
  misc_feature (16065)..(16065): Xaa can be any naturally occurring amino acid
  misc_feature (16072)..(16072): Xaa can be any naturally occurring amino acid
  misc_feature (16075)..(16076): Xaa can be any naturally occurring amino acid
  misc_feature (16078)..(16078): Xaa can be any naturally occurring amino acid
  misc_feature (16088)..(16088): Xaa can be any naturally occurring amino acid
  misc_feature (16268)..(16269): Xaa can be any naturally occurring amino acid
  misc_feature (16278)..(16278): Xaa can be any naturally occurring amino acid
  misc_feature (16280)..(16281): Xaa can be any naturally occurring amino acid
  misc_feature (16373)..(16374): Xaa can be any naturally occurring amino acid
  misc_feature (16376)..(16376): Xaa can be any naturally occurring amino acid
  misc_feature (16383)..(16383): Xaa can be any naturally occurring amino acid
  misc_feature (16386)..(16387): Xaa can be any naturally occurring amino acid
  misc_feature (16389)..(16389): Xaa can be any naturally occurring amino acid
  misc_feature (16399)..(16399): Xaa can be any naturally occurring amino acid
  misc_feature (16409)..(16410): Xaa can be any naturally occurring amino acid
  misc_feature (16412)..(16412): Xaa can be any naturally occurring amino acid
  misc_feature (16424)..(16425): Xaa can be any naturally occurring amino acid
  misc_feature (16434)..(16434): Xaa can be any naturally occurring amino acid
  misc_feature (16436)..(16437): Xaa can be any naturally occurring amino acid
  misc_feature (16439)..(16441): Xaa can be any naturally occurring amino acid
  misc_feature (16445)..(16445): Xaa can be any naturally occurring amino acid
  misc_feature (16449)..(16449): Xaa can be any naturally occurring amino acid
  misc_feature (16451)..(16451): Xaa can be any naturally occurring amino acid
  misc_feature (16457)..(16461): Xaa can be any naturally occurring amino acid
  misc_feature (16463)..(16464): Xaa can be any naturally occurring amino acid
  misc_feature (16841)..(16842): Xaa can be any naturally occurring amino acid
  misc_feature (16844)..(16844): Xaa can be any naturally occurring amino acid
  misc_feature (16851)..(16851): Xaa can be any naturally occurring amino acid
  misc_feature (16854)..(16855): Xaa can be any naturally occurring amino acid
  misc_feature (16857)..(16857): Xaa can be any naturally occurring amino acid
  misc_feature (16867)..(16867): Xaa can be any naturally occurring amino acid
  misc_feature (16877)..(16878): Xaa can be any naturally occurring amino acid
  misc_feature (16880)..(16880): Xaa can be any naturally occurring amino acid
  misc_feature (16892)..(16893): Xaa can be any naturally occurring amino acid
  misc_feature (16902)..(16902): Xaa can be any naturally occurring amino acid
  misc_feature (16904)..(16905): Xaa can be any naturally occurring amino acid
  misc_feature (16907)..(16909): Xaa can be any naturally occurring amino acid
  misc_feature (16913)..(16913): Xaa can be any naturally occurring amino acid
  misc_feature (16917)..(16917): Xaa can be any naturally occurring amino acid
  misc_feature (16919)..(16919): Xaa can be any naturally occurring amino acid
  misc_feature (16925)..(16929): Xaa can be any naturally occurring amino acid
  misc_feature (16931)..(16932): Xaa can be any naturally occurring amino acid
  misc_feature (17465)..(17466): Xaa can be any naturally occurring amino acid
  misc_feature (17468)..(17468): Xaa can be any naturally occurring amino acid
  misc_feature (17475)..(17475): Xaa can be any naturally occurring amino acid
  misc_feature (17478)..(17479): Xaa can be any naturally occurring amino acid
  misc_feature (17481)..(17481): Xaa can be any naturally occurring amino acid
  misc_feature (17491)..(17491): Xaa can be any naturally occurring amino acid
  misc_feature (17501)..(17502): Xaa can be any naturally occurring amino acid
  misc_feature (17504)..(17504): Xaa can be any naturally occurring amino acid
  misc_feature (17516)..(17517): Xaa can be any naturally occurring amino acid
  misc_feature (17526)..(17526): Xaa can be any naturally occurring amino acid
  misc_feature (17528)..(17529): Xaa can be any naturally occurring amino acid
  misc_feature (17531)..(17533): Xaa can be any naturally occurring amino acid
  misc_feature (17537)..(17537): Xaa can be any naturally occurring amino acid
  misc_feature (17541)..(17541): Xaa can be any naturally occurring amino acid
  misc_feature (17543)..(17543): Xaa can be any naturally occurring amino acid
  misc_feature (17549)..(17553): Xaa can be any naturally occurring amino acid
  misc_feature (17555)..(17556): Xaa can be any naturally occurring amino acid
  misc_feature (17567)..(17567): Xaa can be any naturally occurring amino acid
  misc_feature (17574)..(17574): Xaa can be any naturally occurring amino acid
  misc_feature (17576)..(17576): Xaa can be any naturally occurring amino acid
  misc_feature (17580)..(17580): Xaa can be any naturally occurring amino acid
  misc_feature (17584)..(17584): Xaa can be any naturally occurring amino acid
  misc_feature (17593)..(17593): Xaa can be any naturally occurring amino acid
  misc_feature (17596)..(17596): Xaa can be any naturally occurring amino acid
  misc_feature (17599)..(17599): Xaa can be any naturally occurring amino acid
  misc_feature (17605)..(17605): Xaa can be any naturally occurring amino acid
  misc_feature (17610)..(17610): Xaa can be any naturally occurring amino acid
  misc_feature (17612)..(17614): Xaa can be any naturally occurring amino acid
  misc_feature (17617)..(17617): Xaa can be any naturally occurring amino acid
  misc_feature (17621)..(17622): Xaa can be any naturally occurring amino acid
  misc_feature (17624)..(17624): Xaa can be any naturally occurring amino acid
  misc_feature (17631)..(17631): Xaa can be any naturally occurring amino acid
  misc_feature (17777)..(17778): Xaa can be any naturally occurring amino acid
  misc_feature (17780)..(17780): Xaa can be any naturally occurring amino acid
  misc_feature (17787)..(17787): Xaa can be any naturally occurring amino acid
  misc_feature (17790)..(17791): Xaa can be any naturally occurring amino acid
  misc_feature (17793)..(17793): Xaa can be any naturally occurring amino acid
  misc_feature (17803)..(17803): Xaa can be any naturally occurring amino acid
  misc_feature (17813)..(17814): Xaa can be any naturally occurring amino acid
  misc_feature (17816)..(17816): Xaa can be any naturally occurring amino acid
  misc_feature (17828)..(17829): Xaa can be any naturally occurring amino acid
  misc_feature (17838)..(17838): Xaa can be any naturally occurring amino acid
  misc_feature (17840)..(17841): Xaa can be any naturally occurring amino acid
  misc_feature (17843)..(17845): Xaa can be any naturally occurring amino acid
  misc_feature (17849)..(17849): Xaa can be any naturally occurring amino acid
  misc_feature (17853)..(17853): Xaa can be any naturally occurring amino acid
  misc_feature (17855)..(17855): Xaa can be any naturally occurring amino acid
  misc_feature (17861)..(17865): Xaa can be any naturally occurring amino acid
  misc_feature (17867)..(17868): Xaa can be any naturally occurring amino acid
  misc_feature (17879)..(17879): Xaa can be any naturally occurring amino acid
  misc_feature (17886)..(17886): Xaa can be any naturally occurring amino acid
  misc_feature (17888)..(17888): Xaa can be any naturally occurring amino acid
  misc_feature (17892)..(17892): Xaa can be any naturally occurring amino acid
  misc_feature (17896)..(17896): Xaa can be any naturally occurring amino acid
  misc_feature (17905)..(17905): Xaa can be any naturally occurring amino acid
  misc_feature (17908)..(17908): Xaa can be any naturally occurring amino acid
  misc_feature (17911)..(17911): Xaa can be any naturally occurring amino acid
  misc_feature (17917)..(17917): Xaa can be any naturally occurring amino acid
  misc_feature (17922)..(17922): Xaa can be any naturally occurring amino acid
  misc_feature (17924)..(17926): Xaa can be any naturally occurring amino acid
  misc_feature (17929)..(17929): Xaa can be any naturally occurring amino acid
  misc_feature (17933)..(17934): Xaa can be any naturally occurring amino acid
  misc_feature (17936)..(17936): Xaa can be any naturally occurring amino acid
  misc_feature (17943)..(17943): Xaa can be any naturally occurring amino acid
  misc_feature (17946)..(17947): Xaa can be any naturally occurring amino acid
  misc_feature (17949)..(17949): Xaa can be any naturally occurring amino acid
  misc_feature (17959)..(17959): Xaa can be any naturally occurring amino acid
  misc_feature (18089)..(18090): Xaa can be any naturally occurring amino acid
  misc_feature (18092)..(18092): Xaa can be any naturally occurring amino acid
  misc_feature (18099)..(18099): Xaa can be any naturally occurring amino acid
  misc_feature (18102)..(18103): Xaa can be any naturally occurring amino acid
  misc_feature (18105)..(18105): Xaa can be any naturally occurring amino acid
  misc_feature (18115)..(18115): Xaa can be any naturally occurring amino acid
  misc_feature (18125)..(18126): Xaa can be any naturally occurring amino acid
  misc_feature (18128)..(18128): Xaa can be any naturally occurring amino acid
  misc_feature (18140)..(18141): Xaa can be any naturally occurring amino acid
  misc_feature (18150)..(18150): Xaa can be any naturally occurring amino acid
  misc_feature (18152)..(18153): Xaa can be any naturally occurring amino acid
  misc_feature (18155)..(18157): Xaa can be any naturally occurring amino acid
  misc_feature (18161)..(18161): Xaa can be any naturally occurring amino acid
  misc_feature (18165)..(18165): Xaa can be any naturally occurring amino acid
  misc_feature (18167)..(18167): Xaa can be any naturally occurring amino acid
  misc_feature (18173)..(18177): Xaa can be any naturally occurring amino acid
  misc_feature (18179)..(18180): Xaa can be any naturally occurring amino acid
  misc_feature (18191)..(18191): Xaa can be any naturally occurring amino acid
  misc_feature (18198)..(18198): Xaa can be any naturally occurring amino acid
  misc_feature (18200)..(18200): Xaa can be any naturally occurring amino acid
  misc_feature (18204)..(18204): Xaa can be any naturally occurring amino acid
  misc_feature (18208)..(18208): Xaa can be any naturally occurring amino acid
  misc_feature (18217)..(18217): Xaa can be any naturally occurring amino acid
  misc_feature (18220)..(18220): Xaa can be any naturally occurring amino acid
  misc_feature (18223)..(18223): Xaa can be any naturally occurring amino acid
  misc_feature (18229)..(18229): Xaa can be any naturally occurring amino acid
  misc_feature (18234)..(18234): Xaa can be any naturally occurring amino acid
  misc_feature (18236)..(18238): Xaa can be any naturally occurring amino acid
  misc_feature (18241)..(18241): Xaa can be any naturally occurring amino acid
  misc_feature (18245)..(18246): Xaa can be any naturally occurring amino acid
  misc_feature (18248)..(18248): Xaa can be any naturally occurring amino acid
  misc_feature (18255)..(18255): Xaa can be any naturally occurring amino acid
  misc_feature (18258)..(18259): Xaa can be any naturally occurring amino acid
  misc_feature (18261)..(18261): Xaa can be any naturally occurring amino acid
  misc_feature (18271)..(18271): Xaa can be any naturally occurring amino acid
  misc_feature (18401)..(18402): Xaa can be any naturally occurring amino acid
  misc_feature (18404)..(18404): Xaa can be any naturally occurring amino acid
  misc_feature (18411)..(18411): Xaa can be any naturally occurring amino acid
  misc_feature (18414)..(18415): Xaa can be any naturally occurring amino acid
  misc_feature (18417)..(18417): Xaa can be any naturally occurring amino acid
  misc_feature (18427)..(18427): Xaa can be any naturally occurring amino acid
  misc_feature (18437)..(18438): Xaa can be any naturally occurring amino acid
  misc_feature (18440)..(18440): Xaa can be any naturally occurring amino acid
  misc_feature (18452)..(18453): Xaa can be any naturally occurring amino acid
  misc_feature (18462)..(18462): Xaa can be any naturally occurring amino acid
  misc_feature (18464)..(18465): Xaa can be any naturally occurring amino acid
  misc_feature (18467)..(18469): Xaa can be any naturally occurring amino acid
  misc_feature (18473)..(18473): Xaa can be any naturally occurring amino acid
  misc_feature (18477)..(18477): Xaa can be any naturally occurring amino acid
  misc_feature (18479)..(18479): Xaa can be any naturally occurring amino acid
  misc_feature (18485)..(18489): Xaa can be any naturally occurring amino acid
  misc_feature (18491)..(18492): Xaa can be any naturally occurring amino acid
  misc_feature (18503)..(18503): Xaa can be any naturally occurring amino acid
  misc_feature (18510)..(18510): Xaa can be any naturally occurring amino acid
  misc_feature (18512)..(18512): Xaa can be any naturally occurring amino acid
  misc_feature (18516)..(18516): Xaa can be any naturally occurring amino acid
  misc_feature (18520)..(18520): Xaa can be any naturally occurring amino acid
  misc_feature (18529)..(18529): Xaa can be any naturally occurring amino acid
  misc_feature (18532)..(18532): Xaa can be any naturally occurring amino acid
  misc_feature (18535)..(18535): Xaa can be any naturally occurring amino acid
  misc_feature (18541)..(18541): Xaa can be any naturally occurring amino acid
  misc_feature (18546)..(18546): Xaa can be any naturally occurring amino acid
  misc_feature (18548)..(18550): Xaa can be any naturally occurring amino acid
  misc_feature (18553)..(18553): Xaa can be any naturally occurring amino acid
  misc_feature (18557)..(18558): Xaa can be any naturally occurring amino acid
  misc_feature (18560)..(18560): Xaa can be any naturally occurring amino acid
  misc_feature (18567)..(18567): Xaa can be any naturally occurring amino acid
  misc_feature (18570)..(18571): Xaa can be any naturally occurring amino acid
  misc_feature (18573)..(18573): Xaa can be any naturally occurring amino acid
  misc_feature (18583)..(18583): Xaa can be any naturally occurring amino acid
  misc_feature (18713)..(18714): Xaa can be any naturally occurring amino acid
  misc_feature (18716)..(18716): Xaa can be any naturally occurring amino acid
  misc_feature (18723)..(18723): Xaa can be any naturally occurring amino acid
  misc_feature (18726)..(18727): Xaa can be any naturally occurring amino acid
  misc_feature (18729)..(18729): Xaa can be any naturally occurring amino acid
  misc_feature (18739)..(18739): Xaa can be any naturally occurring amino acid
  misc_feature (18749)..(18750): Xaa can be any naturally occurring amino acid
  misc_feature (18752)..(18752): Xaa can be any naturally occurring amino acid
  misc_feature (18764)..(18765): Xaa can be any naturally occurring amino acid
  misc_feature (18774)..(18774): Xaa can be any naturally occurring amino acid
  misc_feature (18776)..(18777): Xaa can be any naturally occurring amino acid
  misc_feature (18779)..(18781): Xaa can be any naturally occurring amino acid
  misc_feature (18785)..(18785): Xaa can be any naturally occurring amino acid
  misc_feature (18789)..(18789): Xaa can be any naturally occurring amino acid
  misc_feature (18791)..(18791): Xaa can be any naturally occurring amino acid
  misc_feature (18797)..(18801): Xaa can be any naturally occurring amino acid
  misc_feature (18803)..(18804): Xaa can be any naturally occurring amino acid
  misc_feature (18815)..(18815): Xaa can be any naturally occurring amino acid
  misc_feature (18822)..(18822): Xaa can be any naturally occurring amino acid
  misc_feature (18824)..(18824): Xaa can be any naturally occurring amino acid
  misc_feature (18828)..(18828): Xaa can be any naturally occurring amino acid
  misc_feature (18832)..(18832): Xaa can be any naturally occurring amino acid
  misc_feature (18841)..(18841): Xaa can be any naturally occurring amino acid
  misc_feature (18844)..(18844): Xaa can be any naturally occurring amino acid
  misc_feature (18847)..(18847): Xaa can be any naturally occurring amino acid
  misc_feature (18853)..(18853): Xaa can be any naturally occurring amino acid
  misc_feature (18858)..(18858): Xaa can be any naturally occurring amino acid
  misc_feature (18860)..(18862): Xaa can be any naturally occurring amino acid
  misc_feature (18865)..(18865): Xaa can be any naturally occurring amino acid
  misc_feature (18869)..(18870): Xaa can be any naturally occurring amino acid
  misc_feature (18872)..(18872): Xaa can be any naturally occurring amino acid
  misc_feature (18879)..(18879): Xaa can be any naturally occurring amino acid
  misc_feature (18882)..(18883): Xaa can be any naturally occurring amino acid
  misc_feature (18885)..(18885): Xaa can be any naturally occurring amino acid
  misc_feature (18895)..(18895): Xaa can be any naturally occurring amino acid
  misc_feature (19091)..(19093): Xaa can be any naturally occurring amino acid
  misc_feature (19097)..(19097): Xaa can be any naturally occurring amino acid
  misc_feature (19101)..(19101): Xaa can be any naturally occurring amino acid
  misc_feature (19103)..(19103): Xaa can be any naturally occurring amino acid
  misc_feature (19109)..(19113): Xaa can be any naturally occurring amino acid
  misc_feature (19115)..(19116): Xaa can be any naturally occurring amino acid
  misc_feature (19127)..(19127): Xaa can be any naturally occurring amino acid
  misc_feature (19134)..(19134): Xaa can be any naturally occurring amino acid
  misc_feature (19136)..(19136): Xaa can be any naturally occurring amino acid
  misc_feature (19140)..(19140): Xaa can be any naturally occurring amino acid
  misc_feature (19144)..(19144): Xaa can be any naturally occurring amino acid
  misc_feature (19153)..(19153): Xaa can be any naturally occurring amino acid
  misc_feature (19156)..(19156): Xaa can be any naturally occurring amino acid
  misc_feature (19159)..(19159): Xaa can be any naturally occurring amino acid
  misc_feature (19165)..(19165): Xaa can be any naturally occurring amino acid
  misc_feature (19170)..(19170): Xaa can be any naturally occurring amino acid
  misc_feature (19172)..(19174): Xaa can be any naturally occurring amino acid
  misc_feature (19177)..(19177): Xaa can be any naturally occurring amino acid
  misc_feature (19181)..(19182): Xaa can be any naturally occurring amino acid
  misc_feature (19184)..(19184): Xaa can be any naturally occurring amino acid
  misc_feature (19191)..(19191): Xaa can be any naturally occurring amino acid
  misc_feature (19194)..(19195): Xaa can be any naturally occurring amino acid
  misc_feature (19197)..(19197): Xaa can be any naturally occurring amino acid
  misc_feature (19207)..(19207): Xaa can be any naturally occurring amino acid
  misc_feature (19337)..(19338): Xaa can be any naturally occurring amino acid
  misc_feature (19340)..(19340): Xaa can be any naturally occurring amino acid
  misc_feature (19347)..(19347): Xaa can be any naturally occurring amino acid
  misc_feature (19350)..(19351): Xaa can be any naturally occurring amino acid
  misc_feature (19353)..(19353): Xaa can be any naturally occurring amino acid
  misc_feature (19363)..(19363): Xaa can be any naturally occurring amino acid
  misc_feature (19373)..(19374): Xaa can be any naturally occurring amino acid
  misc_feature (19376)..(19376): Xaa can be any naturally occurring amino acid
  misc_feature (19388)..(19389): Xaa can be any naturally occurring amino acid
  misc_feature (19398)..(19398): Xaa can be any naturally occurring amino acid
  misc_feature (19400)..(19401): Xaa can be any naturally occurring amino acid
  misc_feature (19403)..(19405): Xaa can be any naturally occurring amino acid
  misc_feature (19409)..(19409): Xaa can be any naturally occurring amino acid
  misc_feature (19413)..(19413): Xaa can be any naturally occurring amino acid
  misc_feature (19415)..(19415): Xaa can be any naturally occurring amino acid
  misc_feature (19421)..(19425): Xaa can be any naturally occurring amino acid
  misc_feature (19427)..(19428): Xaa can be any naturally occurring amino acid
  misc_feature (19439)..(19439): Xaa can be any naturally occurring amino acid
  misc_feature (19446)..(19446): Xaa can be any naturally occurring amino acid
  misc_feature (19448)..(19448): Xaa can be any naturally occurring amino acid
  misc_feature (19452)..(19452): Xaa can be any naturally occurring amino acid
  misc_feature (19456)..(19456): Xaa can be any naturally occurring amino acid
  misc_feature (19465)..(19465): Xaa can be any naturally occurring amino acid
  misc_feature (19468)..(19468): Xaa can be any naturally occurring amino acid
  misc_feature (19471)..(19471): Xaa can be any naturally occurring amino acid
  misc_feature (19477)..(19477): Xaa can be any naturally occurring amino acid
  misc_feature (19482)..(19482): Xaa can be any naturally occurring amino acid
  misc_feature (19484)..(19486): Xaa can be any naturally occurring amino acid
  misc_feature (19489)..(19489): Xaa can be any naturally occurring amino acid
  misc_feature (19493)..(19494): Xaa can be any naturally occurring amino acid
  misc_feature (19496)..(19496): Xaa can be any naturally occurring amino acid
  misc_feature (19503)..(19503): Xaa can be any naturally occurring amino acid
  misc_feature (19506)..(19507): Xaa can be any naturally occurring amino acid
  misc_feature (19509)..(19509): Xaa can be any naturally occurring amino acid
  misc_feature (19519)..(19519): Xaa can be any naturally occurring amino acid
  misc_feature (19649)..(19650): Xaa can be any naturally occurring amino acid
  misc_feature (19652)..(19652): Xaa can be any naturally occurring amino acid
  misc_feature (19659)..(19659): Xaa can be any naturally occurring amino acid
  misc_feature (19662)..(19663): Xaa can be any naturally occurring amino acid
  misc_feature (19665)..(19665): Xaa can be any naturally occurring amino acid
  misc_feature (19675)..(19675): Xaa can be any naturally occurring amino acid
  misc_feature (19685)..(19686): Xaa can be any naturally occurring amino acid
  misc_feature (19688)..(19688): Xaa can be any naturally occurring amino acid
  misc_feature (19700)..(19701): Xaa can be any naturally occurring amino acid
  misc_feature (19710)..(19710): Xaa can be any naturally occurring amino acid
  misc_feature (19712)..(19713): Xaa can be any naturally occurring amino acid
  misc_feature (19715)..(19717): Xaa can be any naturally occurring amino acid
  misc_feature (19721)..(19721): Xaa can be any naturally occurring amino acid
  misc_feature (19725)..(19725): Xaa can be any naturally occurring amino acid
  misc_feature (19727)..(19727): Xaa can be any naturally occurring amino acid
  misc_feature (19733)..(19737): Xaa can be any naturally occurring amino acid
  misc_feature (19739)..(19740): Xaa can be any naturally occurring amino acid
  misc_feature (19751)..(19751): Xaa can be any naturally occurring amino acid
  misc_feature (19758)..(19758): Xaa can be any naturally occurring amino acid
  misc_feature (19760)..(19760): Xaa can be any naturally occurring amino acid
  misc_feature (19764)..(19764): Xaa can be any naturally occurring amino acid
  misc_feature (19768)..(19768): Xaa can be any naturally occurring amino acid
  misc_feature (19777)..(19777): Xaa can be any naturally occurring amino acid
  misc_feature (19780)..(19780): Xaa can be any naturally occurring amino acid
  misc_feature (19783)..(19783): Xaa can be any naturally occurring amino acid
  misc_feature (19789)..(19789): Xaa can be any naturally occurring amino acid
  misc_feature (19794)..(19794): Xaa can be any naturally occurring amino acid
  misc_feature (19796)..(19798): Xaa can be any naturally occurring amino acid
  misc_feature (19801)..(19801): Xaa can be any naturally occurring amino acid
  misc_feature (19805)..(19806): Xaa can be any naturally occurring amino acid
  misc_feature (19808)..(19808): Xaa can be any naturally occurring amino acid
  misc_feature (19815)..(19815): Xaa can be any naturally occurring amino acid
  misc_feature (19818)..(19819): Xaa can be any naturally occurring amino acid
  misc_feature (19821)..(19821): Xaa can be any naturally occurring amino acid
  misc_feature (19831)..(19831): Xaa can be any naturally occurring amino acid
  misc_feature (19960)..(19961): Xaa can be any naturally occurring amino acid
  misc_feature (19963)..(19963): Xaa can be any naturally occurring amino acid
  misc_feature (19970)..(19970): Xaa can be any naturally occurring amino acid
  misc_feature (19973)..(19974): Xaa can be any naturally occurring amino acid
  misc_feature (19976)..(19976): Xaa can be any naturally occurring amino acid
  misc_feature (19986)..(19986): Xaa can be any naturally occurring amino acid
  misc_feature (19996)..(19997): Xaa can be any naturally occurring amino acid
  misc_feature (19999)..(19999): Xaa can be any naturally occurring amino acid
  misc_feature (20011)..(20012): Xaa can be any naturally occurring amino acid
  misc_feature (20021)..(20021): Xaa can be any naturally occurring amino acid
  misc_feature (20023)..(20024): Xaa can be any naturally occurring amino acid
  misc_feature (20026)..(20028): Xaa can be any naturally occurring amino acid
  misc_feature (20032)..(20032): Xaa can be any naturally occurring amino acid
  misc_feature (20036)..(20036): Xaa can be any naturally occurring amino acid
  misc_feature (20038)..(20038): Xaa can be any naturally occurring amino acid
  misc_feature (20044)..(20048): Xaa can be any naturally occurring amino acid
  misc_feature (20050)..(20051): Xaa can be any naturally occurring amino acid
  misc_feature (20062)..(20062): Xaa can be any naturally occurring amino acid
  misc_feature (20069)..(20069): Xaa can be any naturally occurring amino acid
  misc_feature (20071)..(20071): Xaa can be any naturally occurring amino acid
  misc_feature (20075)..(20075): Xaa can be any naturally occurring amino acid
  misc_feature (20079)..(20079): Xaa can be any naturally occurring amino acid
  misc_feature (20088)..(20088): Xaa can be any naturally occurring amino acid
  misc_feature (20091)..(20091): Xaa can be any naturally occurring amino acid
  misc_feature (20094)..(20094): Xaa can be any naturally occurring amino acid
  misc_feature (20100)..(20100): Xaa can be any naturally occurring amino acid
  misc_feature (20105)..(20105): Xaa can be any naturally occurring amino acid
  misc_feature (20107)..(20109): Xaa can be any naturally occurring amino acid
  misc_feature (20112)..(20112): Xaa can be any naturally occurring amino acid
  misc_feature (20116)..(20117): Xaa can be any naturally occurring amino acid
  misc_feature (20119)..(20119): Xaa can be any naturally occurring amino acid
  misc_feature (20126)..(20126): Xaa can be any naturally occurring amino acid
  misc_feature (20129)..(20130): Xaa can be any naturally occurring amino acid
  misc_feature (20132)..(20132): Xaa can be any naturally occurring amino acid
  misc_feature (20142)..(20142): Xaa can be any naturally occurring amino acid
  misc_feature (20272)..(20273): Xaa can be any naturally occurring amino acid
  misc_feature (20275)..(20275): Xaa can be any naturally occurring amino acid
  misc_feature (20282)..(20282): Xaa can be any naturally occurring amino acid
  misc_feature (20285)..(20286): Xaa can be any naturally occurring amino acid
  misc_feature (20288)..(20288): Xaa can be any naturally occurring amino acid
  misc_feature (20298)..(20298): Xaa can be any naturally occurring amino acid
  misc_feature (20308)..(20309): Xaa can be any naturally occurring amino acid
  misc_feature (20311)..(20311): Xaa can be any naturally occurring amino acid
  misc_feature (20323)..(20324): Xaa can be any naturally occurring amino acid
  misc_feature (20333)..(20333): Xaa can be any naturally occurring amino acid
  misc_feature (20335)..(20336): Xaa can be any naturally occurring amino acid
  misc_feature (20806)..(20808): Xaa can be any naturally occurring amino acid
  misc_feature (20812)..(20812): Xaa can be any naturally occurring amino acid
  misc_feature (20816)..(20816): Xaa can be any naturally occurring amino acid
  misc_feature (20818)..(20818): Xaa can be any naturally occurring amino acid
  misc_feature (20824)..(20828): Xaa can be any naturally occurring amino acid
  misc_feature (20830)..(20831): Xaa can be any naturally occurring amino acid
MLKPSGLPGSSSPTRSLMTGSRSTKATPEMDSGLTGATLSPKTSTGAIVVTEHTLPFTSPDKTLASPTSSVVGRTTQSLGVMSSALPESTSRGMTHSEQRTSPSLSPQVNGTPSRNYPATSMVSGLSSPRTRTSSTEGNFTKEASTYTLTVETTSGPVTEKYTVPTETSTTEGDSTETPWDTRYIPVKITSPMKTFADSTASKENAPVSMTPAETTVTDSHTPGRTNPSFGTLYSSFLDLSPKGTPNSRGETSLELILSTTGYPFSSPEPGSAGHSRISTSAPLSSSASVLDNKISETSIFSGQSLTSPLSPGVPEARASTMPNSAIPFSMTLSNAETSAERVRSTISSLGTPSISTKQTAETILTFHAFAETMDIPSTHIAKTLASEWLGSPGTLGGTSTSALTTTSPSTTLVSEETNTHHSTSGKETEGTLNTSMTPLETSAPGEESEMTATLVPTLGFTTLDSKIRSPSQVSSSHPTRELRTTGSTSGRQSSSTAAHGSSDILRATTSSTSKASSWTSESTAQQFSEPQHTQWVETSPSMKTERPPASTSVAAPITTSVPSVVSGFTTLKTSSTKGIWLEETSADTLIGESTAGPTTHQFAVPTGISMTGGSSTRGSQGTTHLLTRATASSETSADLTLATNGVPVSVSPAVSKTAAGSSPPGGTKPSYTMVSSVIPETSSLQSSAFREGTSLGLTPLNTRHPFSSPEPDSAGHTKISTSIPLLSSASVLEDKVSATSTFSHHKATSSITTGTPEISTKTKPSSAVLSSMTLSNAATSPERVRNATSPLTHPSPSGEETAGSVLTLSTSAETTDSPNIHPTGTLTSESSESPSTLSLPSVSGVKTTFSSSTPSTHLFTSGEETEETSNPSVSQPETSVSRVRTTLASTSVPTPVFPTMDTWPTRSAQFSSSHLVSELRATSSTSVTNSTGSALPKISHLTGTATMSQTNRDTFNDSAAPQSTTWPETSPRFKTGLPSATTTVSTSATSLSATVMVSKFTSPATSSMEATSIREPSTTILTTETTNGPGSMAVASTNIPIGKGYITEGRLDTSHLPIGTTASSETSMDFTMAKESVSMSVSPSQSMDAAGSSTPGRTSQFVDTFSDDVYHLTSREITIPRDGTSSALTPQMTATHPPSPDPGSARSTWLGILSSSPSSPTPKVTMSSTFSTQRVTTSMIMDTVETSRWNMPNLPSTTSLTPSNIPTSGAIGKSTLVPLDTPSPATSLEASEGGLPTLSTYPESTNTPSIHLGAHASSESPSTIKLTMASVVKPGSYTPLTFPSIETHIHVSTARMAYSSGSSPEMTAPGETNTGSTWDPTTYITTTDPKDTSSAQVSTPHSVRTLRTTENHPKTESATPAAYSGSPKISSSPNLTSPATKAWTITDTTEHSTQLHYTKLAEKSSGFETQSAPGPVSVVIPTSPTIGSSTLELTSDVPGEPLVLAPSEQTTITLPMATWLSTSLTEEMASTDLDISSPSSPMSTFAIFPPMSTPSHELSKSEADTSAIRNTDSTTLDQHLGIRSLGRTGDLTTVPITPLTTTWTSVIEHSTQAQDTLSATMSPTHVTQSLKDQTSIPASASPSHLTEVYPELGTQGRSSSEATTFWKPSTDTLSREIETGPTNIQSTPPMDNTTTGSSSSGVTLGIAHLPIGTSSPAETSTNMALERRSSTATVSMAGTMGLLVTSAPGRSISQSLGRVSSVLSESTTEGVTDSSKGSSPRLNTQGNTALSSSLEPSYAEGSQMSTSIPLTSSPTTPDVEFIGGSTFWTKEVTTVMTSDISKSSARTESSSATLMSTALGSTENTGKEKLRTASMDLPSPTPSMEVTPWISLTLSNAPNTTDSLDLSHGVHTSSAGTLATDRSLNTGVTRASRLENGSDTSSKSLSMGNSTHTSMTDTEKSEVSSSIHPRPETSAPGAETTLTSTPGNRAISLTLPFSSIPVEEVISTGITSGPDINSAPMTHSPITPPTIVWTSTGTIEQSTQPLHAVSSEKVSVQTQSTPYVNSVAVSASPTHENSVSSGSSTSSPYSSASLESLDSTISRRNAITSWLWDLTTSLPTTTWPSTSLSEALSSGHSGVSNPSSTTTEFPLFSAASTSAAKQRNPETETHGPQNTAASTLNTDASSVTGLSETPVGASISSEVPLPMAITSRSDVSGLTSESTANPSLGTASSAGTKLTRTISLPTSESLVSFRMNKDPWTVSIPLGSHPTTNTETSIPVNSAGPPGLSTVASDVIDTPSDGAESIPTVSFSPSPDTEVTTISHFPEKTTHSFRTISSLTHELTSRVTPIPGDWMSSAMSTKPTGASPSITLGERRTITSAAPTTSPIVLTASFTETSTVSLDNETTVKTSDILDARKTNELPSDSSSSSDLINTSIASSTMDVTKTASISPTSISGMTASSSPSLFSSDRPQVPTSTTETNTATSPSVSSNTYSLDGGSNVGGTPSTLPPFTITHPVETSSALLAWSRPVRTFSTMVSTDTASGENPTSSNSVVTSVPAPGTWASVGSTTDLPAMGFLKTSPAGEAHSLLASTIEPATAFTPHLSAAVVTGSSATSEASLLTTSESKAIHSSPQTPTTPTSGANWETSATPESLLVVTETSDTTLTSKILVTDTILFSTVSTPPSKFPSTGTLSGASFPTLLPDTPAIPLTATEPTSSLATSFDSTPLVTIASDSLGTVPETTLTMSETSNGDALVLKTVSNPDRSIPGITIQGVTESPLHPSSTSPSKIVAPRNTTYEGSITVALSTLPAGTTGSLVFSQSSENSETTALVDSSAGLERASVMPLTTGSQGMASSGGIRSGSTHSTGTKTFSSLPLTMNPGEVTAMSEITTNRLTATQSTAPKGIPVKPTSAESGLLTPVSASSSPSKAFASLTTAPPSTWGIPQSTLTFEFSEVPSLDTKSASLPTPGQSLNTIPDSDASTASSSLSKSPEKNPRARMMTSTKAISASSFQSTGFTETPEGSASPSMAGHEPRVPTSGTGDPRYASESMSYPDPSKASSAMTSTSLASKLTTLFSTGQAARSGSSSSPISLSTEKETSFLSPTASTSRKTSLFLGPSMARQPNILVHLQTSALTLSPTSTLNMSQEEPPELTSSQTIAEEEGTTAETQTLTFTPSETPTSLLPVSSPTEPTARRKSSPETWASSISVPAKTSLVETTDGTLVTTIKMSSQAAQGNSTWPAPAEETGTSPAGTSPGSPEVSTTLKIMSSKEPSISPEIRSTVRNSPWKTPETTVPMETTVEPVTLQSTALGSGSTSISHLPTGTTSPTKSPTENMLATERVSLSPSPPEAWTNLYSGTPGGTRQSLATMSSVSLESPTARSITGTGQQSSPELVSKTTGMEFSMWHGSTGGTTGDTHVSLSTSSNILEDPVTSPNSVSSLTDKSKHKTETWVSTTAIPSTVLNNKIMAAEQQTSRSVDEAYSSTSSWSDQTSGSDITLGASPDVTNTLYITSTAQTTSLVSLPSGDQGITSLTNPSGGKTSSASSVTSPSIGLETLRANVSAVKSDIAPTAGHLSQTSSPAEVSILDVTTAPTPGISTTITTMGTNSISTTTPNPEVGMSTMDSTPATERRTTSTEHPSTWSSTAASDSWTVTDMTSNLKVARSPGTISTMHTTSFLASSTELDSMSTPHGRITVIGTSLVTPSSDASAVKTETSTSERTLSPSDTTASTPISTFSRVQRMSISVPDILSTSWTPSSTEAEDVPVSMVSTDHASTKTDPNTPLSTFLFDSLSTLDWDTGRSLSSATATTSAPQGATTPQELTLETMISPATSQLPFSIGHITSAVTPAAMARSSGVTFSRPDPTSKKAEQTSTQLPTTTSAHPGQVPRSAATTLDVIPHTAKTPDATFQRQGQTALTTEARATSDSWNEKEKSTPSAPWITEMMNSVSEDTIKEVTSSSSVLKDPEYAGHKLGIWDDFIPKFGKAAHMRELPLLSPPQDKEAIHPSTNTVETTGWVTSSEHASHSTIPAHSASSKLTSPVVTTSTREQAIVSMSTTTWPESTRARTEPNSFLTIELRDVSPYMDTSSTTQTSIISSPGSTAITKGPRTEITSSKRISSSFLAQSMRSSDSPSEAITRLSNFPAMTESGGMILAMQTSPPGATSLSAPTLDTSATASWTGTPLATTQRFTYSEKTTLFSKGPEDTSQPSPPSVEETSSSSSLVPIHATTSPSNILLTSQGHSPSSTPPVTSVFLSETSGLGKTTDMSRISLEPGTSLPPNLSSTAGEALSTYEASRDTKAIHHSADTAVTNMEATSSEYSPIPGHTKPSKATSPLVTSHIMGDITSSTSVFGSSETTEIETVSSVNQGLQERSTSQVASSATETSTVITHVSSGDATTHVTKTQATFSSGTSISSPHQFITSTNTFTDVSTNPSTSLIMTESSGVTITTQTGPTGAATQGPYLLDTSTMPYLTETPLAVTPDFMQSEKTTLISKGPKDVTWTSPPSVAETSYPSSLTPFLVTTIPPATSTLQGQHTSSPVSATSVLTSGLVKTTDMLNTSMEPVTNSPQNLNNPSNEILATLAATTDIETIHPSINKAVTNMGTASSAHVLHSTLPVSSEPSTATSPMVPASSMGDALASISIPGSETTDIEGEPTSSLTAGRKENSTLQEMNSTTESNIILSNVSVGAITEATKMEVPSFDATFIPTPAQSTKFPDIFSVASSRLSNSPPMTISTHMTTTQTGSSGATSKIPLALDTSTLETSAGTPSVVTEGFAHSKITTAMNNDVKDVSQTNPPFQDEASSPSSQAPVLVTTLPSSVAFTPQWHSTSSPVSMSSVLTSSLVKTAGKVDTSLETVTSSPQSMSNTLDDISVTSAATTDIETTHPSINTVVTNVGTTGSAFESHSTVSAYPEPSKVTSPNVTTSTMEDTTISRSIPKSSKTTRTETETTSSLTPKLRETSISQEITSSTETSTVPYKELTGATTEVSRTDVTSSSSTSFPGPDQSTVSLDISTETNTRLSTSPIMTESAEITITTQTGPHGATSQDTFTMDPSNTTPQAGIHSAMTHGFSQLDVTTLMSRIPQDVSWTSPPSVDKTSSPSSFLSSPAMTTPSLISSTLPEDKLSSPMTSLLTSGLVKITDILRTRLEPVTSSLPNFSSTSDKILATSKDSKDTKEIFPSINTEETNVKANNSGHESHSPALADSETPKATTQMVITTTVGDPAPSTSMPVHGSSETTNIKREPTYFLTPRLRETSTSQESSFPTDTSFLLSKVPTGTITEVSSTGVNSSSKISTPDHDKSTVPPDTFTGEIPRVFTSSIKTKSAEMTITTQASPPESASHSTLPLDTSTTLSQGGTHSTVTQGFPYSEVTTLMGMGPGNVSWMTTPPVEETSSVSSLMSSPAMTSPSPVSSTSPQSIPSSPLPVTALPTSVLVTTTDVLGTTSPESVTSSPPNLSSITHERPATYKDTAHTEAAMHHSTNTAVTNVGTSGSGHKSQSSVLADSETSKATPLMSTTSTLGDTSVSTSTPNISQTNQIQTEPTASLSPRLRESSTSEKTSSTTETNTAFSYVPTGAITQASRTEISSSRTSISDLDRPTIAPDISTGMITRLFTSPIMTKSAEMTVTTQTTTPGATSQGILPWDTSTTLFQGGTHSTVSQGFPHSEITTLRSRTPGDVSWMTTPPVEETSSGFSLMSPSMTSPSPVSSTSPESIPSSPLPVTALLTSVLVTTTNVLGTTSPETVTSSPPNLSSPTQERLTTYKDTAHTEAMHASMHTNTAVANVGTSISGHESQSSVPADSHTSKATSPMGITFAMGDTSVSTSTPAFFETRIQTESTSSLIPGLRDTRTSEEINTVTETSTVLSEVPTTTTTEVSRTEVITSSRTTISGPDHSKMSPYISTETITRLSTFPFVTGSTEMAITNQTGPIGTISQATLTLDTSSTASWEGTHSPVTQRFPHSEETTTMSRSTKGVSWQSPPSVEETSSPSSPVPLPAITSHSSLYSAVSGSSPTSALPVTSLLTSGRRKTIDMLDTHSELVTSSLPSASSFSGEILTSEASTNTETIHFSENTAETNMGTTNSMHKLHSSVSIHSQPSGHTPPKVTGSMMEDAIVSTSTPGSPETKNVDRDSTSPLTPELKEDSTALVMNSTTESNTVFSSVSLDAATEVSRAEVTYYDPTFMPASAQSTKSPDISPEASSSHSNSPPLTISTHKTIATQTGPSGVTSLGQLTLDTSTIATSAGTPSARTQDFVDSETTSVMNNDLNDVLKTSPFSAEEANSLSSQAPLLVTTSPSPVTSTLQEHSTSSLVSVTSVPTPTLAKITDMDTNLEPVTRSPQNLRNTLATSEATTDTHTMHPSINTAMANVGTTSSPNEFYFTVSPDSDPYKATSAVVITSTSGDSIVSTSMPRSSAMKKIESETTFSLIFRLRETSTSQKIGSSSDTSTVFDKAFTAATTEVSRTELTSSSRTSIQGTEKPTMSPDTSTRSVTMLSTFAGLTKSEERTIATQTGPHRATSQGTLTWDTSITTSQAGTHSAMTHGFSQLDLSTLTSRVPEYISGTSPPSVEKTSSSSSLLSLPAITSPSPVPTTLPESRPSSPVHLTSLPTSGLVKTTDMLASVASLPPNLGSTSHKIPTTSEDIKDTEKMYPSTNIAVTNVGTTTSEKESYSSVPAYSEPPKVTSPMVTSFNIRDTIVSTSMPGSSEITRIEMESTFSVAHGLKGTSTSQDPIVSTEKSAVLHKLTTGATETSRTEVASSRRTSIPGPDHSTESPDISTEVIPSLPISLGITESSNMTIITRTGPPLGSTSQGTFTLDTPTTSSRAGTHSMATQEFPHSEMTTVMNKDPEILSWTIPPSIEKTSFSSSLMPSPAMTSPPVSSTLPKTIHTTPSPMTSLLTPSLVMTTDTLGTSPEPTTSSPPNLSSTSHVILTTDEDTTAIEAMHPSTSTAATNVETTCSGHGSQSSVLTDSEKTKATAPMDTTSTMGHTTVSTSMSVSSETTKIKRESTYSLTPGLRETSISQNASFSTDTSIVLSEVPTGTTAEVSRTEVTSSGRTSIPGPSQSTVLPEISTRTMTRLFASPTMTESAEMTIPTQTGPSGSTSQDTLTLDTSTTKSQAKTHSTLTQRFPHSEMTTLMSRGPGDMSWQSSPSLENPSSLPSLLSLPATTSPPPISSTLPVTISSSPLPVTSLLTSSPVTTTDMLHTSPELVTSSPPKLSHTSDERLTTGKDTTNTEAVHPSTNTAASNVEIPSFGHESPSSALADSETSKATSPMFITSTQEDTTVAISTPHFLETSRIQKESISSLSPKLRETGSSVETSSAIETSAVLSEVSIGATTEISRTEVTSSSRTSISGSAESTMLPEISTTRKIIKFPTSPILAESSEMTIKTQTSPPGSTSESTFTLDTSTTPSLVITHSTMTQRLPHSEITTLVSRGAGDVPRPSSLPVEETSPPSSQLSLSAMISPSPVSSTLPASSHSSSASVTSPLTPGQVKTTEVLDASAEPETSSPPSLSSTSVEILATSEVTTDTEKIHPFPNTAVTKVGTSSSGHESPSSVLPDSETTKATSAMGTISIMGDTSVSTLTPALSNTRKIQSEPASSLTTRLRETSTSEETSLATEANTVLSKVSTGATTEVSRTEAISFSRTSMSGPEQSTMSQDISIGTIPRISASSVLTESAKMTITTQTGPSESTLESTLNLNTATTPSWVETHSIVIQGFPHPEMTTSMGRGPGGVSWPSPPFVKETSPPSSPLSLPAVTSPHPVSTTFLAHIPPSPLPVTSLLTSGPATTTDILGTSTEPGTSSSSSLSTTSHERLTTYKDTAHTEAVHPSTNTGGTNVATTSSGYKSQSSVLADSSPMCTTSTMGDTSVLTSTPAFLETRRIQTELASSLTPGLRESSGSEGTSSGTKMSTVLSKVPTGATTEISKEDVTSIPGPAQSTISPDISTRTVSWFSTSPVMTESAEITMNTHTSPLGATTQGTSTLATSSTTSLTMTHSTISQGFSHSQMSTLMRRGPEDVSWMSPPLLEKTRPSFSLMSSPATTSPSPVSSTLPESISSSPLPVTSLLTSGLAKTTDMLHKSSEPVTNSPANLSSTSVEILATSEVTTDTEKTHPSSNRTVTDVGTSSSGHESTSFVLADSQTSKVTSPMVITSTMEDTSVSTSTPGFFETSRIQTEPTSSLTLGLRKTSSSEGTSLATEMSTVLSGVPTGATAEVSRTEVTSSSRTSISGFAQLTVSPETSTETITRLPTSSIMTESAEMMIKTQTDPPGSTPESTHTVDISTTPNWVETHSTVTQRFSHSEMTTLVSRSPGDMLWPSQSSVEETSSASSLLSLPATTSPSPVSSTLVEDFPSASLPVTSLLTPGLVITTDRMGISREPGTSSTSNLSSTSHERLTTLEDTVDTEDMQPSTHTAVTNVRTSISGHESQSSVLSDSETPKATSPMGTTYTMGETSVSISTSDFFETSRIQIEPTSSLTSGLRETSSSERISSATEGSTVLSEVPSGATTEVSRTEVISSRGTSMSGPDQFTISPDISTEAITRLSTSPIMTESAESAITIETGSPGATSEGTLTLDTSTTTFWSGTHSTASPGFSHSEMTTLMSRTPGDVPWPSLPSVEEASSVSSSLSSPAMTSTSFFSALPESISSSPHPVTALLTLGPVKTTDMLRTSSEPETSSPPNLSSTSAEILATSEVTKDREKIHPSSNTPVVNVGTVIYKHLSPSSVLADLVTTKPTSPMATTSTLGNTSVSTSTPAFPETMMTQPTSSLTSGLREISTSQETSSATERSASLSGMPTGATTKVSRTEALSLGRTSTPGPAQSTISPEISTETITRISTPLTTTGSAEMTITPKTGHSGASSQGTFTLDTSSRASWPGTHSAATHRSPHSGMTTPMSRGPEDVSWPSRPSVEKTSPPSSLVSLSAVTSPSPLYSTPSESSHSSPLRVTSLFTPVMMKTTDMLDTSLEPVTTSPPSMNITSDESLATSKATMETEAIQLSENTAVTQMGTISARQEFYSSYPGLPEPSKVTSPVVTSSTIKDIVSTTIPASSEITRIEMESTSTLTPTPRETSTSQEIHSATKPSTVPYKALTSATIEDSMTQVMSSSRGPSPDQSTMSQDISSEVITRLSTSPIKAESTEMTITTQTGSPGATSRGTLTLDTSTTFMSGTHSTASQGFSHSQMTALMSRTPGDVPWLSHPSVEEASSASFSLSSPVMTSSSPVSSTLPDSIHSSSLPVTSLLTSGLVKTTELLGTSSEPETSSPPNLSSTSAEILATTEVTTDTEKLEMTNVVTSGYTHESPSSVLADSVTTKATSSMGITYPTGDTNVLTSTPAFSDTSRIQTKSKLSLTPGLMETSISEETSSATEKSTVLSSVPTGATTEVSRTEAISSSRTSIPGPAQSTMSSDTSMETITRISTPLTRKESTDMAITPKTGPSGATSQGTFTLDSSSTASWPGTHSATTQRFPQSVVTTPMSRGPEDVSWPSPLSVEKNSPPSSLVSSSSVTSPSPLYSTPSGSSHSSPVPVTSLFTSIMMKATDMLDASLEPETTSAPNMNITSDESLATSKATTETEAIHVFENTAASHVETTSATEELYSSSPGFSEPTKVISPVVTSSSIRDNMVSTTMPGSSGITRIEIESMSSLTPGLRETRTSQDITSSTETSTVLYKMSSGATPEVSRTEVMPSSRTSIPGPAQSTMSLDISDEVVTRLSTSPIMTESAEITITTQTGYSLATSQVTLPLGTSMTFLSGTHSTMSQGLSHSEMTNLMSRGPESLSWTSPRFVETTRSSSSLTSLPLTTSLSPVSSTLLDSSPSSPLPVTSLILPGLVKTTEVLDTSSEPKTSSSPNLSSTSVEIPATSEIMTDTEKIHPSSNTAVAKVRTSSSVHESHSSVLADSETTITIPSMGITSAVDDTTVFTSNPAFSETRRIPTEPTFSLTPGFRETSTSEETTSITETSAVLYGVPTSATTEVSMTEIMSSNRTHIPDSDQSTMSPDIITEVITRLSSSSMMSESTQMTITTQKSSPGATAQSTLTLATTTAPLARTHSTVPPRFLHSEMTTLMSRSPENPSWKSSPFVEKTSSSSSLLSLPVTTSPSVSSTLPQSIPSSSFSVTSLLTPGMVKTTDTSTEPGTSLSPNLSGTSVEILAASEVTTDTEKIHPSSSMAVTNVGTTSSGHELYSSVSIHSEPSKATYPVGTPSSMAETSISTSMPANFETTGFEAEPFSHLTSGFRKTNMSLDTSSVTPTNTPSSPGSTHLLQSSKTDFTSSAKTSSPDWPPASQYTEIPVDIITPFNASPSITESTGITSFPESRFTMSVTESTHHLSTDLLPSAETISTGTVMPSLSEAMTSFATTGVPRAISGSGSPFSRTESGPGDATLSTIAESLPSSTPVPFSSSTFTTTDSSTIPALHEITSSSATPYRVDTSLGTESSTTEGRLVMVSTLDTSSQPGRTSSTPILDTRMTESVELGTVTSAYQVPSLSTRLTRTDGIMEHITKIPNEAAHRGTIRPVKGPQTSTSPASPKGLHTGGTKRMETTTTALKTTTTALKTTSRATLTTSVYTPTLGTLTPLNASRQMASTILTEMMITTPYVFPDVPETTSSLATSLGAETSTALPRTTPSVLNRESETTASLVSRSGAERSPVIQTLDVSSSEPDTTASWVIHPAETIPTVSKTTPNFFHSELDTVSSTATSHGADVSSAIPTNISPSELDALTPLVTISGTDTSTTFPTLTKSPHETETRTTWLTHPAETSSTIPRTIPNFSHHESDATPSIATSPGAETSSAIPIMTVSPGAEDLVTSQVTSSGTDRNMTIPTLTLSPGEPKTIASLVTHPEAQTSSAIPTSTISPAVSRLVTSMVTSLAAKTSTTNRALTNSPGEPATTVSLVTHPAQTSPTVPWTTSIFFHSKSDTTPSMTTSHGAESSSAVPTPTVSTEVPGVVTPLVTSSRAVISTTIPILTLSPGEPETTPSMATSHGEEASSAIPTPTVSPGVPGVVTSLVTSSRAVTSTTIPILTFSLGEPETTPSMATSHGTEAGSAVPTVLPEVPGMVTSLVASSRAVTSTTLPTLTLSPGEPETTPSMATSHGAEASSTVPTVSPEVPGVVTSLVTSSSGVNSTSIPTLILSPGELETTPSMATSHGAEASSAVPTPTVSPGVSGVVTPLVTSSRAVTSTTIPILTLSSSEPETTPSMATSHGVEASSAVLTVSPEVPGMVTSLVTSSRAVTSTTIPTLTISSDEPETTTSLVTHSEAKMISAIPTLAVSPTVQGLVTSLVTSSGSETSAFSNLTVASSQPETIDSWVAHPGTEASSVVPTLTVSTGEPFTNISLVTHPAESSSTLPRTTSRFSHSELDTMPSTVTSPEAESSSAISTTISPGIPGVLTSLVTSSGRDISATFPTVPESPHESEATASWVTHPAVTSTTVPRTTPNYSHSEPDTTPSIATSPGAEATSDFPTITVSPDVPDMVTSQVTSSGTDTSITIPTLTLSSGEPETTTSFITYSETHTSSAIPTLPVSPGASKMLTSLVISSGTDSTTTFPTLTETPYEPETTAIQLIHPAETNTMVPKTTPKFSHSKSDTTLPVAITSPGPEASSAVSTTTISPDMSDLVTSLVPSSGTDTSTTFPTLSETPYEPETTVTWLTHPAETSTTVSGTIPNFSHRGSDTAPSMVTSPGVDTRSGVPTTTIPPSIPGVVTSQVTSSATDTSTAIPTLTPSPGEPETTASSATHPGTQTGFTVPIRTVPSSEPDTMASWVTHPPQTSTPVSRTTSSFSHSSPDATPVMATSPRTEASSAVLTTISPGAPEMVTSQITSSGAATSTTVPTLTHSPGMPETTALLSTHPRTGTSKTFPASTVFPQVSETTASLTIRPGAETSTALPTQTTSSLFTLLVTGTSRVDLSPTASPGVSAKTAPLSTHPGTETSTMIPTSTLSLGLLETTGLLATSSSAETSTSTLTLTVSPAVSGLSSASITTDKPQTVTSWNTETSPSVTSVGPPEFSRTVTGTTMTLIPSEMPTPPKTSHGEGVSPTTILRTTMVEATNLATTGSSPTVAKTTTTFNTLAGSLFTPLTTPGMSTLASESVTSRTSYNHRSWISTTSSYNRRYWTPATSTPVTSTFSPGISTSSIPSSTAATVPFMVPFTLNFTITNLQYEEDMRHPGSRKFNATERELQGLLKPLFRNSSLEYLYSGCRLASLRPEKDSSAMAVDAICTHRPDPEDLGLDRERLYWELSNLTNGIQELGPYTLDRNSLYVNGFTHRSSMPTTSTPGTSTVDVGTSGTPSSSPSPTAAGPLLMPFTLNFTITNLQYEEDMRRTGSRKFNTMESVLQGLLKPLFKNTSVGPLYSGCRLTLLRPEKDGAATGVDAICTHRLDPKSPGLNREQLYWELSKLTNDIEELGPYTLDRNSLYVNGFTHQSSVSTTSTPGTSTVDLRTSGTPSSLSSPTIMAAGPLLVPFTLNFTITNLQYGEDMGHPGSRKFNTTERVLQGLLGPIFKNTSVGPLYSGCRLTSLRSEKDGAATGVDAICIHHLDPKSPGLNRERLYWELSQLTNGIKELGPYTLDRNSLYVNGFTHRTSVPTTSTPGTSTVDLGTSGTPFSLPSPATAGPLLVLFTLNFTITNLKYEEDMHRPGSRKFNTTERVLQTLLGPMFKNTSVGLLYSGCRLTLLRSEKDGAATGVDAICTHRLDPKSPGLDREQLYWELSQLTNGIKELGPYTLDRNSLYVNGFTHWIPVPTSSTPGTSTVDLGSGTPSSLPSPTAAGPLLVPFTLNFTITNLQYEEDMHHPGSRKFNTTERVLQGLLGPMFKNTSVGLLYSGCRLTLLRSEKDGAATGVDAICTHRLDPKSPGVDREQLYWELSQLTNGIKELGPYTLDRNSLYVNGFTHQTSAPNTSTPGTSTVDLGTSGTPSSLPSPTSAGPLLVPFTLNFTITNLQYEEDMRHPGSRKFNTTERVLQGLLKPLFKSTSVGPLYSGCRLTLLRSEKDGAATGVDAICTHRLDPKSPGVDREQLYWELSQLTNGIKELGPYTLDRNSLYVNGFTHQTSAPNTSTPGTSTVDLGTSGTPSSLPSPTSAGPLLVPFTLNFTITNLQYEEDMHHPGSRKFNTTERVLQGLLGPMFKNTSVGLLYSGCRLTLLRPEKNGAATGMDAICSHRLDPKSPGLNREQLYWELSQLTHGIKELGPYTLDRNSLYVNGFTHRSSVAPTSTPGTSTVDLGTSGTPSSLPSPTTAVPLLVPFTLNFTITNLQYGEDMRHPGSRKFNTTERVLQGLLGPLFKNSSVGPLYSGCRLISLRSEKDGAATGVDAICTHHLNPQSPGLDREQLYWQLSQMTNGIKELGPYTLDRNSLYVNGFTHRSSGLTTSTPWTSTVDLGTSGTPSPVPSPTTAGPLLVPFTLNFTITNLQYEEDMHRPGSRKFNTTERVLQGLLSPIFKNSSVGPLYSGCRLTSLRPEKDGAATGMDAVCLYHPNPKRPGLDREQLYWELSQLTHNITELGPYSLDRDSLYVNGFTHQNSVPTTSTPGTSTVYWATTGTPSSFPGHTEPGPLLIPFTFNFTITNLHYEENMQHPGSRKFNTTERVLQGLLKPLFKNTSVGPLYSGCRLTSLRPEKDGAATGMDAVCLYHPNPKRPGLDREQLYWELSQLTHNITELGPYSLDRDSLYVNGFTHQNSVPTTSTPGTSTVYWATTGTPSSFPGHTEPGPLLIPFTFNFTITNLHYEENMQHPGSRKFNTTERVLQGLLKPLFKNTSVGPLYSGCRLTLLRPEKHEAATGVDTICTHRVDPIGPGLDRERLYWELSQLTNSITELGPYTLDRDSLYVNGFNPRSSVPTTSTPGTSTVHLATSGTPSSLPGHTAPVPLLIPFTLNFTITNLHYEENMQHPGSRKFNTTERVLQGLLKPLFKNTSVGPLYSGCRLTLLRPEKHEAATGVDTICTHRVDPIGPGLXXEXLYWELSXLTXXIXELGPYTLDRXSLYVNGFTHXXSXPTTSTPGTSTVXXGTSGTPSSXPXXTSAGPLLVPFTLNFTITNLQYEEDMHHPGSRKFNTTERVLQGLLGPMFKNTSVGLLYSGCRLTLLRPEKNGAATGMDAICSHRLDPKSPGLDREQLYWELSQLTHGIKELGPYTLDRNSLYVNGFTHRSSVAPTSTPGTSTVDLGTSGTPSSLPSPTTAVPLLVPFTLNFTITNLQYGEDMRHPGSRKFNTTERVLQGLLGPLFKNSSVGPLYSGCRLISLRSEKDGAATGVDAICTHHLNPQSPGLDREQLYWQLSQMTNGIKELGPYTLDRNSLYVNGFTHRSSGLTTSTPWTSTVDLGTSGTPSPVPSPTTAGPLLVPFTLNFTITNLQYEEDMHRPGSRKFNATERVLQGLLSPIFKNSSVGPLYSGCRLTSLRPEKDGAATGMDAVCLYHPNPKRPGLDREQLYWELSQLTHNITELGPYSLDRDSLYVNGFTHQSSMTTTRTPDTSTMHLATSRTPASLSGPTTASPLLVLFTINCTITNLQYEEDMRRTGSRKFNTMESVLQGLLKPLFKNTSVGPLYSGCRLTLLRPKKDGAATGVDAICTHRLDPKSPGLNREQLYWELSKLTNDIEELGPYTLDRNSLYVNGFTHQSSVSTTSTPGTSTVDLRTSGTPSSLSSPTIMXXXPLLXPFTXNXTITNLXXXXXMXXPGSRKFNTTERVLQGLLRPLFKNTSVSSLYSGCRLTLLRPEKDGAATRVDAACTYRPDPKSPGLDREQLYWELSQLTHSITELGPYTLDRVSLYVNGFNPRSSVPTTSTPGTSTVHLATSGTPSSLPGHTXXXPLLXPFTXNXTITNLXXXXXMXXPGSRKFNTTERVLQGLLKPLFRNSSLEYLYSGCRLASLRPEKDSSAMAVDAICTHRPDPEDLGLDRERLYWELSNLTNGIQELGPYTLDRNSLYVNGFTHRSSGLTTSTPWTSTVDLGTSGTPSPVPSPTTAGPLLVPFTLNFTITNLQYEEDMHRPGSRRFNTTERVLQGLLTPLFKNTSVGPLYSGCRLTLLRPEKQEAATGVDTICTHRVDPIGPGLDRERLYWELSQLTNSITELGPYTLDRDSLYVNGFNPWSSVPTTSTPGTSTVHLATSGTPSSLPGHTAPVPLLIPFTLNFTITDLHYEENMQHPGSRKFNTTERVLQGLLKPLFKSTSVGPLYSGCRLTLLRPEKHGAATGVDAICTLRLDPTGPGLDRERLYWELSQLTNSVTELGPYTLDRDSLYVNGFTHRSSVPTTSIPGTSAVHLETSGTPASLPGHTAPGPLLVPFTLNFTITNLQYEEDMRHPGSRKFSTTERVLQGLLKPLFKNTSVSSLYSGCRLTLLRPEKDGAATRVDAVCTHRPDPKSPGLDRERLYWKLSQLTHGITELGPYTLDRHSLYVNGFTHQSSMTTTRTPDTSTMHLATSRTPASLSGPTTASPLLVLFTINFTITNLRYEENMHHPGSRKFNTTERVLQGLLRPVFKNTSVGPLYSGCRLTTLRPKKDGAATKVDAICTYRPDPKSPGLDREQLYWELSQLTHSITELGPYTQDRDSLYVNGFTHRSSVPTTSIPGTSAVHLETSGTPASLPGHTAPGPLLVPFTLNFTITNLQYEEDMRHPGSRKFNTTERVLQGLLKPLFKSTSVGPLYSGCRLTLLRPEKRGAATGVDTICTHRLDPLNPGLDREQLYWELSKLTRGIIELGPYLLDRGSLYVNGFTHRTSVPTTSTPGTSTVDLGTSGTPFSLPSPAXXXPLLXPFTXNXTITNLXXXXXMXXPGSRKFNTTERVLQTLLGPMFKNTSVGLLYSGCRLTLLRSEKDGAATGVDAICTHRLDPKSPGVDREQLYWELSQLTNGIKELGPYTLDRNSLYVNGFTHWIPVPTSSTPGTSTVDLGSGTPSSLPSPTTAGPLLVPFTLNFTITNLKYEEDMHCPGSRKFNTTERVLQSLLGPMFKNTSVGPLYSGCRLTLLRSEKDGAATGVDAICTHRLDPKSPGVDREQLYWELSQLTNGIKELGPYTLDRNSLYVNGFTHQTSAPNTSTPGTSTVDLGTSGTPSSLPSPTXXXPLLXPFTXNXTITNLXXXXXMXXPGSRKFNTTEXVLQGLLXPXFKNXSVGXLYSGCRLTXLRXEKXGAATGXDAICXHXXXPKXPGLXXEXLYWELSXLTXXIXELGPYTLDRXSLYVNGFTHWIPVPTSSTPGTSTVDLGSGTPSSLPSPTTAGPLLVPFTLNFTITNLKYEEDMHCPGSRKFNTTERVLQSLLGPMFKNTSVGPLYSGCRLTSLRSEKDGAATGVDAICTHRVDPKSPGVDREQLYWELSQLTNGIKELGPYTLDRNSLYVNGFTHQTSAPNTSTPGTSTVXXGTSGTPSSXPXXTSAGPLLVPFTLNFTITNLQYEEDMHHPGSRKFNTTERVLQGLLGPMFKNTSVGLLYSGCRLTLLRPEKNGATTGMDAICTHRLDPKSPGLXXEXLYWELSXLTXXIXELGPYTLDRXSLYVNGFTHXXSXPTTSTPGTSTVXXGTSGTPSSXPXXTXXXPLLXPFTXNXTITNLXXXXXMXXPGSRKFNTTERVLQGLLKPLFRNSSLEYLYSGCRLASLRPEKDSSAMAVDAICTHRPDPEDLGLDRERLYWELSNLTNGIQELGPYTLDRNSLYVNGFTHRSSMPTTSTPGTSTVDVGTSGTPSSSPSPTTAGPLLIPFTLNFTITNLQYGEDMGHPGSRKFNTTERVLQGLLGPIFKNTSVGPLYSGCRLTSLRSEKDGAATGVDAICIHHLDPKSPGLNRERLYWELSQLTNGIKELGPYTLDRNSLYVNGFTHRTSVPTTSTPGTSTVDLGTSGTPFSLPSPATAGPLLVLFTLNFTITNLKYEEDMHRPGSRKFNTTERVLQTLLGPMFKNTSVGLLYSGCRLTLLRSEKDGAATGVDAICTHRLDPKSPGLXXEXLYWELSXLTXXIXELGPYTLDRXSLYVNGFTHXXSXPTTSTPGTSTVXXGTSGTPSSXPXXTXXXPLLXPFTXNXTITNLXXXXXMXXPGSRKFNTTERVLQGLLRPVFKNTSVGPLYSGCRLTLLRPKKDGAATKVDAICTYRPDPKSPGLDREQLYWELSQLTHSITELGPYTQDRDSLYVNGFTHRSSVPTTSIPGTSAVHLETTGTPSSFPGHTEPGPLLIPFTFNFTITNLRYEENMQHPGSRKFNTTERVLQGLLTPLFKNTSVGPLYSGCRLTLLRPEKQEAATGVDTICTHRVDPIGPGLDRERLYWELSQLTNSITELGPYTLDRDSLYVDGFNPWSSVPTTSTPGTSTVHLATSGTPSPLPGHTAPVPLLIPFTLNFTITDLHYEENMQHPGSRKFNTTERVLQGLLKPLFKSTSVGPLYSGCRLTLLRPEKHGAATGVDAICTLRLDPTGPGLDRERLYWELSQLTNSITELGPYTLDRDSLYVNGFNPWSSVPTTSTPGTSTVHLATSGTPSSLPGHTTAGPLLVPFTLNFTITNLKYEEDMHCPGSRKFNTTERVLQSLHGPMFKNTSVGPLYSGCRLTLLRSEKDGAATGVDAICTHRLDPKSPGLXXEXLYWELSXLTXXIXELGPYTLDRXSLYVNGFTHXXSXPTTSTPGTSTVXXGTSGTPSSXPXXTXXXPLLXPFTXNXTITNLXXXXXMXXPGSRKFNTTEXVLQGLLXPXFKNXSVGXLYSGCRLTXLRXEKXGAATGXDAICXHXXXPKXPGLXXEXLYWELSXLTNSITELGPYTLDRDSLYVNGFTHRSSMPTTSIPGTSAVHLETSGTPASLPGHTAPGPLLVPFTLNFTITNLQYEEDMRHPGSRKFNTTERVLQGLLKPLFKSTSVGPLYSGCRLTLLRPEKRGAATGVDTICTHRLDPLNPGLXXEXLYWELSXLTXXIXELGPYTLDRXSLYVNGFTHXXSXPTTSTPGTSTVXXGTSGTPSSXPXXTXXXPLLXPFTXNXTITNLXXXXXMXXPGSRKFNTTEXVLQGLLXPXFKNXSVGXLYSGCRLTXLRXEKXGAATGXDAICXHXXXPKXPGLXXEXLYWELSXLTXXIXELGPYTLDRXSLYVNGFHPRSSVPTTSTPGTSTVHLATSGTPSSLPGHTAPVPLLIPFTLNFTITNLHYEENMQHPGSRKFNTTERVLQGLLGPMFKNTSVGLLYSGCRLTLLRPEKNGAATGMDAICSHRLDPKSPGLXXEXLYWELSXLTXXIXELGPYTLDRXSLYVNGFTHXXSXPTTSTPGTSTVXXGTSGTPSSXPXXTXXXPLLXPFTXNXTITNLXXXXXMXXPGSRKFNTTEXVLQGLLXPXFKNXSVGXLYSGCRLTXLRXEKXGAATGXDAICXHXXXPKXPGLXXEXLYWELSXLTXXIXELGPYTLDRXSLYVNGFTHQNSVPTTSTPGTSTVYWATTGTPSSFPGHTEPGPLLIPFTFNFTITNLHYEENMQHPGSRKFNTTERVLQGLLTPLFKNTSVGPLYSGCRLTLLRPEKQEAATGVDTICTHRVDPIGPGLXXEXLYWELSXLTXXIXELGPYTLDRXSLYVNGFTHXXSXPTTSTPGTSTVXXGTSGTPSSXPXXTXXXPLLXPFTXNXTITNLXXXXXMXXPGSRKFNTTEXVLQGLLXPXFKNXSVGXLYSGCRLTXLRXEKXGAATGXDAICXHXXXPKXPGLXXEXLYWELSXLTXXIXELGPYTLDRXSLYVNGFTHRSSVPTTSSPGTSTVHLATSGTPSSLPGHTAPVPLLIPFTLNFTITNLHYEENMQHPGSRKFNTTERVLQGLLKPLFKSTSVGPLYSGCRLTLLRPEKHGAATGVDAICTLRLDPTGPGLXXEXLYWELSXLTXXIXELGPYTLDRXSLYVNGFTHXXSXPTTSTPGTSTVXXGTSGTPSSXPXXTXXXPLLXPFTXNXTITNLXXXXXMXXPGSRKFNTTEXVLQGLLXPXFKNXSVGXLYSGCRLTXLRXEKXGAATGXDAICXHXXXPKXPGLXXEXLYWELSXLTXXIXELGPYTLDRXSLYVNGFTHRTSVPTTSTPGTSTVHLATSGTPSSLPGHTAPVPLLIPFTLNFTITNLQYEEDMHRPGSRKFNTTERVLQGLLSPIFKNSSVGPLYSGCRLTSLRPEKDGAATGMDAVCLYHPNPKRPGLDREQLYCELSQLTHNITELGPYSLDRDSLYVNGFTHQNSVPTTSTPGTSTVYWATTGTPSSFPGHTXXXPLLXPFTXNXTITNLXXXXXMXXPGSRKFNTTEXVLQGLLXPXFKNXSVGXLYSGCRLTXLRXEKXGAATGXDAICXHXXXPKXPGLXXEXLYWELSXLTXXIXELGPYTLDRXSLYVNGFTHWSSGLTTSTPWTSTVDLGTSGTPSPVPSPTTAGPLLVPFTLNFTITNLQYEEDMHRPGSRKFNATERVLQGLLSPIFKNTSVGPLYSGCRLTLLRPEKQEAATGVDTICTHRVDPIGPGLXXEXLYWELSXLTXXIXELGPYTLDRXSLYVNGFTHXXSXPTTSTPGTSTVXXGTSGTPSSXPXXTXXXPLLXPFTXNXTITNLXXXXXMXXPGSRKFNTTEXVLQGLLXPXFKNXSVGXLYSGCRLTXLRXEKXGAATGXDAICXHXXXPKXPGLXXEXLYWELSXLTXXIXELGPYTLDRXSLYVNGFTHRSFGLTTSTPWTSTVDLGTSGTPSPVPSPTTAGPLLVPFTLNFTITNLQYEEDMHRPGSRKFNTTERVLQGLLTPLFRNTSVSSLYSGCRLTLLRPEKDGAATRVDAVCTHRPDPKSPGLXXEXLYWELSXLTXXIXELGPYTLDRXSLYVNGFTHXXSXPTTSTPGTSTVXXGTSGTPSSXPXXTXXXPLLXPFTXNXTITNLXXXXXMXXPGSRKFNTTEXVLQGLLXPXFKNXSVGXLYSGCRLTXLRXEKXGAATGXDAICXHXXXPKXPGLXXEXLYWELSXLTXXIXELGPYTLDRXSLYVNGFTHWIPVPTSSTPGTSTVDLGSGTPSSLPSPTTAGPLLVPFTLNFTITNLQYGEDMGHPGSRKFNTTERVLQGLLGPIFKNTSVGPLYSGCRLTSLRSEKDGAATGVDAICIHHLDPKSPGLXXEXLYWELSXLTXXIXELGPYTLDRXSLYVNGFTHXXSXPTTSTPGTSTVXXGTSGTPSSXPXXTXXXPLLXPFTXNXTITNLXXXXXMXXPGSRKFNTTEXVLQGLLXPXFKNXSVGXLYSGCRLTXLRXEKXGAATGXDAICXHXXXPKXPGLXXEXLYWELSXLTXXIXELGPYTLDRXSLYVNGFTHQTFAPNTSTPGTSTVDLGTSGTPSSLPSPTSAGPLLVPFTLNFTITNLQYEEDMHHPGSRKFNTTERVLQGLLGPMFKNTSVGLLYSGCRLTLLRPEKNGAATRVDAVCTHRPDPKSPGLXXEXLYWELSXLTXXIXELGPYTLDRXSLYVNGFTHXXSXPTTSTPGTSTVXXGTSGTPSSXPXXTAPVPLLIPFTLNFTITNLHYEENMQHPGSRKFNTTERVLQGLLKPLFKSTSVGPLYSGCRLTLLRPEKHGAATGVDAICTLRLDPTGPGLDRERLYWELSQLTNSVTELGPYTLDRDSLYVNGFTQRSSVPTTSIPGTSAVHLETSGTPASLPGHTAPGPLLVPFTLNFTITNLQYEVDMRHPGSRKFNTTERVLQGLLKPLFKSTSVGPLYSGCRLTLLRPEKRGAATGVDTICTHRLDPLNPGLDREQLYWELSKLTRGIIELGPYLLDRGSLYVNGFTHRNFVPITSTPGTSTVHLGTSETPSSLPRPIVPGPLLVPFTLNFTITNLQYEEAMRHPGSRKFNTTERVLQGLLRPLFKNTSIGPLYSSCRLTLLRPEKDKAATRVDAICTHHPDPQSPGLNREQLYWELSQLTHGITELGPYTLDRDSLYVDGFTHWSPIPTTSTPGTSIVNLGTSGIPPSLPETTXXXPLLXPFTXNXTITNLXXXXXMXXPGSRKFNTTERVLQGLLKPLFKSTSVGPLYSGCRLTLLRPEKDGVATRVDAICTHRPDPKIPGLDRQQLYWELSQLTHSITELGPYTLDRDSLYVNGFTQRSSVPTTSTPGTFTVQPETSETPSSLPGPTATGPVLLPFTLNFTITNLQYEEDMHRPGSRKFNTTERVLQGLLMPLFKNTSVSSLYSGCRLTLLRPEKDGAATRVDAVCTHRPDPKSPGLDRERLYWKLSQLTHGITELGPYTLDRHSLYVNGFTHQSSMTTTRTPDTSTMHLATSRTPASLSGPTTASPLLVLFTINFTITNLRYEENMHHPGSRKFNTTERVLQGLLRPVFKNTSVGPLYSGCRLTLLRPKKDGAATKVDAICTYRPDPKSPGLDREQLYWELSQLTHSITELGPYTLDRDSLYVNGFTQRSSVPTTSIPGTPTVDLGTSGTPVSKPGPSAASPLLVLFTLNFTITNLRYEENMQHPGSRKFNTTERVLQGLLRSLFKSTSVGPLYSGCRLTLLRPEKDGTATGVDAICTHHPDPKSPRLDREQLYWELSQLTHNITELGHYALDNDSLFVNGFTHRSSVSTTSTPGTPTVYLGASKTPASIFGPSAASHLLILFTLNFTITNLRYEENMWPGSRKFNTTERVLQGLLRPLFKNTSVGPLYSGSRLTLLRPEKDGEATGVDAICTHRPDPTGPGLDREQLYLELSQLTHSITELGPYTLDRDSLYVNGFTHRSSVPTTSTGVVSEEPFTLNFTINNLRYMADMGQPGSLKFNITDNVMKHLLSPLFQRSSLGARYTGCRVIALRSVKNGAETRVDLLCTYLQPLSGPGLPIKQVFHELSQQTHGITRLGPYSLDKDSLYLNGYNEPGLDEPPTTPKPATTFLPPLSEATTAMGYHLKTLTLNFTISNLQYSPDMGKGSATFNSTEGVLQHLLRPLFQKSSMGPFYLGCQLISLRPEKDGAATGVDTTCTYHPDPVGPGLDIQQLYWELSQLTHGVTQLGFYVLDRDSLFINGYAPQNLSIRGEYQINFHIVNWNLSNPDPTSSEYITLLRDIQDKVTTLYKGSQLHDTFRFCLVTNLTMDSVLVTVKALFSSNLDPSLVEQVFLDKTLNASFHWLGSTYQLVDIHVTEMESSVYQPTSSSSTQHFYLNFTITNLPYSQDKAQPGTTNYQRNKRNIEDALNQLFRNSSIKSYFSDCQVSTFRSVPNRHHTGVDSLCNFSPLARRVDRVAIYEEFLRMTRNGTQLQNFTLDRSSVLVDGYSPNRNEPLTGNSDLPFWAVILIGLAGLLGLITCLICGVLVTTRRRKKEGEYNVQQQCPGYYQSHLDLEDLQ

SEQ ID NO: 6594 - protein, 104 aa, Homo sapiens
MLVNGENFGVSLNIFPSVAINKSSGAPRRVPAQGSIKDHTAGLRLTALSPEHQSPAESGDNTSSLQRGTSPPAATSLRLLLSSKDSLGFKCHFPCFRDPGVLIA

SEQ ID NO: 6595 - protein, 1005 aa, Homo sapiens
FEEEPDVVDLAKEPCLHPLEPDEVEYEPRGSRLLVRGLGEHEMEEVEEDYESSAKLLGMSFMNRSSGLRNSATGYRQSPDGACSVPSARTMVVCAFVIVVAVSVIMVIYLLPRCTFTKEGCHKKNQSIGLIQPFATNGKLFPWAQIRLPTAVVPLRYELSLHPNLTSMTFRGSVTISVQALQVTWNIILHSTGHNISRVTFMSAVSSQEKQAEILEYAYHGQIAIVAPEALLAGHNYTLKIEYSANISSSYYGFYGFSYTDESNEKKYFAATQFEPLAARSAFPCFDEPAFKATFIIKIIRDEQYTALSNMPKKSSVVLDDGLVQDEFSESVKMSTYLVAFIVGEMKNLSQDVNGTLVSIYAVPENIGQVHYALETTVKLLEFFQNYFEIQYPLKKLDLVAIPDFEAGAMENWGLLTFREETLLYDSNTSSMADRKLVTKIIAHELAHQWFGNLVTMKWWNDLWLNEGFATFMEYFSLEKIFKELSSYEDFLDARFKTMKKDSLNSSHPISSSVQSSEQIEEMFDSLSYFKGSSLLLMLKTYLSEDVFQHAVVLYLHNHSYASIQSDDLWDSFNEVTNQTLDVKRMMKTWTLQKGFPLVTVQKKGKELFIQQERFFLNMKPEIQPSDTSYLWHIPLSYVTEGRNYSKYQSVSLLDKKSGVINLTEEVLWVKVNINMNGYYIVHYADDDWEALIHQLKINPYVLSDKDRANLINNIFELAGLGKVPLKRAFDLINYLGNENHTAPITEALFQTDLIYNLLEKLGYMDLASRLVTRVFKLLQNQIQQQTWTDEGTPSMRELRSALLEFACTHNLGNCSTTAMKLFDDWMASNGTQSLPTDVMTTVFKVGAKTDKGWSFLLGKYISIGSEAEKNKILEALASSEDVRKLYWLMKSSLNGDNFRTQKLSFIIRTVGRHFPGHLLAWDFVKENWNKLVQKFPLGSYTIQNIVAGSTYLFSTKTHLSEVQAFFENQSEATFRLRCVQEALEVIQLNIQWMEKNLKSLTWWL

SEQ ID NO: 6596 - protein, 1010 aa, Homo sapiens
IENSMFEEEPDVVDLAKEPCLHPLEPDEVEYEPRGSRLLVRGLGEHEMEEVEEDYESSAKLLGMSFMNRSSGLRNSATGYRQSPDGACSVPSARTMVVCAFVIVVAVSVIMVIYLLPRCTFTKEGCHKKNQSIGLIQPFATNGKLFPWAQIRLPTAVVPLRYELSLHPNLTSMTFRGSVTISVQALQVTWNIILHSTGHNISRVTFMSAVSSQEKQAEILEYAYHGQIAIVAPEALLAGHNYTLKIEYSANISSSYYGFYGFSYTDESNEKKYFAATQFEPLAARSAFPCFDEPAFKATFIIKIIRDEQYTALSNMPKKSSVVLDDGLVQDEFSESVKMSTYLVAFIVGEMKNLSQDVNGTLVSIYAVPENIGQVHYALETTVKLLEFFQNYFEIQYPLKKLDLVAIPDFEAGAMENWGLLTFREETLLYDSNTSSMADRKLVTKIIAHELAHQWFGNLVTMKWWNDLWLNEGFATFMEYFSLEKIFKELSSYEDFLDARFKTMKKDSLNSSHPISSSVQSSEQIEEMFDSLSYFKGSSLLLMLKTYLSEDVFQHAVVLYLHNHSYASIQSDDLWDSFNEVTNQTLDVKRMMKTWTLQKGFPLVTVQKKGKELFIQQERFFLNMKPEIQPSDTSYLWHIPLSYVTEGRNYSKYQSVSLLDKKSGVINLTEEVLWVKVNINMNGYYIVHYADDDWEALIHQLKINPYVLSDKDRANLINNIFELAGLGKVPLKRAFDLINYLGNENHTAPITEALFQTDLIYNLLEKLGYMDLASRLVTRVFKLLQNQIQQQTWTDEGTPSMRELRSALLEFACTHNLGNCSTTAMKLFDDWMASNGTQSLPTDVMTTVFKVGAKTDKGWSFLLGKYISIGSEAEKNKILEALASSEDVRKLYWLMKSSLNGDNFRTQKLSFIIRTVGRHFPGHLLAWDFVKENWNKLVQKFPLGSYTIQNIVAGSTYLFSTKTHLSEVQAFFENQSEATFRLRCVQEALEVIQLNIQWMEKNLKSLTWWL

SEQ ID NO: 6597 - protein, 1025 aa, Homo sapiens [sequence omitted]

SEQ ID NO: 6598 - protein, 1979 aa, Homo sapiens
MSSWLGGLGSGLGQSLGQVGGSLASLTGQISNFTKDMLMEGTEEVEAELPDSRTKEIEAIHAILRSENERLKKLCTDLEEKHEASEIQIKQQSTSYRNQLQQKEVEISHLKARQIALQDQLLKLQSAAQSVPSGAGVPATTASSSFAYGISHHPSAFHDDDMDFGDIISSQQEINRLSNEVSRLESEVGHWRHIAQTSKAQGTDNSDQSEICKLQNIIKELKQNRSQEIDDHQHEMSVLQNAHQQKLTEISRRHREELSDYEERIEELENLLQQGGSGVIETDLSKIYEMQKTIQVLQIEKVESTKKMEQLEDKIKDINKKLSSAENDRDILRREQEQLNVEKRQIMEECENLKLECSKLQPSAVKQSDTMTEKERILAQSASVEEVFRLQQALSDAENEIMRLSSLNQDNSLAEDNLKLKMRIEVLEKEKSLLSQEKEELQMSLLKLNNEYEVIKSTATRDISLDSELHDLRLNLEAKEQELNQSISEKETLIAEIEELDRQNQEATKHMILIKDQLSKQQNEGDSIISKLKQDLNDEKKRVHQLEDDKMDITKELDVQKEKLIQSEVALNDLHLTKQKLEDKVENLVDQLNKSQESNVSIQKENLELKEHIRQNEEELSRIRNELMQSLNQDSNSNFKDTLLKEREAEVRNLKQNLSELEQLNENLKKVAFDVKMENEKLVLACEDVRHQLEECLAGNNQLSLEKNTIVETLKMEKGEIEAELCWAKKRLLEEANKYEKTIEELSNARNLNTSALQLEHEHLIKLNQKKDMEIAELKKNIEQMDTDHKETKDVLSSSLEEQKQLTQLINKKEIFIEKLKERSSKLQEELDKYSQALRKNEILRQTIEEKDRSLGSMKEENNHLQEELERLREEQSRTAPVADPKTLDSVTELASEVSQLNTIKEHLEEEIKHHQKIIEDQNQSKMQLLQSLQEQKKEMDEFRYQHEQMNATHTQLFLEKDEEIKSLQKTIEQIKTQLHEERQDIQTDNSDIFQETKVQSLNIENGSEKHDLSKAETERLVKGIKERELEIKLLNEKNISLTKQIDQLSKDEVGKLTQIIQQKDLEIQALHARISSTSHTQDVVYLQQQLQAYAMEREKVFAVLNEKTRENSHLKTEYHKMMDIVAAKEAALIKLQDENKKLSTRFESSGQDMFRETIQNLSRIIREKDIEIDALSQKCQTLLAVLQTSSTGNEAGGVNSHQFEELLQERDKLKQQVKKMEEWKQQVMTTVQNMQHESAQLQEELHQLQAQVLVDSDNNSKLQVDYTGLIQSYEQNETKLKNFGQELAQVQHSIGQLCNTKDLLLGKLDIISPQLSSASLLTPQSAECLRASKSEVLSESSELLQQELEELRKSLQEKDATIRTLQENNHRLSDSIAATSELERKEHEQTDSEIKQLKEKQDVLQKLLKEKDLLIKAKSDQLLSSNENFTNKVNENELLRQAVTNLKERILILEMDIGKLKGENEKIVETYRGKETEYQALQETNMKFSMMLREKEFECHSMKEKALAFEQLLKEKEQGKTGELNQLLNAVKSMQEKTVVFQQERDQVMLALKQKQMENTALQNEVQRLRDKEFRSNQELERLRNHLLESEDSYTREALAAEDREAKLRKKVTVLEEKLVSSSNAMENASHQASVQVESLQEQLNVVSKQRDETALQLSVSQEQVKQYALSLANLQMVLEHFQQEEKAMYSAELEKQKQLIAEWKKNAENLEGKVISLQECLDEANAALDSASRLTEQLDVKEEQIEELKRQNELRQEMLDDVQKKLMSLANSSEGKVDKVLMRNLFIGHFHTPKNQRHEVLRLMGSILGVRREEMEQLFHDDQGSVTRWMTGWLGGGSKSVPNTPLRPNQQSVVNSSFSELFVKFLETESHPSIPPPKLSVHDMKPLDSPGRRKRDTNAPESFKDTAESRSGRRTDVNPFLAPRSAAVPLINPAGLGPGGPGHLLLKPISDVLPTFTPLPALPDNSAGVVLKDLLKQ

SEQ ID NO: 6599 - protein, 318 aa, Homo sapiens
MAAQGCAASRLLQLLLQLLLLLLLLAAGGARARWRAEGTSAHLRDIFLGRCAEYRALLSPEQRNKNCTAIWEAFKVALDKDPCSVLPSDYDLFINLSRHSIPRDKSLFWENSHLLVNSFADNTRRFMPLSDVLYGRVADFLSWCRQKNDSGLDYQSCPTSEDCENNPVDSFWKRASIQYSKDSSGVIHVMLNGSEPTGAYPIKGFFADYEIPNLQKEKITRIEIWVMHEIGGPNVESCGEGSMKVLEKRLKDMGFQYSCINDYRPVKLLQCVDHSTHPDCALKSAAAATQRKAPSLYTEQRAGLIIPLFLVLASRTQL

SEQ ID NO: 6600 - protein, 334 aa, Homo sapiens
MNLSLVLAAFCLGIASAVPKFDQNLDTKWYQWKATHRRLYGANEEGWRRAVWEKNMKMIELHNGEYSQGKHGFTMAMNAFGDMTNEEFRQMMGCFRNQKFRKGKVFREPLFLDLPKSVDWRKKGYVTPVKNQKQCGSCWAFSATGALEGQMFRKTGKLVSLSEQNLVDCSRPQGNQGCNGGFMARAFQYVKENGGLDSEESYPYVAVDEICKYRPENSVANDTGFTVVAPGKEKALMKAVATVGPISVAMDAGHSSFQFYKSGIYFEPDCSSKNLDHGVLVVGYGFEGANSNNSKYWLVKNSWGPEWGSNGYVKIAKDKNNHCGIATAASYPNV

SEQ ID NO: 6601 - protein, 1255 aa, Homo sapiens [sequence omitted]

SEQ ID NO: 6602 - protein, 1506 aa, Homo sapiens
MASASGPTVGSRPWWLRASERPSAPSAMAKRSRGPGRRCLLALVLFCAWGTLAVVAQKPGAGCPSRCLCFRTTVRCMHLLLEAVPAVAPQTSILDLRFNRIREIQPGAFRRLRNLNTLLLNNNQIKRIPSGAFEDLENLKYLYLYKNEIQSIDRQAFKGLASLEQLYLHFNQIETLDPDSFQHLPKLERLFLHNNRITHLVPGTFNHLESMKRLRLDSNTLHCDCEILWLADLLKTYAESGNAQAAAICEYPRRIQGRSVATITPEELNCERPRITSEPQDADVTSGNTVYFTCRAEGNPKPEIIWLRNNNELSMKTDSRLNLLDDGTLMIQNTQETDQGIYQCMAKNVAGEVKTQEVTLRYFGSPARPTFVIQPQNTEVLVGESVTLECSATGHPPPRISWTRGDRTPLPVDPRVNITPSGGLYIQNVVQGDSGEYACSATNNIDSVHATAFIIVQALPQFTVTPQDRVVIEGQTVDFQCEAKGNPPPVIAWTKGGSQLSVDRRHLVLSSGTLRISGVALHDQGQYECQAVNIIGSQKVVAHLTVQPRVTPVFASIPSDTTVEVGANVQLPCSSQGEPEPAITWNKDGVQVTESGKFHISPEGFLTINDVGPADAGRYECVARNTIGSASVSMVLSVNVPDVSRNGDPFVATSIVEAIATVDRAINSTRTHLFDSRPRSPNDLLALFRYPRDPYTVEQARAGEIFERTLQLIQEHVQHGLMVDLNGTSYHYNDLVSPQYLNLIANLSGCTAHRRVNNCSDMCFHQKYRTHDGTCNNLQHPMWGASLTAFERLLKSVYENGFNTPRGINPHRLYNGHALPMPRLVSTTLIGTETVTPDEQFTHMLMQWGQFLDHDLDSTVVALSQARFSDGQHCSNVCSNDPPCFSVMIPPNDSRARSGARCMFFVRSSPVCGSGMTSLLMNSVYPREQINQLTSYIDASNVYGSTEHEARSIRDLASHRGLLRQGIVQRSGKPLLPFATGPPTECMRDENESPIPCFLAGDHRANEQLGLTSMHTLWFREHNRIATELLKLNPHWDGDTIYYETRKIVGAEIQHITYQHWLPKILGEVGMRTLGEYHGYDPGINAGIFNAFATAAFRFGHTLVNPLLYRLDENFQPIAQDHLPLHKAFFSPFRIVNEGGIDPLLRGLFGVAGKMRVPSQLLNTELTERLFSMAHTVALDLAAINIQRGRDHGIPPYHDYRVYCNLSAAHTFEDLKNEIKNPEIREKLKRLYGSTLNIDLFPALVVEDLVPGSRLGPTLMCLLSTQFKRLRDGDRLWYENPGVFSPAQLTQIKQTSLARILCDNADNITRVQSDVFRVAEFPHGYGSCDEIPRVDLRVWQDCCEDCRTRGQFNAFSYHFRGRRSLEFSYQEDKPTKKTRPRKIPSVGRQGEHLSNSTSAFSTRSDASGTNDFREFVLEMQKTITDLRTQIKKLESRLSTTECVDAGGESHANNTKWKKDACTICECKDGQVTCFVEACPPATCAVPVNIPGACCPVCLQKRAEEKP

SEQ ID NO: 6603 - protein, 293 aa, Homo sapiens
MATARPPWMWVLCALITALLLGVTEHVLANNDVSCDHPSNTVPSGSNQDLGAGAGEDARSDDSSSRIINGSDCDMHTQPWQAALLLRPNQLYCGAVLVHPQWLLTAAHCRKKVFRVRLGHYSLSPVYESGQQMFQGVKSIPHPGYSHPGHSNDLMLIKLNRRIRPTKDVRPINVSSHCPSAGTKCLVSGWGTTKSPQVHFPKVLQCLNISVLSQKRCEDAYPRQIDDTMFCAGDKAGRDSCQGDSGGPVVCNGSLQGLVSWGDYPCARPNRPGVYTNLCKFTKWIQETIQANS

SEQ ID NO: 6604 - protein, 560 aa, Homo sapiens
MECLYYFLGFLLLAARLPLDAAKRFHDVLGNERPSAYMREHNQLNGWSSDENDWNEKLYPVWKRGDMRWKNSWKGGRVQAVLTSDSPALVGSNITFAVNLIFPRCQKEDANGNIVYEKNCRNEAGLSADPYVYNWTAWSEDSDGENGTGQSHHNVFPDGKPFPHHPGWRRWNFIYVFHTLGQYFQKLGRCSVRVSVNTANVTLGPQLMEVTVYRRHGRAYVPIAQVKDVYVVTDQIPVFVTMFQKNDRNSSDETFLKDLPIMFDVLIHDPSHFLNYSTINYKWSFGDNTGLFVSTNHTVNHTYVLNGTFSLNLTVKAAAPGPCPPPPPPPRPSKPTPSLGPAGDNPLELSRIPDENCQINRYGHFQATITIVEGILEVNIIQMTDVLMPVPWPESSLIDFVVTCQGSIPTEVCTIISDPTCEITQNTVCSPVDVDEMCLLTVRRTFNGSGTYCVNLTLGDDTSLALTSTLISVPDRDPASPLRMANSALISVGCLAIFVTVISLLVYKKHKEYNPIENSPGNVVRSKGLSVFLNRAKAVFFPGNQEKDPLLKNQEFKGVS

SEQ ID NO: 6605 - protein, 1838 aa, Homo sapiens
MDVHTRWKARSALRPGAPLLPPLLLLLLWAPPPSRAAQPADLLKVLDFHNLPDGITKTTGFCATRRSSKGPDVAYRVTKDAQLSAPTKQLYPASAFPEDFSILTTVKAKKGSQAFLVSIYNEQGIQQIGLELGRSPVFLYEDHTGKPGPEDYPLFRGINLSDGKWHRIALSVHKKNVTLILDCKKKTTKFLDRSDHPMIDINGIIVFGTRILDEEVFEGDIQQLLFVSDHRAAYDYCEHYSPDCDTAVPDTPQSQDPNPDEYYTEGDGEGETYYYEYPYYEDPEDLGKEPTPSKKPVEAAKETTEVPEELTPTPTEAAPMPETSEGAGKEEDVGIGDYDYVPSEDYYTPSPYDDLTYGEGEENPDQPTDPGAGAEIPTSTADTSNSSNPAPPPGEGADDLEGEFTEETIRNLDENYYDPYYDPTSSPSEIGPGMPANQDTIYEGIGGPRGEKGQKGEPAIIEPGMLIEGPPGPEGPAGLPGPPGTMGPTGQVGDPGERGPPGRPGLPGADGLPGPPGTMLMLPFRFGGGGDAGSKGPMVSAQESQAQAILQQARLALRGPAGPMGLTGRPGPVGPPGSGGLKGEPGDVGPQGPRGVQGPPGPAGKPGRRGRAGSDGARGMPGQTGPKGDRGFDGLAGLPGEKGHRGDPGPSGPPGPPGDDGERGDDGEVGPRGLPGKPGPRGLLGPKGPPGPPGPPGVTGMDGQPGPKGNVGPQGEPGPPGQQGNPGAQGLPGPQGAIGPPGEKGPLGKPGLPGMPGADGPPGHPGKEGPPGEKGGQGPPGPQGPIGYPGPRGVKGADGIRGLKGTKGEKGEDGFPGFKGDMGIKGDRGEIGPPGPRGEDGPEGPKGRGGPNGDPGPLGPPGEKGKLGVPGLPGYPGRQGPKGSIGFPGFPGANGEKGGRGTPGKPGPRGQRGPTGPRGERGPRGITGKPGPKGNSGGDGPAGPPGERGPNGPQGPTGFPGPKGPPGPPGKDGLPGHPGQRGETGFQGKTGPPGPPGVVGPQGPTGETGPMGERGHPGPPGPPGEQGLPGLAGKEGTKGDPGPAGLPGKDGPPGLRGFPGDRGLPGPVGALGLKGNEGPPGPPGPAGSPGERGPAGAAGPIGIPGRPGPQGPPGPAGEKGAPGEKGPQGPAGRDGLQGPVGLPGPAGPVGPPGEDGDKGEIGEPGQKGSKGDKGEQGPPGPTGPQGPIGQPGPSGADGEPGPRGQQGLFGQKGDEGPRGFPGPPGPVGLQGLPGPPGEKGETGDVGQMGPPGPPGPRGPSGAPGADGPQGPPGGIGNPGAVGEKGEPGEAGEPGPSGRSGPPGPKGERGEKGESGPSGAAGPPGPKGPPGDDGPKGSPGPVGFPGDPGPPGEPGPAGQDGPPGDKGDDGEPGQTGSPGPTGEPGPSGPPGKRGPPGPAGPEGRQGEKGAKGEAGLEGPPGKTGPIGPQGAPGKPGPDGLRGIPGPVGEQGLPGSPGPDGPPGPMGPPGLPGLKGDSGPKGEKGHPGLIGLIGPPGEQGEKGDRGLPGPQGSSGPKGEQGITGPSGPIGPPGPPGLPGPPGPKGAKGSSGPTGPRGEAGHPGPPGPPGPPGEVIQPLPIQASRTRRNIDASQLLDDGNGENYVDYADGMEEIFGSLNSLKLEIEQMKRPLGTQQNPARTCKDLQLCHPDFPDGEYWVDPNQGCSRDSFKVYCNFTAGGSTCVFPDKKSEGARITSWPKENPGSWFSEFKRGKLLSYVDAEGNPVGVVQMTFLRLLSASAHQNVTYHCYQSVAWQDAATGSYDKALRFLGSNDEEMSYDNNPYIRALVDGCATKKGYQKTVLEIDTPKVEQVPIVDIMFNDFGEASQKFGFEVGPACFMG

SEQ ID NO: 6606 - protein, 1489 aa, Homo sapiens
GDIQQLLFVSDHRAAYDYCEHYSPDCDTAVPDTPQSQDPNPDEYYTEGDGEGETYYYEYPYYEDPEDLGKEPTPSKKPVEAAKETTEVPEELTPTPTEAAPMPETSEGAGKEEDVGIGDYDYVPSEDYYTPSPYDDLTYGEGEENPDQPTDPGAGAEIPTSTADTSNSSNPAPPPGEGADDLEGEFTEETIRNLDENYYDPYYDPTSSPSEIGPGMPANQDTIYEGIGGPRGEKGQKGEPAIIEPGMLIEGPPGPEGPAGLPGPPGTMGPTGQVGDPGERGPPGRPGLPGADGLPGPPGTMLMLPFRFGGGGDAGSKGPMVSAQESQAQAILQQARLALRGPAGPMGLTGRPGPVGPPGSGGLKGEPGDVGPQGPRGVQGPPGPAGKPGRRGRAGSDGARGMPGQTGPKGDRGFDGLAGLPGEKGHRGHPGKEGPPGEKGGQGPPGPQGPIGYPGPRGVKVRETHATPGRPGVCCGGWSSHLLFSGLQGEIGPPGPRGEDGPEGPKGRGGPNGDPGPLGPPGEKGKLGVPGLPGYPGRQGPKGSIGFPGFPGANGEKGGRVRIAWPLGRQLVRLPRCLASCFSPLSFPLKGNSGGDGPAGPPGERGPNGPQGPTGFPGPKGPPVSNGFLAGPALPVPSKTHLSPPPPVFSEGPTGETGPMGERGHPGPPGPPGEQGLPGLAGKEGTKGDPGPAGLPGKDGPPGLRGFPGDRGLPGPVGALGLKGNEGPPGPPGPAGSPGERGPAGAAGPIGIPGRPGPQGPPGPAGEKGAPGEKGPQGPAGRDGLQGPVGLPGPAGPVGPPGEDGDKVRQIQSDPWLGLAGQTGGPPGPTGPQGPIGQPGPSGADGEPGPRGQQGLFGQKGDEGPRGFPGPPGPVGLQGLPGPPGEKGETGDVGQMGPPGPPGPRGPSGAPGADGPQGPPGGIGNPGAVGEKKTGEAHLALGGDVVGSEDLTLASFLQGPKGERGEKGESGPSGAAGPPGPKGPPGDDGPKGSPVSIPDTPQGPCSRGGALHWDHSDSLAVHSALRTASRPFHVLGFPSSGPGPGCLEPRAPDLILPSAVLQGEAGLEGPPGKTGPIGPQGAPGKPGPDGLRGIPGPVGEQGLPGSPGPDGPPGPMGPPGLPGLKGDSGPKGEKGHPGLIGLIGPPGEQGEKGDRGLPGPQGSSGPKGEQADRCPCSPGCQAPGNPCRCGPSCPCSAHILGPFPSSITHRCSCSVPQGPPGEVIQPLPIQASRTRRNIDASQLLDDGNGENYVDYADGMEEIFGSLNSLKLEIEQMKRPLGTQQNPARTCKDLQLCHPDFPDGEYWVDPNQGCSRDSFKVYCNFTAGGSTCVFPDKKSEGARITSWPKENPGSWFSEFKRGKLLSYVDAEGNPVGVVQMTFLRLLSASAHQNVTYHCYQSVAWQDAATGSYDKALRFLGSNDEEMSYDNNPYIRALVDGCATKKGYQKTVLEIDTPKVEQVPIVDIMFNDFGEASQKFGFEVGPACFMG

SEQ ID NO: 6607 - protein, 822 aa, Homo sapiens
MKPALLPWALLLLATALGPGPGPTADAQESCSMRCGALDGPCSCHPTCSGLGTCCLDFRDFCLEILPYSGSMMGGKDFVVRHFKMSSPTDASVICRFKDSIQTLGHVDSSGQVHCVSPLLYESGRIPFTVSLDNGHSFPRAGTWLAVHPNKVSMMEKSELVNETRWQYYGTANTSGNLSLTWHVKSLPTQTITIELWGYEETGMPYSQEWTAKWSYLYPLATHIPNSGSFTFTPKPAPPSYQRWRVGALRIIDSKNYAGQKDVQALWTNDHALAWHLSDDFREDPVAWARTQCQAWEELEDQLPNFLEELPDCPCTLTQARADSGRFFTDYGCDMEQGSVCTYHPGAVHCVRSVQASLRYGSGQQCCYTADGTQLLTADSSGGSTPDRGHDWGAPPFRTPPRVPSMSHWLYDVLSFYYCCLWAPDCPRYMQRRPSNDCRNYRPPRLASAFGDPHFVTFDGTNFTFNGRGEYVLLEAALTDLRVQARAQPGTMSNGTETRGTGLTAVAVQEGNSDVVEVRLANRTGGLEVLLNQEVLSFTEQSWMDLKGMFLSVAAGDRVSIMLASGAGLEVSVQGPFLSVSVLLPEKFLTHTHGLLGTLNNDPTDDFTLHSGRVLPPGTSPQELFLFGANWTVHNASSLLTYDSWFLVHNFLYQPKHDPTFEPLFPSETTLNPSLAQEAAKLCGDDHFCNFDVAATGSLSTGTATRVAHQLHQRRMQSLQPVVSCGWLAPPPNGQKEGNRYLAGSTIYFHCDNGYSLAGAETSTCQADGTWSSPTPKCQPGRSYAVLLGIIFGGLAVVAAVALVYVLLRRRKGNTHVWGAQP

SEQ ID NO: 6608 - protein, 471 aa, Homo sapiens
MAREMTILGSAVLTLLLAGYLAQQYLPLPTPKVIGIDLGTTYCSVGVFFPGTGKVKVIPDENGHISIPSMVSFTDNDVYVGYESVELADSNPQNTIYDAKRFIGKIFTAEELEAEIGRYPFKVLNKNGMVEFSVTSNETITVSPEYVGSRLLLKLKEMAEAYLGMPVANAVISVPAEFDLKQRNSTIEAANLAGLKILRVINEPTAAAMAYGLHKADVFHVLVIDLGGGTLDVSLLNKQGGMFLTRAMSGNNKLGGQDFNQRLLQYLYKQIYQTYGFVPSRKEEIHRLRQAVEMVKLNLTLHQSAQLSVLLTVEEQDRKEPHSSDTELPKDKLSSADDHRVNSGFGRGLSDKKSGESQVLFETEISRKLFDTLNEDLFQKILVPIQQVLKEGHLEKTEIDEVVLVGGSTRIPRIRQVIQEFFGKDPNTSVDPDLAVVTGVAIQAGIDGGSWPLQVSALEIPNKHLQKTNFN

SEQ ID NO: 6609 - protein, 6620 aa, Homo sapiens
MDQPQFSGAPRFLTRPKAFVVSVGKDATLSCQIVGNPTPQVSWEKDQQPVTAGARFRLAQDGDLYRLTILDLALGDSGQYVCRARNAIGEAFAAVGLQVDAEAACAEQAPHFLLRPTSIRVREGSEATFRCRVGGSPRPAVSWSKDGRRLGEPDGPRVRVEELGEASALRIRAARPRDGGTYEVRAENPLGAASAAAALVVDSDAADTASRPGTSTAALLAHLQRRREAMRAEGAPASPPSTGTRTCTVTEGKHARLSCYVTGEPKPETVWKKDGQLVTEGRRHVVYEDAQENFVLKILFCKQSDRGLYTCTASNLVGQTYSSVLVVVREPAVPFKKRLQDLEVREKESATFLCEVPQPSTEAAWFKEETRLWASAKYGIEEEGTERRLTVRNVSADDDAVYICETPEGSRTVAELAVQGNLLRKLPRKTAVRVGDTAMFCVELAVPVGPVHWLRNQEEVVAGGRVAISAEGTRHTLTISQCCLEDVGQVAFMAGDCQTSTRFCVSAPRKPPLQPPVDPVVKARMESSVILSWSPPPHGERPVTIDGYLVEKKKLGTYTWIRCHEAEWVATPELTVADVAEEGNFQFRVSALNSFGQSPYLEFPGTVHLAPKLAVRTPLKAVQAVEGGEVTFSVDLTVASAGEWFLDGQALKASSVYEIHCDRTRHTLTIREVPASLHGAQLKFVANGIESSIRMEVRAAPGLTANKPPAAAAREVLARLHEEAQLLAELSDQAAAVTWLKDGRTLSPGPKYEVQASAGRRVLLVRDVARDDAGLYECVSRGGRIAYQLSVQGLARFLHKDMAGSCVDAVAGGPAQFECETSEAHVHVHWYKDGMELGHSGERFLQEDVGTRHRLVAATVTRQDEGTYSCRVGEDSVDFRLRVSEPKVVFAKEQLARRKLQAEAGASATLSCEVAQAQTEVTWYKDGKKLSSSSKVCMEATGCTRRLVVQQAGQADAGEYSCEAGGQRLSFHLDVKEPKVVFAKDQVAHSEVQAEAGANATLSCEVAQAQAEVMWYKDGKKLSSSLKVHVEAKGCRRRLVVQQAGKTDAGDYSCEARGQRVSFRLHITEPKMMFAKEQSVHNEVQAEAGASAMLSCEVAQAQTEVTWYKDGKKLSSSSKVGMEVKGCTRRLVLPQAGKADAGEYSCEAGGQRVSFHLHITEPKGVFAKEQSVHNEVQAEAGTTAMLSCEVAQPQTEVTWYKDGKKLSSSSKVRMEVKGCTRRLVVQQVGKADAGEYSCEAGGQRVSFQLHITEPKAVFAKEQLVHNEVRTEAGASATLSCEVAQAQTEVTWYKDGKKLSSSSKVRIEAAGCMRQLVVQQAGQADAGEYTCEAGGQRLSFHLDVSEPKAVFAKEQLAHRKVQAEAGAIATLSCEVAQAQTEVTWYKDGKKLSSSSKVRMEAVGCTRRLVVQQACQADTGEYSCEAGGQRLSFSLDVAEPKVVFAKEQPVHREVQAQAGASTTLSCEVAQAQTEVMWYKDGKKLSFSSKVRMEAVGCTRRLVVQQAGQADAGEYSCEAGSQRLSFHLHVAEPKAVFAKEQPASREVQAEAGTSATLSCEVAQAQTEVTWYKDGKKLSSSSKVRMEAVGCTRRLVVQEAGQADAGEYSCKAGDQRLSFHLHVAEPKVVFAKEQPAHREVQAEAGASATLSCEVAQAQTEVTWYKDGKKLSSSSKVRVEAVGCTRRLVVQQAGQADAGEYSCEAGGQRLSFRLHVAELEPQISERPCRREPLVVKEHEDIILTATLATPSAATVTWLKDGVEIRRSKRHETASQGDTHTLTVHGAQVLDSAIYSCRVGAEGQDFPVQVEEVAAKFCRLLEPVCGELGGTVTLACELSPACAEVVWRCGNTQPRVGKRFQMVAEGPVRSLTVLGLRAEDAGEYVCESRDDHTSAQLTVSVPRVVKFMSGLSTVVAEEGGEATFQCVVSPSDVAVVWFRDGALLQPSEKFAISQSGASHSLTISDLVLEDAGQITVEAEGASSSAALRVREAPVLFKKKLEPQTVEERSSVTLEVELTRPWPELRWTRNATALAPGKNVEIHAEGARHRLVLHNVGFADRGFFGCETPDDKTQAKLTVEMRQVRLVRGLQAVEAREQGTATMEVQLSHADVDGSWTRDGLRFQQGPTCHLAVRGPMHTLTLSGLRPEDSGLMVFKAEGVHTSARLVVTELPVSFSRPLQDVVTTEKEKVTLECELSRPNVDVRWLKDGVELRAGKTMAIAAQGACRSLTIYRCEFADQGVYVCDAHDAQSSASVKVQGRTYTLIYRRVLAEDAGEIQFVAENAESRAQLRVKELPVTLVRPLRDKIAMEKHRGVLECQVSRASAQVRWFKGSQELQPGPKYELVSDGLYRKLIISDVHAEDEDTYTCDAGDVKTSAQFFVEEQSITIVRGLQDVTVMEPAPAWFECETSIPSVRPPKWLLGKTVLQAGGNVGLEQEGTVHRLMLRRTCSTMTGPVHFTVGKSRSSARLVVSDIPVVLTRPLEPKTGRELQSVVLSCDFRPAPKAVQWYKDDTPLSPSEKFKMSLEGQMAELRILRLMPADAGVYRCQAGSAHSSTEVTVEAREVTVTGPLQDAEATEEGWASFSCELSHEDEEVEWSLNGMPLYNDSFHEISHKGRRHTLVLKSIQRADAGIVRASSLKVSTSARLEVRVKPVVFLKALDDLSAEERGTLALQCEVSDPEAHVVWRKDGVQLGPSDKYDFLHTAGTRGLVVHDVSPEDAGLYTCHVGSEETRARVRVHDLHVGITKRLKTMEVLEGESCSFECVLSHESASDPAMWTVGGKTVGSSSRFQATRQGRKYILVVREAAPSDAGEVVFSVRGLTSKASLIVRERPAAIIKPLEDQWVAPGEDVELRCELSRAGTPVHWLKDRKAIRKSQKYDVVCEGTMAMLVIRGASLKDAGEYTCEVEASKSTASLHVEEKANCFTEELTNLQVEEKGTAVFTCKTEHPAATVTWRKGLLELRASGKHQPSQEGLTLRLTISALEKADSDTYTCDIGQAQSRAQLLVQGRRVHIIEDLEDVDVQEGSSATFRCRISPANYEPVHWFLDKTPLHANELNEIDAQPGGYHVLTLRQLALKDSGTIYFEAGDQRASAALRVTEKPSVFSRELTDATITEGEDLTLVCETSTCDIPMCWTKDGKTLRGSARCQLSHEGHRAQLLITGATLQDSGRYKCEAGGACSSSIVRVHARPVRFQEALKDLEVLEGGAATLRCVLSSVAAPVKWCYGNNVLRPGDKYSLRQEGAMLELVVRNLRPQDSGRYSCSFGDQTTSATLTVTALPAQFIGKLRNKEATEGATATLRCELSKTAPVEWRKGSETLRDGDRYCLRQDGAMCELQIRGLAMVDAAEYSCVCGEERTSASLTIRPMPAHFIGRLRHQESIEGATATLRCELSKAAPVEWRKGRESLRDGDRHSLRQDGAVCELQICGLAVADAGEYSCVCGEERTSATLTVKALPAKFTEGLRNEEAVEGATAMLWCELSKVAPVEWRKGPENLRDGDRYILRQEGTRCELQICGLAMADAGEYLCVCGQERTSATLTIRALPARFIEDVKNQEAREGATAVLQCELNSAAPVEWRKGSETLRDGDRYSLRQDGTKCELQIRGLAMADTGEYSCVCGQERTSAMLTVRALPIKFTEGLRNEEATEGATAVLRCELSKMAPVEWWKGHETLRDGDRHSLRQDGARCELQIRGLVAEDAGEYLCMCGKERTSAMLTVRAMPSKFIEGLRNEEATEGDTATLWCELSKAAPVEWRKGHETLRDGDRHSLRQDGSRCELQIRGLAVVDAGEYSCVCGQERTSATLTVRALPARFIEDVKNQEAREGATAVLQCELSKAAPVEWRKGSETLRGGDRYSLRQDGTRCELQIHGLSVADTGEYSCVCGQERTSATLTVRAPQPVFREPLQSLQAEEGSTATLQCELSEPTATVVWSKGGLQLQANGRREPRLQGCTAELVLQDLQREDTGEYTCTCGSQATSATLTVTAAPVRFLRELQHQEVDEGGTAHLCCELSRAGASVEWRKGSLQLFPCAKYQMVQDGAAAELLVRGVEQEDAGDYTCDTGHTQSMASLSVRVPRPKFKTRLQSLEQETGDIARLCCQLSDAESGAVVQWLKEGVELHAGPKYEMRSQGATRELLIHQLEAKDTGEYACVTGGQKTAASLRVTEPEVTIVRGLVDAEVTADEDVEFSCEVSRAGATGVQWCLQGLPLQSNEVTEVAVRDGRIHTLRLKGVTPEDAGTVSFHLGNHASSAQLTVRAPEVTILEPLQDVQLSEGQDASFQCRLSRASGQEARWALGGVPLQANEMNDITVEQGTLHLLTLHKVTLEDAGTVSFHVGTCSSEAQLKVTAKNTVVRGLENVEALEGGEALFECQLSQPEVAAHTWLLDDEPVRTSENAEVVFFENGLRHLLLLKNLRPQDSCRVTFLAGDMVTSAFLTVRGWRLEILEPLKNAAVRAGAQARFTCTLSEAVPVGEASWYINGAAVQPDDSDWTVTADGSHQALLLRSAQPHHAGEVTFACRDAVASARLTVLGLPDPPEDAEVVAHSSHTVTLSWAAPMSDGGGGLCGYRVEVKEGATGQWRLCHELVPGPECVVDGLAPGETYRFRVAAVGPVGAGEPVHLPQTVRLAEPPKPVPPQPSAPESRQVAAGEDVSLELEVVAEAGEVIWHKGMERIQPGGRFEVVSQGRQQMLVIKGFTAEDQGEYHCGLAQGSICPAAATFQVALSPASVDEAPQPSLPPEAAQEGDLHLLWEALARKRRMSREPTLDSISELPEEDGRSQRLPQEAEEVAPDLSEGYSTADELARTGDADLSHTSSDDESRAGTPSLVTYLKKAGRPGTSPLASKVGAPAAPSVKPQQQQEPLAAVRPPLGDLSTKDLGDPSMDKAAVKIQAAFKGYKVRKEMKQQEGPMFSHTFGDTEAQVGDALRLECVVASKADVRARWLKDGVELTDGRHHHIDQLGDGTCSLLIAGLDRADAGCYTCQVSNKFGQVTHSACVVVSGSESEAESSSGGELDDAFRRAARRLHRLFRTKSPAEVSDEELFLSADEGPAEPEEPADWQTYREDEHFICIRFEALTEARQAVTRFQEMFATLGIGVEIKLVEQGPRRVEMCISKETPAPVVPPEPLPSLLTSDAAPVFLTELQNQEVQDGYPVSFDCVVTGQPMPSVRWFKDGKLLEEDDHYMINEDQQGGHQLIITAVVPADMGVYRCLAENSMGVSSTKAELRVDLTSTDYDTAADATESSSYFSAQGYLSSREQEGTESTTDEGQLPQVVEELRDLQVAPGTRLAKFQLKVKGYPAPRLYWFKDGQPLTASAHIRMTDKKILHTLEIISVTREDSGQYAAYISNAMGAAYSSARLLVRGPDEPEEKPASDVHEQLVPPRMLERFTPKKVKKGSSITFSVKVEGRPVPTVHWLREEAERGVLWIGPDTPGYTVASSAQQHSLVLLDVGRQHQGTYTCIASNAAGQALCSASLHVSGLPKVEEQEKVKEALISTFLQGTTQAISAQGFQTASFADLGGQRKEEPLAAKEALGHLSLAEVGTEEFLQKLTSQITEMVSAKITQAKLQVPGGDSDEDSKTPSASPRHGRSRPSSSIQESSSESEDGDARGEIFDIYVVTADYLPLGAEQDAITLREGQYVEVLDAAHPLRWLVRTKPTKSSPSRQGWVSPAYLDRRLKLSPEWGAAEAPEFPGEAVSEDEYKARLSSVIQELLSSEQAFVEELQFLQSHHLQHLERCPHVPIAVAGQKAVIFRNVRDIGRFHSSFLQELQQCDTDDDVAMCFIKNQAAFEQYLEFLVGRVQAESVVVSTAIQEFYKKYAEEALLAGDPSQPPPPPLQHYLEQPVERVQRYQALLKELIRNKARNRQNCALLEQAYAVVSALPQRAENKLHVSLMENYPGTLQALGEPIRQGHFIVWEGAPGARMPWKGHNRHVFLFRNHLVICKPRRDSRTDTVSYVFRNMMKLSSIDLNDQVEGDDRAFEVWQEREDSVRKYLLQARTAIIKSSWVKEICGIQQRLALPVWRPPDFEEELADCTAELGETVKLACRVTGTPKPVISWYKDGKAVQVDPHHILIEDPDGSCALILDSLTGVDSGQYMCFAASAAGNCSTLGKILVQVPPRFVNKVLASPFVEGEDAQFTCTIEGAPYPQIRWYKDGALLTTGNKFQTLSEPRSGLLVLVIRAASKEDLGLYECELVNRLGSARASAELRIQSPMLQAQEQCHREQLVAAVEVTEQETKVPKKTVIIEETITTVVKSPRGQRRSPSKSPSRSPSRCSASPLRPGLLAPDLLYLPGAGQPRRPEAEPGQKPVVPTLYVTEAEAHSPALPGLSGPQPKWVEVEETIEVRVKKMGPQGVSPTTEVPRSSSGHLFTLPGATPGGDPNSNNSNNKLLAQEAWAQGTAMVGVREPLVFRVDARGSVDWAASGMGSLEEEGTMEEAGEEEGEDGDAFVTEESQDTHSLGDRDPKILTHNGRMLTLADLEDYVPGEGETFHCGGPGPGAPDDPPCEVSVIQREIGEPTVGQPVLLSVGHALGPRGPLGLFRPEPRGASPPGPQVRSLEGTSFLLREAPARPVGSAPWTQSFCTRIRRSADSGQSSFTTELSTQTVNFGTVGETVTLHICPDRDGDEAAQP

SEQ ID NO: 6610 - protein, 718 aa, Homo sapiens
MRAVLDTADIAIVALYFILVMCIGFFAMWKSNRSTVSGYFLAGRSMTWVTIGASLFVSNIGSEHFIGLAGSGAASGFAVGAWEFNALLLLQLLGWVFIPIYIRSGVYTMPEYLSKRFGGHRIQVYFAALSLILYIFTKLSVDLYSGALFIQESLGWNLYVSVILLIGMTALLTVTGGLVAVIYTDTLQALLMIIGALTLMIISIMEIGGFEEVKRRYMLASPDVTSILLTYNLSNTNSCNVSPKKEALKMLRNPTDEDVPWPGFILGQTPASVWYWCADQVIVQRVLAAKNIAHAKGSTLMAGFLKLLPMFIIVVPGMISRILFTDDIACINPEHCMLVCGSRAGCSNIAYPRLVMKLVPVGLRGLMMAVMIAALMSDLDSIFNSASTIFTLDVYKLIRKSASSRELMIVGRIFVAFMVVISIAWVPIIVEMQGGQMYLYIQEVADYLTPPVAALFLLAIFWKRCNEQGAFYGGMAGFVLGAVRLILAFAYRAPECDQPDNRPGFIKDIHYMYVATGLFWVTGLITVIVSLLTPPPTKEQIRTTTFWSKKNLVVKENCSPKEEPYQMQEKSILRCSENNETINHIIPNGKSEDSIKGLQPEDVNLLVTCREEGNPVASLGHSEAETPVDAYSNGQAALMGEKERKKETDDGGRYWKFIDWFCGFKSKSLSKRSLRDLMEEEAVCLQMLEETRQVKVILNIGLFAVCSLGIFMFVYFSL

SEQ ID NO: 6611 - protein, 1013 aa, Homo sapiens
MGDKKDDKDSPKKNKGKERRDLDDLKKEVAMTEHKMSVEEVCRKYNTDCVQGLTHSKAQEILARDGPNALTPPPTTPEWVKFCRQLFGGFSILLWIGAILCFLAYGIQAGTEDDPSGDNLYLGIVLAAVVIITGCFSYYQEAKSSKIMESFKNMVPQQALVIREGEKMQVNAEEVVVGDLVEIKGGDRVPADLRIISAHGCKVDNSSLTGESEPQTRSPDCTHDNPLETRNITFFSTNCVEGTARGVVVATGDRTVMGRIATLASGLEVGKTPIAIEIEHFIQLITGVAVFLGVSFFILSLILGYTWLEAVIFLIGIIVANVPEGLLATVTVCLTVTAKRMARKNCLVKNLEAVETLGSTSTICSDKTGTLTQNRMTVAHMWFDNQIHEADTTEDQSGTSFDKSSHTWVALSHIAGLCNRAVFKGGQDNIPVLKRDVAGDASESALLKCIELSSGSVKLMRERNKKVAEIPFNSTNKYQLSIHETEDPNDNRYLLVMKGAPERILDRCSTILLQGKEQPLDEEMKEAFQNAYLELGGLGERVLGFCHYYLPEEQFPKGFAFDCDDVNFTTDNLCFVGLMSMIDPPRAAVPDAVGKCRSAGIKVIMVTGDHPITAKAIAKGVGIISEGNETVEDIAARLNIPVSQVNPRDAKACVIHGTDLKDFTSEQIDEILQNHTEIVFARTSPQQKLIIVEGCQRQGAIVAVTGDGVNDSPALKKADIGVAMGIAGSDVSKQAADMILLDDNFASIVTGVEEGRLIFDNLKKSIAYTLTSNIPEITPFLLFIMANIPLPLGTITILCIDLGTDMVPAISLAYEAAESDIMKRQPRNPRTDKLVNERLISMAYGQIGMIQALGGFFSYFVILAENGFLPGNLVGIRLNWDDRTVNDLEDSYGQQWTYEQRKVVEFTCHTAFFVSIVVVQWADLIICKTRRNSVFQQGMKNKILIFGLFEETALAAFLSYCPGMDVALRMYPLKPSWWFCAFPYSFLIFVYDEIRKLILRRNPGGWVEKETYY

SEQ ID NO: 6612 - protein, 1042 aa, Homo sapiens
MHQLFQKTPEIYSVELSGTKDIVKTDKGDGKEKYRGLKNNCLELKKKNHKEEFQKELHLDDHKLSNRELEEKYGTDIIMGLSSTRAAELLARDGPNSLTPPKQTPEIVKFLKQMVGGFSILLWVGAFLCWIAYGIQYSSDKSASLNNVYLGCVLGLVVILTGIFAYYQEAKSTNIMSSFNKMIPQQALVIRDSEKKTIPSEQLVVGDIVEVKGGDQIPADIRVLSSQGCRVDNSSLTGESEPQPRSSEFTHENPLETKNICFYSTTCLEGTVTGMVINTGDRTIIGHIASLASGVGNEKTPIAIEIEHFVHIVAGVAVSIGILFFIIAVSLKYQVLDSIIFLIGIIVANVPEGLLATVTVTLSLTAKRMAKKNCLVKNLEAVETLGSTSIICSDKTGTLTQNRMTVAHLWFDNQIFVADTSEDHSNQVFDQSSRTWASLSKIITLCNRAEFKPGQENVPIMKKAVIGDASETALLKFSEVILGDVMEIRKRNRKVAEIPFNSTNKFQLSIHEMDDPHGKRFLMVMKGAPERILEKCSTIMINGEEHPLDKSTAKTFHTAYMELGGLGERVLGFCHLYLPADEFPETYSFDIDAMNFPTSNLCFVGLLSMIDPPRSTVPDAVTKCRSAGIKVIMVTGDHPITAKAIAKSVGIISANSETVEDIAHRLNIAVEQVNKRDAKAAVVTGMELKDMSSEQLDEILANYQEIVFARTSPQQKLIIVEGCQRQDAVVAVTGDGVNDSPALKKADIGIAMGIAGSDAAKNAADMVLLDDNFASIVTGVEEGRLIFDNLKKTIAYSLTKNIAELCPFLIYIIVGLPLPIGTITILFIDLGTDIIPSIALAYEKAESDIMNRKPRHKNKDRLVNQPLAVYSYLHIGLMQALGAFLVYFTVYAQEGFLPRTLINLRVEWEKDYVNDLKDSYGQEWTRYQREYLEWTGYTAFFVGILVQQIADLIIRKTRRNSIFQQGLFRNKVIWVGITSQIIIGLILSYGLGSVTALSFTMLRAQYWFVAVPHAILIWVYDEVRKLFIRLYPGSWWDKNMYY

SEQ ID NO: 6613 - protein, 1035 aa, Homo sapiens
MGKAENYELYSVELGPGPGGDMAAKMSKKKKAGGGGGKRKEKLENMKKEMEINDHQLSVAELEQKYQTSATKGLSASLAAELLLRDGPNALRPPRGTPEYVKFARQLAGGLQCLMWVAAAICLIAFAIQASEGDLTTDDNLYLAIALIAVVVVTGCFGYYQEFKSTNIIASFKNLVPQQATVIRDGDKFQINADQLVVGDLVEMKGGDRVPADIRILAAQGCKVDNSSLTGESEPQTRSPECTHESPLETRNIAFFSTMCLEGTAQGLVVNTGDRTIIGRIASLASGVENEKTPIAIEIEHFVDIIAGLAILFGATFFIVAMCIGYTFLRAMVFFMAIVVAYVPEGLLATVTVCLSLTAKRLASKNCVVKNLEAVETLGSTSVICSDKTGTLTQNRMTVSHLWFDNHIHTADTTEDQSGQTFDQSSETWRALCRVLTLCNRAAFKSGQDAVPVPKRIVIGDASETALLKFSELTLGNAMGYRDRFPKVCEIPFNSTNKFQLSIHTLEDPRDPRHLLVMKGAPERVLERCSSILIKGQELPLDEQWREAFQTAYLSLGGLGERVLGFCQLYLNEKDYPPGYAFDVEAMNFPSSGLCFAGLVSMIDPPRATVPDAVLKCRTAGIRVIMVTGDHPITAKAIAASVGIISEGSETVEDIAARLRVPVDQVNRKDARACVINGMQLKDMDPSELVEALRTHPEMVFARTSPQQKLVIVESCQRLGAIVAVTGDGVNDSPALKKADIGVAMGIAGSDAAKNAADMILLDDNFASIVTGVEQGRLIFDNLKKSIAYTLTKNIPELTPYLIYITVSVPLPLGCITILFIELCTDIFPSVSLAYEKAESDIMHLRPRNPKRDRLVNEPLAAYSYFQIGAIQSFAGFTDYFTAMAQEGWFPLLCVGLRAQWEDHHLQDLQDSYGQEWTFGQRLYQQYTCYTVFFISIEVCQIADVLIRKTRRLSAFQQGFFRNKILVIAIVFQVCIGCFLCYCPGMPNIFNFMPIRFQWWLVPLPYGILIFVYDEIRKLGVRCCPGSWWDQELYY

SEQ ID NO: 6614 - protein, 1029 aa, Homo sapiens
MGLWGKKGTVAPHDQSPRRRPKKGLIKKKMVKREKQKRNMEELKKEVVMDDHKLTLEELSTKYSVDLTKGHSHQRAKEILTRGGPNTVTPPPTTPEWVKFCKQLFGGFSLLLWTGAILCFVAYSIQIYFNEEPTKDNLYLSIVLSVVVIVTGCFSYYQEAKSSKIMESFKNMVPQQALVIRGGEKMQINVQEVVLGDLVEIKGGDRVPADLRLISAQGCKVDNSSLTGESEPQSRSPDFTHENPLETRNICFFSTNCVEGTARGIVIATGDSTVMGRIASLTSGLAVGQTPIAAEIEHFIHLITVVAVFLGVTFFALSLLLGYGWLEAIIFLIGIIVANVPEGLLATVTVCLTLTAKRMARKNCLVKNLEAVETLGSTSTICSDKTGTLTQNRMTVAHMWFDMTVYEADTTEEQTGKTFTKSSDTWFMLARIAGLCNRADFKANQEILPIAKRATTGDASESALLKFIEQSYSSVAEMREKNPKVAEIPFNSTNKYQMSIHLREDSSQTHVLMMKGAPERILEFCSTFLLNGQEYSMNDEMKEAFQNAYLELGGLGERVLGFCFLNLPSSFSKGFPFNTDEINFPMDNLCFVGLISMIDPPRAAVPDAVSKCRSAGIKVIMVTGDHPITAKAIAKGVGIISEGTETAEEVAARLKIPISKVDASAAKAIVVHGAELKDIQSKQLDQILQNHPEIVFARTSPQQKLIIVEGCQRLGAVVAVTGDGVNDSPALKKADIGIAMGISGSDVSKQAADMILLDDNFASIVTGVEEGRLIFDNLKKSIMYTLTSNIPEITPFLMFIILGIPLPLGTITILCIDLGTDMVPAISLAYESAESDIMKRLPRNPKTDNLVNHRLIGMAYGQIGMIQALAGFFTYFVILAENGFRPVDLLGIRLHWEDKYLNDLEDSYGQQWTYEQRKVVEFTCQTAFFVTIVVVQWADLIISKTRRNSLFQQGMRNKVLIFGILEETLLAAFLSYTPGMDVALRMYPLKITWWLCAIPYSILIFVYDEIRKLLIRQHPDGWVERETYY

SEQ ID NO: 6615 - protein, 1023 aa, Homo sapiens
MGKGVGRDKYEPAAVSEQGDKKGKKGKKDRDMDELKKEVSMDDHKLSLDELHRKYGTDLSRGLTSARAAEILARDGPNALTPPPTTPEWIKFCRQLFGGFSMLLWIGAILCFLAYSIQAATEEEPQNDNLYLGVVLSAVVIITGCFSYYQEAKSSKIMESFKNMVPQQALVIRNGEKMSINAEEVVVGDLVEVKGGDRIPADLRIISANGCKVDNSSLTGESEPQTRSPDFTNENPLETRNIAFFSTNCVEGTARGIVVYTGDRTVMGRIATLASGLEGGQTPIAAEIEHFIHIITGVAVFLGVSFFILSLILEYTWLEAVIFLIGIIVANVPEGLLATVTVCLTLTAKRMARKNCLVKNLEAVETLGSTSTICSDKTGTLTQNRMTVAHMWFDNQIHEADTTENQSGVSFDKTSATWLALSRIAGLCNRAVFQANQENLPILKRAVAGDASESALLKCIELCCGSVKEMRERYAKIVEIPFNSTNKYQLSIHKNPNTSEPQHLLVMKGAPERILDRCSSILLHGKEQPLDEELKDAFQNAYLELGGLGERVLGFCHLFLPDEQFPEGFQFDTDDVNFPIDNLCFVGLISMIDPPRAAVPDAVGKCRSAGIKVIMVTGDHPITAKAIAKGVGIISEGNETVEDIAARLNIPVSQVNPRDAKACVVHGSDLKDMTSEQLDDILKYHTEIVFARTSPQQKLIIVEGCQRQGAIVAVTGDGVNDSPALKKADIGVAMGIAGSDVSKQAADMILLDDNFASIVTGVEEGRLIFDNLKKSIAYTLTSNIPEITPFLIFIIANIPLPLGTVTILCIDLGTDMVPAISLAYEQAESDIMKRQPRNPKTDKLVNERLISMAYGQIGMIQALGGFFTYFVILAENGFLPIHLLGLRVDWDDRWINDVEDSYGQQWTYEQRKIVEFTCHTAFFVSIVVVQWADLVICKTRRNSVFQQGMKNKILIFGLFEETALAAFLSYCPGMGVALRMYPLKPTWWFCAFPYSLLIFVYDEVRKLIIRRRPGGWVEKETYY

SEQ ID NO: 6616 - protein, 1000 aa, Homo sapiens
MVKREKQKRNMEELKKEVVMDDHKLTLEELSTKYSVDLTKGHSHQRAKEILTRGGPNTVTPPPTTPEWVKFCKQLFGGFSLLLWTGAILCFVAYSIQIYFNEEPTKDNLYLSIVLSVVVIVTGCFSYYQEAKSSKIMESFKNMVPQQALVIRGGEKMQINVQEVVLGDLVEIKGGDRVPADLRLISAQGCKVDNSSLTGESEPQSRSPDFTHENPLETRNICFFSTNCVEGTARGIVIATGDSTVMGRIASLTSGLAVGQTPIAAEIEHFIHLITVVAVFLGVTFFALSLLLGYGWLEAIIFLIGIIVANVPEGLLATVTVCLTLTAKRMARKNCLVKNLEAVETLGSTSTICSDKTGTLTQNRMTVAHMWFDMTVYEADTTEEQTGKTFTKSSDTWFMLARIAGLCNRADFKANQEILPIAKRATTGDASESALLKFIEQSYSSVAEMREKNPKVAEIPFNSTNKYQMSIHLREDSSQTHVLMMKGAPERILEFCSTFLLNGQEYSMNDEMKEAFQNAYLELGGLGERVLGFCFLNLPSSFSKGFPFNTDEINFPMDNLCFVGLISMIDPPRAAVPDAVSKCRSAGIKVIMVTGDHPITAKAIAKGVGIISEGTETAEEVAARLKIPISKVDASAAKAIVVHGAELKDIQSKQLDQILQNHPEIVFARTSPQQKLIIVEGCQRLGAVVAVTGDGVNDSPALKKADIGIAMGISGSDVSKQAADMILLDDNFASIVTGVEEGRLIFDNLKKSIMYTLTSNIPEITPFLMFIILGIPLPLGTITILCIDLGTDMVPAISLAYESAESDIMKRLPRNPKTDNLVNHRLIGMAYGQIGMIQALAGFFTYFVILAENGFRPVDLLGIRLHWEDKYLNDLEDSYGQQWTYEQRKVVEFTCQTAFFVTIVVVQWADLIISKTRRNSLFQQGMRNKVLIFGILEETLLAAFLSYTPGMDVALRMYPLKITWWLCAIPYSILIFVYDEIRKLLIRQHPDGWVERETYY

SEQ ID NO: 6617 - protein, 1020 aa, Homo sapiens
MGRGAGREYSPAATTAENGGGKKKQKEKELDELKKEVAMDDHKLSLDELGRKYQVDLSKGLTNQRAQDVLARDGPNALTPPPTTPEWVKFCRQLFGGFSILLWIGAILCFLAYGIQAAMEDEPSNDNLYLGVVLAAVVIVTGCFSYYQEAKSSKIMDSFKNMVPQQALVIREGEKMQINAEEVVVGDLVEVKGGDRVPADLRIISSHGCKVDNSSLTGESEPQTRSPEFTHENPLETRNICFFSTNCVEGTARGIVIATGDRTVMGRIATLASGLEVGRTPIAMEIEHFIQLITGVAVFLGVSFFVLSLILGYSWLEAVIFLIGIIVANVPEGLLATVTVCLTLTAKRMARKNCLVKNLEAVETLGSTSTICSDKTGTLTQNRMTVAHMWFDNQIHEADTTEDQSGATFDKRSPTWTALSRIAGLCNRAVFKAGQENISVSKRDTAGDASESALLKCIELSCGSVRKMRDRNPKVAEIPFNSTNKYQLSIHEREDSPQSHVLVMKGAPERILDRCSTILVQGKEIPLDKEMQDAFQNAYMELGGLGERVLGFCQLNLPSGKFPRGFKFDTDELNFPTEKLCFVGLMSMIDPPRAAVPDAVGKCRSAGIKVIMVTGDHPITAKAIAKGVGIISEGNETVEDIAARLNIPMSQVNPREAKACVVHGSDLKDMTSEQLDEILKNHTEIVFARTSPQQKLIIVEGCQRQGAIVAVTGDGVNDSPALKKADIGIAMGISGSDVSKQAADMILLDDNFASIVTGVEEGRLIFDNLKKSIAYTLTSNIPEITPFLLFIIANIPLPLGTVTILCIDLGTDMVPAISLAYEAAESDIMKRQPRNSQTDKLVNERLISMAYGQIGMIQALGGFFTYFVILAENGFLPSRLLGIRLDWDDRTMNDLEDSYGQEWTYEQRKVVEFTCHTAFFASIVVVQWADLIICKTRRNSVFQQGMKNKILIFGLLEETALAAFLSYCPGMGVALRMYPLKVTWWFCAFPYSLLIFIYDEVRKLILRRYPGGWVEKETYY

SEQ ID NO: 6618 - protein, 545 aa, Homo sapiens
MGNTPQKKAVFGQCRGLPCVAPLLTTVEEAPRGISARVWGHFPKWLNGSLLRIGPGKFEFGKDKYNHWFDGMALLHQFRMAKGTVTYRSKFLQSDTYKANSAKNRIVISEFGTLALPDPCKNVFERFMSRFELPGKAAAMTDNTNVNYVRYKGDYYLCTETNFMNKVDIETLEKTEKVDWSKFIAVNGATAHPHYDPDGTAYNMGNSFGPYGFSYKVIRVPPEKVDLGETIHGVQVICSIASTEKGKPSYYHSFGMTRNYIIFIEQPLKMNLWKIATSKIRGKAFSDGISWEPQCNTRFHVVEKRTGQLLPGRYYSKPFVTFHQINAFEDQGCVIIDLCCQDNGRTLEVYQLQNLRKAGEGLDQVHNSAAKSFPRRFVLPLNVSLNAPEGDNLSPLSYTSASAVKQADGTIWCSHENLHQEDLEKEGGIEFPQIYYDRFSGKKYHFFYGCGFRHLVGDSLIKVDVVNKTLKVWREDGFYPSEPVFVPAPGTNEEDGGVILSVVITPNQNESNFLLVLDAKNFEELGRAEVPVQMPYGFHGTFIPI

SEQ ID NO: 6619 - protein, 534 aa, Homo sapiens
FCACSLFSSTQNCQCERIWKSLDLLNTKMFFRVFLHFIRSHSATAVDFLPVMVHRLPVFKRYMGNTPQKKAVFGQCRGLPCVAPLLTTVEEAPRGISARVWGHFPKWLNGSLLRIGPGKFEFGKDKYNHWFDGMALLHQFRMAKGTVTYRSKFLQSDTYKANSAKNRIVISEFGTLALPDPCKNVFERFMSRFELPGKAAGFSYKVIRVPPEKVDLGETIHGVQVICSIASTEKGKPSYYHSFGMTRNYIIFIEQPLKMNLWKIATSKIRGKAFSDGISWEPQCNTRFHVVEKRTGQLLPGRYYSKPFVTFHQINAFEDQGCVIIDLCCQDNGRTLEVYQLQNLRKAGEGLDQVHNSAAKSFPRRFVLPLNVSLNAPEGDNLSPLSYTSASAVKQADGTIWCSHENLHQEDLEKEGGIEFPQIYYDRFSGKKYHFFYGCGFRHLVGDSLIKVDVVNKTLKVWREDGFYPSEPVFVPAPGTNEEDGGVILSVVITPNQNESNFILVLDAKNFEELGRAEVPVQMPYGFHGTFIPI

SEQ ID NO: 6620 - protein, 539 aa, Homo sapiens
MGNTPQKKAVFGQCRGLPCVAPLLTTVEEAPRGISARVWGHFPKWLNGSLLRIGPGKFEFGKDKYNHWFDGMALLHQFRMAKGTVTYRSKFLQSDTYKANSAKNRIVISEFGTLALPDPCKNVFERFMSRFELPGKAAAMTDNTNVNYVRYKGDYYLCTETNFMNKVDIETLEKTEKVDWSKFIAVNGATAHPHYDPDGTAYNMGNSFGPYGFSYKVIRVPPEKVDLGETIHGVQVICSIASTEKGKPSYYHSFGMTRNYIIFIEQPLKMNLWKIATSKIRGKAFSDGISWEPQCNTRFHVVEKRTGQLLPGRYYSKPFVTFHQINAFEDQGCVIIDLCCQDNGRTLEVYQLQNLRKAGEGLDQVHNSAAKSFPRRFVLPLNVSLNAPEGDNLSPLSYTSASAVKQADGTIWCSHENLHQEDLEKEGGIEFPQIYYDRFSGKKYHFFYGCGFRHLVGDSLIKVDVVWREDGFYPSEPVFVPAPGTNEEDGGVILSVVITPNQNESNFLLVLDAKNFEELGRAEVPVQMPYGFHGTFIPI

SEQ ID NO: 6621 - protein, 550 aa, Homo sapiens
MVYRLPVFKRYMGNTPQKKAVFGQCRGLPCVAPLLTTVEEAPRGISARVWGHFPKWLNGSLLRIGPGKFEFGKDKYNHWFDGMALLHQFRMAKGTVTYRSKFLQSDTYKANSAKNRIVISEFGTLALPDPCKNVFERFMSRFELPGKAAAMTDNTNVNYVRYKGDYYLCTETNFMNKVDIETLEKTEKVDWSKFIAVNGATAHPHYDPDGTAYNMGNSFGPYGFSYKVIRVPPEKVDLGETIHGVQVICSIASTEKGKPSYYHSFGMTRNYIIFIEQPLKMNLWKIATSKIRGKAFSDGISWEPQCNTRFHVVEKRTGQLLPGRYYSKPFVTFHQINAFEDQGCVIIDLCCQDNGRTLEVYQLQNLRKAGEGLDQVHNSAAKSFPRRFVLPLNVSLNAPEGDNLSPLSYTSASAVKQADGTIWCSHENLHQEDLEKEGGIEFPQIYYDRFSGKKYHFFYGCGFRHLVGDSLIKVDVVWREDGFYPSEPVFVPAPGTNEEDGGVILSVVITPNQNESNFLLVLDAKNFEELGRAEVPVQMPYGFHGTFIPI

SEQ ID NO: 6622 - protein, 556 aa, Homo sapiens
MVYRLPVFKRYMGNTPQKKAVFGQCRGLPCVAPLLTTVEEAPRGISARVWGHFPKWLNGSLLRIGPGKFEFGKDKYNHWFDGMALLHQFRMAKGTVTYRSKFLQSDTYKANSAKNRIVISEFGTLALPDPCKNVFERFMSRFELPGKAAAMTDNTNVNYVRYKGDYYLCTETNFMNKVDIETLEKTEKVDWSKFIAVNGATAHPHYDPDGTAYNMGNSFGPYGFSYKVIRVPPEKVDLGETIHGVQVICSIASTEKGKPSYYHSFGMTRNYIIFIEQPLKMNLWKIATSKIRGKAFSDGISWEPQCNTRFHVVEKRTGQLLPGRYYSKPFVTFHQINAFEDQGCVIIDLCCQDNGRTLEVYQLQNLRKAGEGLDQVHNSAAKSFPRRFVLPLNVSLNAPEGDNLSPLSYTSASAVKQADGTIWCSHENLHQEDLEKEGGIEFPQIYYDRFSGKKYHFFYGCGFRHLVGDSLIKVDVVNKTLKVWREDGFYPSEPVFVPAPGTNEEDGGVILSVVITPNQNESNFLLVLDAKNFEELGRAEVPVQMPYGFHGTFIPI

SEQ ID NO: 6623 - protein, 869 aa, Homo sapiens
SESAVVVQTECSLLFVWLRFHARRWLRMSSSHFASRHRKDISTEMIRTKIAHRKSLSQKENRHKEYERNRHFGLKDVNIPTLEGRILVELDETSQGLVPEKTNVKPRAMKTILGDQRKQMLQKYKEEKQLQKLKEQREKAKRGIFKVGRYRPDMPCFLLSNQNAVKAEPKKAIPSSVRITRSKAKDQMEQTKIDNESDVRAIRPGPRQTSEKKVSDKEKKVVQPVMPTSLRMTRSATQAAKQVPRTVSSTTARKPVTRAANENEPEGKVPSKGRPAKNVETKPDKGISCKVDSEENTLNSQTNATSGMNPDGVLSKMENLPEINTAKIKGKNSFAPKDFMFQPLDGLKTYQVTPMTPRSANAFLTPSYTWTPLKTEVDESQATKEILAQKCKTYSTKTIQQDSNKLPCPLGPLTVWHEEHVLNKNEATTKNLNGLPIKEVPSLERNEGRIAQPHHGVPYFRNILQSETEKLTSHCFEWDRKLELDIPDDAKDLIRTAVGQTRLLMKERFKQFEGLVDDCEYKRGIKETTCTDLDGFWDMVSFQIEDVIHKFNNLIKLEESGWQVNNNMNHNMNKNVFRKKVVSGIASKPKQDDAGRIAARNRLAAIKNAMRERIRQEECAETAVSVIPKEVDKIVFDAGFFRVESPVKLFSGLSVSSEGPSQRLGTPKSVNKAVSQSRNEMGIPQQTTSPENAGPQNTKSEHVKKTLFLSIPESRSSIEDAQCPGLPDLIEENHVVNKTDLKVDCLSSERMSLPLLAGGVADDINTNKKEGISDVVEGMELNSSITSQDVLMSSPEKNTASQNSILEEGETKISQSELFDNKSLTTECHLLDSVGSCYVARAGLEVLGSSDPTTSASRVAGTTARSKLQ

SEQ ID NO: 6624 - protein, 846 aa, Homo sapiens
MSSSHFASRHRKDISTEMIRTKIAHRKSLSQKENRHKEYERNRHFGLKDVNIPTLEGRILVELDETSQELVPEKTNVKPRAMKTILGDQRKQMLQKYKEEKQLQKLKEQREKAKRGIFKVGRYRPDMPCFLLSNQNAVKAEPKKAIPSSVRITRSKAKDQMEQTKIDNESDVRAIRPGPRQTSEKKVSDKEKKVVQPVMPTSLRMTRSATQAAKQVPRTVSSTTARKPVTRAANENEPEGKVPSKGRPAKNVETKPDKGISCKVDSEENTLNSQTNATSGMNPDGVLSKMENLPEINTAKIKGKNSFAPKDFMFQPLDGLKTYQVTPMTPRSANAFLTPSYTWTPLKTEVDESQATKEILAQKCKTYSTKTIQQDSNKLPCPLGPLTVWHEEHVLNKNEATTKNLNGLPIKEVPSLERNEGRIAQPHHGVPYFRNILQSETEKLTSHCFEWDRKLELDIPDDAKDLIRTAVGQTRLLMKERFKQFEGLVDDCEYKRGIKETTCTDLDGFWDMVSFQIEDVIHKFNNLIKLEESGWQVNNNMNHNMNKNVFRKKVVSGIASKPKQDDAGRIAARNRLAAIKNAMRERIRQEECAETAVSVIPKEVDKIVFDAGFFRVESPVKLFSGLSVSSEGPSQRLGTPKSVNKAVSQSRNEMGIPQQTTSPENAGPQNTKSEHVKKTLFLSIPESRSSIEDAQCPGLPDLIEENHVVNKTDLKVDCLSSERMSLPLLAGGVADDINTNKKEGISDVVEGMELNSSITSQDVLMSSPEKNTASQNSILEEGETKISQSELFDNKSLTTECHLLDSPGLNCSNPFTQLERRHQEHARHISFGGNLITFSPLQPGEF

SEQ ID NO: 6625 - protein, 271 aa, Homo sapiens
MPGTAGMPGLNEILSDPEVLAAMQDPEVMVAFQDVAQNPANMSKYQSNTKNFLVLKKKKVGSSLAGDSWGNLFLGASGMASGCKIGPSILNSDLANLGAKCLQMLDSGADYLHLDVMDGHFVPNITFGHPVVESLRKQLGQDPFFDMHMMVSKPEQWVKPMAVAEANQYTFHLEATENPGTLIKDIRENGMKVGLAIKPGTSVHWLRTQFPSLDIEGDGGVGSDTVHKCAEAGANMTVSGSAIMRSEDPRSVINLLRNICSEAAQKRSLDR

SEQ ID NO: 6626 - protein, 311 aa, Homo sapiens
MDPRKVNELRAFVNMCKQDLSVLHTEEMCFLREWVESLAGKVPPATQKAKSEENAKEEKPNSKKVEEDLKADEPSSEESDLEIDKEGVIEPDTDAPQEMGGENAEITEEMMDQANDKKVAAIEALNDGELQKAIDLFTDAIKLNPRLAVLYAKRASVFVKLQKPNAAIRDCDRAIEINPDSAQPHKWRGKAHRLLGHWEEAAHDLALACKLDYDEDASVMLKEVQLRAQKIAEHQRKYEQKREEGMPGMAGMPGLNEILSDPEVLATIQDPEVMVAFQDVAQNPANMSKYQSNPKVMNLISKLSAKFGGQV

SEQ ID NO: 6627 - protein, 310 aa, Homo sapiens
AEIDKEGVIEPDTDAPQEMGDENAEITEEMMDQANDKKVAAIEALNDGELQKAIDLFTDAIKLNPRLAILYAKRASVFVKLQKPNAAIRDCDRAIEINPDSAQPYKWRGKAHRLLGHWEEAAHDLALACKLDYDEDASAMLKEVQPRAQKIAEHRRKYERKREEREIKERIERVKKAREEHERAQRTLQTTLCLVAPIFFEPVLFVDEILRIFGSMISVYSFFITGGFPGGMPGNFPGGMPGMGGGMPGMAGMPGLNEILSDPEVLAAMQDPEVMVAFQDVAQNPANMSKYQSNPKVMNLISKLSAKFGG

SEQ ID NO: 6628 - protein, 369 aa, Homo sapiens
  VARIANT 102, 272: Xaa = Any Amino Acid
MDPHKVNELWAFVKMCKQDPSILHTEEMHFLREWVESTVGKVPPATQKAKSEENTKEEKPDSKRVEEDLKADEQSSEKSDLEIDKEGVTEPDTDAPQEMGDXNAEIMEEMMDQANDKKVAAIETLNDGELQKATDLFTDAIKLNPRLAILYAKRASVFVKLQKPNAAIRDCDRAIEINPDSAQPYKWRGKAHRLLGHWEEAAHDLALACKLDYDEDVSAMLKEVQPRAQKIEEHRRKYERKREEREIKERIERVKKAREKHERAQREEEARXQSGAQYGSFLGGFPGGMPANFPRGMPGMGGGMPGMAGMPGLNEILSDPEVLAAMQDPEVLVAFQDVAQNPANMSKYQSNPKVMNLISKLSVKFGGQV

SEQ ID NO: 6629 - protein, 369 aa, Homo sapiens
MDPCKVNELRAFVKMCKQDPSVLHTEEMRFLREWVESMGGKVPPATQKAKSEENTKEEKPDSKKVEEDLKADEPSTEESDLEIDKEGVIEPDTDAPQEMGDENVEITEEMMDQANDKKVAAIEVLNDGELQKAIDLFTDAIKLNPRLAILYAKRASVFVKLQKPNAAIQDCDRAIEINPDSAQPYKWRGKAHRLLGHWEEAAHDLAFACKLDYDEDASAMLKEVQPRAQKIAEHWRKYERKHEEREIKERIERVKKAQEEQERAQREEEARRQSGAHYGPFPGGFPGGMPGNFPGGMPGMGGDMPGMAGMPGLNEILSDPEALAAMQDPEVMVAFQDVAQNPANMSKYQSNPKVMNLISKLSAKFGGQA

SEQ ID NO: 6630 - protein, 289 aa, Homo sapiens
MVSRLEEHRTGWGSPQANFRVERHAKKERKVGLCHISGFYPNALQIEVNTLRAFVKMCKQDLSVLHTKEMCFLREWVESMGSKVPPASQKAKSEENTKEEKSGSKNVEEDLKADEPSSKESYLEINNEGVIEPDTDAPQEMGDENAEITEEMMDQANDKKVAAVEALNDGELQKAIDLITDSIKLNPHLAILYAKRASVFIKLQKPNSAIRDCDRKNTWNGGGIPRMARRPGPNEILSDPEVPAALQDPEVMVAFQDVAQNPANMSKYQSNPKVMNLISKLSAKFGGQA

SEQ ID NO: 6631 - protein, 369 aa, Homo sapiens
MDPRKVNELRAFVKMCKQDPSVLHTEEMRFLREWVESMGGKVPPATQKAKSEENTKEEKPDSKKVEEDLKADEPSSEESDLEIDKEGVIEPDTDAPQEMGDENAEITEEMMDQANDKKVAAIEALNDGELQKAIDLFTDAIKLNPRLAILYAKRASVFVKLQKPNAAIRDCDRAIEINPDSAQPYKWRGKAHRLLGHWEEAAHDLALACKLDYDEDASAMLKEVQPRAQKIAEHRRKYERKREEREIKERIERVKKAREEHERAQREEEARRQSGAQYGSFPGGFPGGMPGNFPGGMPGMGGGMPGMAGMPGLNEILSDPEVLAAMQDPEVMVAFQDVAQNPANMSKYQSNPKVMNLISKLSAKFGGQA

SEQ ID NO: 6632 - protein, 356 aa, Homo sapiens
MTLLWCVVSLYFYGILQSDASERCDDWGLDTMRQIQVFEDEPARIKCPLFEHFLKFNYSTAHSAGLTLIWYWTRQDRDLEEPINFRLPENRISKEKDVLWFRPTLLNDTGNYTCMLRNTTYCSKVAFPLEVVQKDSCFNSPMKLPVHKLYIEYGIQRITCPNVDGYFPSSVKPTITWYMGCYKIQNFNNVIPEGMNLSFLIALISNNGNYTCVVTYPENGRTFHLTRTLTVKVVGSPKNAVPPVIHSPNDHVVYEKEPGEELLIPCTVYFSFLMDSRNEVWWTIDGKKPDDITIDVTINESISHSRTEDETRTQILSIKKVTSEDLKRSYVCHARSAKGEVAKAAKVKQKGNRCGQ

SEQ ID NO: 6633 - protein, 570 aa, Homo sapiens
MTLLWCVVSLYFYGILQSDASERCDDWGLDTMRQIQVFEDEPARIKCPLFEHFLKFNYSTAHSAGLTLIWYWTRQDRDLEEPINFRLPENRISKEKDVLWFRPTLLNDTGNYTCMLRNTTYCSKVAFPLEVVQKDSCFNSPMKLPVHKLYIEYGIQRITCPNVDGYFPSSVKPTITWYMGCYKIQNFNNVIPEGMNLSFLIALISNNGNYTCVVTYPENGRTFHLTRTLTVKVVGSPKNAVPPVIHSPNDHVVYEKEPGEELLIPCTVYFSFLMDSRNEVWWTIDGKKPDDITIDVTINESISHSRTEDETRTQILSIKKVTSEDLKRSYVCHARSAKGEVAKAAKVKQKVPAPRYTVELACGFGATVLLVVILIVVYHVYWLEMVLFYRAHFGTDETILDGKEYDIYVSYARNAEEEEFVLLTLRGVLENEFGYKLCIFDRDSLPGGIVTDETLSFIQKSRRLLVVLSPNYVLQGTQALLELKAGLENMASRGNINVILVQYKAVKETKVKELKRAKTVLTVIKWKGEKSKYPQGRFWKQLQVAMPVKKSPRRSSSDEQGLSYSSLKNV

SEQ ID NO: 6634 - protein, 346 aa, Homo sapiens
MTLLWCVVSLYFYGILQSDASERCDDWGLDTMRQIQVFEDEPARIKCPLFEHFLKFNYSTAHSAGLTLIWYWTRQDRDLEEPINFRLPENRISKEKDVLWFRPTLLNDTGNYTCMLRNTTYCSKVAFPLEVVQKDSCFNSPMKLPVHKLYIEYGIQRITCPNVDGYFPSSVKPTITWYMGCYKIQNFNNVIPEGMNLSFLIALISNNGNYTCVVTYPENGRTFHLTRTLTVKVVGSPKNAVPPVIHSPNDHVVYEKEPGEELLIPCTVYFSFLMDSRNEVWWTIDGKKPDDITIDVTINESASSKIHSGTGLWFWSHSPASGDSHCCLPCLLARDGPILPGSFWNR

SEQ ID NO: 6635 - protein, 324 aa, Homo sapiens
MTLLWCVVSLYFYGILQSDASERCDDWGLDTMRQIQVFEDEPARIKCPLFEHFLKFNYSTAHSAGLTLIWYWTRQDRDLEEPINFRLPENRISKEKDVLWFRPTLLNDTGNYTCMLRNTTYCSKVAFPLEVVQKDSCFNSPMKLPVHKLYIEYGIQRITCPNVDGYFPSSVKPTITWYMGCYKIQNFNNVIPEGMNLSFLIALISNNGNYTCVVTYPENGRTFHLTRTLTVKVVGSPKNAVPPVIHSPNDHVVYEKEPGEELLIPCTVYFSFLMDSRNEVWWTIDGKKPDDITIDVTINESASSKIHSGTGLWFWSHSPASGDS

SEQ ID NO: 6636 - protein, 540 aa, Homo sapiens [sequence omitted]

SEQ ID NO: 6637 - protein, 552 aa, Homo sapiens
MLDHKDLEAEIHPLKNEERKSQENLGNPSKNEDNVKSAPPQSRLSRCRAAAFFLSLFLCLFVVFVVSFVIPCPDRPASQRMWRIDYSAAVIYDFLAVDDINGDRIQDVLFLYKNTNSSNNFSRSCVDEGFSSPCTFAAAVSGANGSTLWERPVAQDVALVECAVPQPRGSEAPSACILVGRPSSFIAVNLFTGETLWNHSSSFSGNASILSPLLQVPDVDGDGAPDLLVLTQEREEVSGHLYSGSTGHQIGLRGSLGVDGESGFLLHVTRTGAHYILFPCASSLCGCSVKGLYEKVTGSGGPFKSDPHWESMLNATTRRMLSHSSGAVRYLMHVPGNAGADVLLVGSEAFVLLDGQELTPRWTPKAAHVLRKPIFGRYKPDTLAVAVENGTGTDRQILFLDLGTGAVLCSLALPSLPGGPLSASLPTADHRSAFFFWGLHELGSTSETETGEARHSLYMFHPTLPRVLLELANVSTHIVAFDAVLFEPSRHAAYILLTGPADSEAPGLVSVIKHKVRDLVPSSRVVRLGEGGPDSDQAIRDRFSRLRYQSEA

SEQ ID NO: 6638 - protein, 1074 aa, Homo sapiens
MIPICPVVSFTYVPSRLGEDAKMATGNYFGFTHSGAAAAAAAAQYSQQPASGVAYSHPTTVASYTVHQAPVAAHTVTAAYAPAAATVAVARPAPVAVAAAATAAAYGGYPTAHTATDYGYTQRQQEAPPPPPPATTQNYQDSYSYVRSTAPAVAYDSKQYYQQPTATAAAVAAAAQPQPSVAETYYQTAPKAGYSQGATQYTQAQQTRQVTAIKPATPSPATTTFSIYPVSSTVQPVAAAATVVPSYTQSATYSTTAVTYSGTSYSGYEAAVYSAASSYYQQQQQQQKQAAAAAAAAAATAAWTGTTFTKKAPFQNKQLKPKQPPKPPQIHYCDVCKISCAGPQTYKEHLEGQKHKKKEAALKASQNTSSSNSSTRGTQNQLRCELCDVSCTGADAYAAHIRGAKHQKVVKLHTKLGKPIPSTEPNVVSQATSSTAVSASKPTASPSSIAANNCTVNTSSVATSSMKGLTTTGNSSLNSTSNTKVSAVPTNMAAKKTSTPKINFVGGNKLQSTGNKAEDIKGTECVKSTPVTSAVQIPEVKQDTVSEPVTPASLAALQSDVQPVGHDYVEEVRNDEGKVIRFHCKLCECSFNDPNAKEMHLKGRRHRLQYKKKVNPDLQVEVKPSIRARKIQEEKMRKQMQKEEYWRRREEEERWRMEMRRYEEDMYWRRMEEEQHHWDDRRRMPDGGYPHGPPGPLGLLGVRPGMPPQPQGPAPLRRPDSSDDRYVMTKHATIYPTEEELQAVQKIVSITERALKLVSDSLSEHEKNKNKEGDDKKEGGKDRALKGVLRVGVLAKGLLLRGDRNVNLVLLCSEKPSKTLLSRIAENLPKQLAVISPEKYDIKCAVSEAAIILNSCVEPKMQVTITLTSPIIREENMREGDVTSGMVKDPPDVLDRQKCLDALAALRHAKWFQARANGLQSCVIIIRILRDLCQRVPTWSDFPSWAMELLVEKAISSASSPQSPGDALRRVFECISSGIILKGSPGLLDPCEKDPFDTLATMTDQQREDITSSAQFALRLLAFRQIHKVLGMDPLPQMSQRFNIHNNRKRRRDSDGVDGFEAEGKKDKKDYDNF

SEQ ID NO: 6639 - protein, 443 aa, Homo sapiens
MDFPCLWLGLLLPLVAALDFNYHRQEGMEAFLKTVAQNYSSVTHLHSIGKSVKGRNLWVLVVGRFPKEHRIGIPEFKYVANMHGDETVGRELLLHLIDYLVTSDGKDPEITNLINSTRIHIMPSMNPDGFEAVKKPDCYYSIGRENYNQYDLNRNFPDAFEYNNVSRQPETVAVMKWLKTETFVLSANLHGGALVASYPFDNGVQATGALYSRSLTPDDDVFQYLAHTYASRNPNMKKGDECKNKMNFPNGVTNGYSWYPLQGGMQDYNYIWAQCFEITLELSCCKYPREEKLPSFWNNNKASLIEYIKQVHLGVKGQVFDQNGNPLPNVIVEVQDRKHICPYRTNKYGEYYLLLLPGSYIINVTVPGHDPHITKVIIPEKSQNFSALKKDILLPFQGQLDSIPVSNPSCPMIPLYRNLPDHSAATKPSLFLFLVSLLHIFFK

SEQ ID NO: 6640 - protein, 968 aa, Homo sapiens
MRSEALLLYFTLLHFAGAGFPEDSEPISISHGNYTKQYPVFVGHKPGRNTTQRHRLDIQMIMIMNGTLYIAARDHIYTVDIDTSHTEEIYCSKKLTWKSRQADVDTCRMKGKHKDECHNFIKVLLKKNDDALFVCGTNAFNPSCRNYKMDTLEPFGDEFSGMARCPYDAKHANVALFADGKLYSATVTDFLAIDAVIYRSLGESPTLRTVKHDSKWLKEPYFVQAVDYGDYIYFFFREIAVEYNTMGKVVFPRVAQVCKNDMGGSQRVLEKQWTSFLKARLNCSVPGDSHFYFNILQAVTDVIRINGRDVVLATFSTPYNSIPGSAVCAYDMLDIASVFTGRFKEQKSPDSTWTPVPDERVPKPRPGCCAGSSSLERYATSNEFPDDTLNFIKTHPLMDEAVPSIFNRPWFLRTMVRYRLTKIAVDTAAGPYQNHTVVFLGSEKGIILKFLARIGNSGFLNDSLFLEEMSVYNSEKCSYDGVEDKRIMGMQLDRASSSLYVAFSTCVIKVPLGRCERYGKCKKTCIASRDPYCGWIKEGGACSHLSPNSRLTFEQDIERGNTDGLGDCHRVIRESYLKGHDQLVPVTLLAIAVILAFVMGAVFSGITVYCVCDHRRKDVAVVQRKEKELTHSRRGSMSSVTKLSGLFGDTQSKDPKPEAILTPLMHNGKLATPGNTAKMLIKADQHHLDLTALPTPESTPTLQQKRKPSRGSREWERNQNLINACTKDMPPMGSPVIPTDLPLRASPSHIPSVVVLPITQQGYQHEYVDQPKMSEVAQMALEDQAATLEYKTIKEHLSSKSPNHGVNLVENLDSLPPKVPQREASLGPPGASLSQTGLSKRLEMHHSSSYGVDYKRSYPTNSLTRSHQATTLKRNNTNSSNSSHLSRNQSFGRGDNPPPAPQRVDSIQVHSSQPSGQAVTVSRQPSLNAYNSLTRSGLKRTPSLKPDVPPKPSFAPLSTSMKPNDACT

SEQ ID NO: 6641 - protein, 1030 aa, Homo sapiens
MRSEALLLYFTLLHFAGAGFPEDSEPISISHGNYTKQYPVFVGHKPGRNTTQRHRLDIQMIMIMNGTLYIAARDHIYTVDIDTSHTEEIYCSKKLTWKSRQADVDTCRMKGKHKDECHNFIKVLLKKNDDALFVCGTNAFNPSCRNYKMDTLEPFGDEFSGMARCPYDAKHANVALFADGKLYSATVTDFLAIDAVIYRSLGESPTLRTVKHDSKWLKEPYFVQAVDYGDYIYFFFREIAVEYNTMGKVVFPRVAQVCKNDMGGSQRVLEKQWTSFLKARLNCSVPGDSHFYFNILQAVTDVIRINGRDVVLATFSTPYNSIPGSAVCAYDMLDIASVFTGRFKEQKSPDSTWTPVPDERVPKPRPGCCAGSSSLERYATSNEFPDDTLNFIKTHPLMDEAVPSIFNRPWFLRTMVRYRLTKIAVDTAAGPYQNHTVVFLGSEKGIILKFLARIGNSGFLNDSLFLEEMSVYNSEKCSYDGVEDKRIMGMQLDRASSSLYVAFSTCVIKVPLGRCERHGKCKKTCIASRDPYCGWIKEGGACSHLSPNSRLTFEQDIERGNTDGLGDCHNSFVALNGHSSSLLPSTTTSDSTAQEGYESRGGMLDWKHLLDSPDSTDPLGAVSSHNHQDKKGVIRESYLKGHDQLVPVTLLAIAVILAFVMGAVFSGITVYCVCDHRRKDVAVVQRKEKELTHSRRGSMSSVTKLSGLFGDTQSKDPKPEAILTPLMHNGKLATPGNTAKMLIKADQHHLDLTALPTPESTPTLQQKRKPSRGSREWERNQNLINACTKDMPPMGSPVIPTDLPLRASPSHIPSVVVLPITQQGYQHEYVDQPKMSEVAQMALEDQAATLEYKTIKEHLSSKSPNHGVNLVENLDSLPPKVPQREASLGPPGASLSQTGLSKRLEMHHSSSYGVDYKRSYPTNSLTRSHQATTLKRNNTNSSNSSHLSRNQSFGRGDNPPPAPQRVDSIQVHSSQPSGQAVTVSRQPSLNAYNSLTRSGLKRTPSLKPDVPPKPSFAPLSTSMKPNDACT

SEQ ID NO: 6642 - protein, 1047 aa, Homo sapiens
MRSEALLLYFTLLHFAGAGFPEDSEPISISHGNYTKQYPVFVGHKPGRNTTQRHRLDIQMIMIMNGTLYIAARDHIYTVDIDTSHTEEIYCSKKLTWKSRQADVDTCRMKGKHKDECHNFIKVLLKKNDDALFVCGTNAFNPSCRNYKMDTLEPFGDEFSGMARCPYDAKHANVALFADGKLYSATVTDFLAIDAVIYRSLGESPTLRTVKHDSKWLKEPYFVQAVDYGDYIYFFFREIAVEYNTMGKVVFPRVAQVCKNDMGGSQRVLEKQWTSFLKARLNCSVPGDSHFYFNILQAVTDVIRINGRDVVLATFSTPYNSIPGSAVCAYDMLDIASVFTGRFKEQKSPDSTWTPVPDERVPKPRPGCCAGSSSLERYATSNEFPDDTLNFIKTHPLMDEAVPSIFNRPWFLRTMVRYRLTKIAVDTAAGPYQNHTVVFLGSEKGIILKFLARIGNSGFLNDSLFLEEMSVYNSEKCSYDGVEDKRIMGMQLDRASSSLYVAFSTCVIKVPLGRCERHGKCKKTCIASRDPYCGWIKEGGACSHLSPNSRLTFEQDIERGNTDGLGDCHNSFVALNDISTPLPDNEMSYNTVYGHSSSLLPSTTTSDSTAQEGYESRGGMLDWKHLLDSPDSTDPLGAVSSHNHQDKKGVIRESYLKGHDQLVPVTLLAIAVILAFVMGAVFSGITVYCVCDHRRKDVAVVQRKEKELTHSRRGSMSSVTKLSGLFGDTQSKDPKPEAILTPLMHNGKLATPGNTAKMLIKADQHHLDLTALPTPESTPTLQQKRKPSRGSREWERNQNLINACTKDMPPMGSPVIPTDLPLRASPSHIPSVVVLPITQQGYQHEYVDQPKMSEVAQMALEDQAATLEYKTIKEHLSSKSPNHGVNLVENLDSLPPKVPQREASLGPPGASLSQTGLSKRLEMHHSSSYGVDYKRSYPTNSLTRSHQATTLKRNNTNSSNSSHLSRNQSFGRGDNPPPAPQRVDSIQVHSSQPSGQAVTVSRQPSLNAYNSLTRSGLKRTPSLKPDVPPKPSFAPLSTSMKPNDACT

SEQ ID NO: 6643 - protein, 409 aa, Homo sapiens
MRRYLRVVVLCVACGFCSLLYAFSQLAVSLEEGTGGGGGKPQAAVASWLAGGGRGAVRGAGVAGPAAHPGVSDRYSLKIQPVEKMHLAVVACGERLEETMTMLKSAIIFSIKPLQFHIFAEDQLHHSFKGRLDNWSFLQTFNYTLYPITFPSENAAEWKKLFKPCASQRLFLPLILKEVDSLLYVDTDILFLRPVDDIWSLLKKFNSTQIAAMAPEHEEPRIGWYNRFARHPYYGKTGVNSGVMLMNMTRMRRKYFKNDMTTVRLQWGDILMPLLKKYKLNITWGDQDLLNIVFFHNPESLFVFPCQWNYRPDHCIYGSNCQEAEEGGIFILHGNRGVYHDDKQPAFRAVYEALRNCSFEDDNIRSLLKPLELELQKTVHTYCGKIYKIFIKQLAKSVRDRYARSPKEK

SEQ ID NO: 6644 - protein, 977 aa, Homo sapiens
MRTAGRDPVPRRSPRWRRAVPLCETSAGRRVTQLRGDDLRRPATMKGKERSPVKAKRSRGGEDSTSRGERSKKLGGSGGSNGSSSGKTDSGGGSRRSLHLDKSSSRGGSREYDTGGGSSSSRLHSYSSPSTKNSSGGGESRSSSRGGGGESRSSGAASSAPGGGDGAEYKTLKISELGSQLSDEAVEDGLFHEFKRFGDVSVKISHLSGSGSGDERVAFVNFRRPEDARAAKHARGRLVLYDRPLKIEAVYVSRRRSRSPLDKDTYPPSASVVGASVGGHRHPPGGGGGQRSLSPGGAALGYRDYRLQQLALGRLPPPPPPPLPRDLERERDYPFYERVRPAYSLEPRVGAGAGAAPFREVDEISPEDDQRANRTLFLGNLDITVTESDLRRAFDRFGVITEVDIKRPSRGQTSTYGFLKFENLDMSHRAKLAMSGKIIIRNPIKIGYGKATPTTRLWVGGLGPWVPLAALAREFDRFGTIRTIDYRKGDSWAYIQYESLDAAHAAWTHMRGFPLGGPDRRLRVDFADTEHRYQQQYLQPLPLTHYELVTDAFGHRAPDPLRGARDRTPPLLYRDRDRDLYPDSDWVPPPPPVRERSTRTAATSVPAYEPLDSLDRRRDGWSLDRDRGDRDLPSSRDQPRKRRLPEESGGRHLDRSPESDRPRKRHCAPSPDRSPELSSSRDRYNSDNDRSSRLLLERPSPIRDRRGSLEKSQGDKRDRKNSASAERDRKHRTTAPTEGKSPLKKEDRSDGSAPSTSTASSKLKSPSQKQDGGTAPVASASPKLCLAWQGMLLLKNSNFPSNMHLLQGDLQVASSLLVEGSTGGKVAQLKITQRLRLDQPKLDEVTRRIKVAGPNGYAILLAVPGSSDSRSSSSSAASDTATSTQRPLRNLVSYLKQKQAAGVISLPVGGNKDKENTGVLHAFPPCEFSQQFLDSPAKALAKSEEDYLVMIIVRGFGFQIGVRYENKKRENLALTLL

SEQ ID NO: 6645 - protein, 969 aa, Homo sapiens
MRTAGRDPVPRRSPRWRRAVPLCETSAGRRVTQLRGDDLRRPATMKGKERSPVKAKRSRGGEDSTSRGERSKKLGGSGGSNGSSSGKTDSGGGSRRSLHLDKSSSRGGSREYDTGGGSSSSRLHSYSSPSTKNSSGGGESRSSSRGGGGESRSSGAASSAPGGGDGAEYKTLKISELGSQLSDEAVEDGLFHEFKRFGDVSVKISHLSGSGSGDERVAFVNFRRPEDARAAKHARGRLVLYDRPLKIEAVYVSRRRSRSPLDKDTYPPSASVVGASVGGHRHPPGGGGGQRSLSPGGAALGYRDYRLQQLALGRLPPPPPPPLPRDLERERDYPFYERVRPAYSLEPRVGAGAGAAPFREVDEISPEDDQRANRTLFLGNLDITVTESDLRRAFDRFGVITEVDIKRPSRGQTSTYGFLKFENLDMSHRAKLAMSGKIIIRNPIKIGYGKATPTTRLWVGGLGPWVPLAALAREFDRFGTIRTIDYRKGDSWAYIQYESLDAAHAAWTHMRGFPLGGPDRRLRVDFADTEHRYQQQYLQPLPLTHYELVTDAFGHRAPDPLRGARDRTPPLLYRDRDRDLYPDSDWVPPPPPVRERSTRTAATSVPAYEPLDSLDRRRDGWSLDRDRGDRDLPSSRDQPRKRRLPEESGGRHLDRSPESDRPRKRHCAPSPDRSPELSSSRDRYNSDNDRSSRLLLERPSPIRDRRGSLEKSQGDKRDRKNSASAERDRKHRTTAPTEGKSPLKKEDRSDGSAPSTSTASSKLKSPSQKQDGGTAPVASASPKLCLAWQGMLLLKNSNFPSNMHLLQGDLQVASSLLVEGSTGGKVAQLKITQRLRLDQPKLDEVTRRIKVAGPNGYAILLAVPGSSDSRSSSSSAASDTATSTQRPLRNLVSYLKQKQAAGVISLPVGGNKDKENTGVLHAFPPCEFSQQFLDSPAKALAKSEEDYLVMIIVRAKLVEQRMKIWNSKL

SEQ ID NO: 6646 - protein, 957 aa, Homo sapiens
MRTAGRDPVPRRSPRWRRAVPLCETSAGRRVTQLRGDDLRRPATMKGKERSPVKAKRSRGGEDSTSRGERSKKLGGSGGSNGSSSGKTDSGGGSRRSLHLDKSSSRGGSREYDTGGGSSSSRLHSYSSPSTKNSSGGGESRSSSRGGGGESRSSGAASSAPGGGDGAEYKTLKISELGSQLSDEAVEDGLFHEFKRFGDVSVKISHLSGSGSGDERVAFVNFRRPEDARAAKHARGRLVLYDRPLKIEAVYVSRRRSRSPLDKDTYPPSASVVGASVGGHRHPPGGGGGQRSLSPGGAALGYRDYRLQQLALGRLPPPPPPPLPRDLERERDYPFYERVRPAYSLEPRVGAGAGAAPFREVDEISPEDDQRANRTLFLGNLDITVTESDLRRAFDRFGVITEVDIKRPSRGQTSTYGFLKFENLDMSHRAKLAMSGKIIIRNPIKIGYGKATPTTRLWVGGLGPWVPLAALAREFDRFGTIRTIDYRKGDSWAYIQYESLDAAHAAWTHMRGFPLGGPDRRLRVDFADTEHRYQQQYLQPLPLTHYELVTDAFGHRAPDPLRGARDRTPPLLYRDRDRDLYPDSDWVPPPPPVRERSTRTAATSVPAYEPLDSLDRRRDGWSLDRDRGDRDLPSSRDQPRKRRLPEESGGRHLDRSPESDRPRKRHCAPSPDRSPELSSSRDRYNSDNDRSSRLLLERPSPIRDRRGSLEKSQGDKRDRKNSASAERDRKHRTTAPTEGKSPLKKEDRSDGSAPSTSTASSKLKSPSQKQDGGTAPVASASPKLCLAWQGMLLLKNSNFPSNMHLLQGDLQVASSLLVEGSTGGKVAQLKITQRLRLDQPKLDEVTRRIKVAGPNGYAILLAVPGSSDSRSSSSSAASDTATSTQRPLRNLVSYLKQKQAAGVISLPVGGNKDKENTGVLHAFPPCEFSQQFLDSPAKALAKSEEDYLVMIIVRGAS

SEQ ID NO: 6647 - protein, 1026 aa, Homo sapiens
MASSWKLMLFLSVTMCLSESVDYGPVFVQEPDDIIFPTDSDEKKVALNCEVRGNPVPSYRWLRNGTEIDLESDYRYSLIDGTFIISNPSEAKDSGHYQCLATNTVGSILSREATLQFAYLGNFSGRTRSAVSVREGQGVVLMCSPPPHSPEIIYSWVFNEFPSFVAEDSRRFISQETGNLYISKVQTSDVGSYICLVKNTVTNARVLSPPTPLTLRNDGVMGEYEPKIEVHFPFTVTAAKGTTVKMECFALGNPVPTITWMKVNGYIPSKARLRKSQAVLEIPNVQLDDAGIYECRAENSRGKNSFRGQLQVYTYPHWVEKLNDTQLDSGSPLRWECKATGKPRPTYRWLKNGVPLSPQSRVEMVNGVLMIHNVNQSDAGMYQCLAENKYGAIYASAELKILASAPTFALNQLKKTIIVTKDQEVVIECKPQGSPKPTISWKKGDRAVRENKRIAILPDGSLRILNASKSDEGKYVCRGENVFGSAEIIASLSVKEPTRIELTPKRTELTVGESIVLNCKAIHDASLDVTFYWTLKGQPIDFEEEGGHFESIRAQASSADLMIRNILLMHAGRYGCRVQTTADSVSDEAELLVRGPPGPPGIVIVEEITESTATLSWSPAADNHSPISSYNLQARSPFSLGWQTVKTVPEIITGDMESAMAVDLNPWVEYEFRVVATNPIGTGDPSTPSRMIRTNEAVPKTAPTNVSGRSGRRHELVIAWEPVSEEFQNGEGFGYIVAFRPNGTRGWKEKMVTSSEASKFIYRDESVPPLTPFEVKVGVYNNKGDGPFSQIVVICSAEGEPSAAPTDVKATSVSVSEILVAWKHIKESLGRPQGFEVGYWKDMEQEDTAETVKTRGNESFVILTGLEGNTLYHFTVRAYNGAGYGPPSSEVSATTKKSPPSQAPSNLRWEQQGSQVSLGWEPVIPLANESEVVGYKVFYRQEGHSNSQVIETQKLQAVVPLPDAGVYIIEVRAYSEGGDGTASSQIRVPSYSGGKITSAQSTLHSLSTSSSSVTLLLALMIPSTSW

SEQ ID NO: 6648 - protein, 1100 aa, Homo sapiens
MASSWKLMLFLSVTMCLSEYSKSLPGLSTSYAALLRIKKSSSSSLFGSKTRPRYSSPSLGTLSASSPSWLGAAQNYYSPINLYHSSDAFKQDESVDYGPVFVQEPDDIIFPTDSDEKKVALNCEVRGNPVPSYRWLRNGTEIDLESDYRYSLIDGTFIISNPSEAKDSGHYQCLATNTVGSILSREATLQFAYLGNFSGRTRSAVSVREGQGVVLMCSPPPHSPEIIYSWVFNEFPSFVAEDSRRFISQETGNLYISKVQTSDVGSYICLVKNTVTNARVLSPPTPLTLRNDGVMGEYEPKIEVHFPFTVTAAKGTTVKMECFALGNPVPTITWMKVNGYIPSKARLRKSQAVLEIPNVQLDDAGIYECRAENSRGKNSFRGQLQVYTYPHWVEKLNDTQLDSGSPLRWECKATGKPRPTYRWLKNGVPLSPQSRVEMVNGVLMIHNVNQSDAGMYQCLAENKYGAIYASAELKILASAPTFALNQLKKTIIVTKDQEVVIECKPQGSPKPTISWKKGDRAVRENKRIAILPDGSLRILNASKSDEGKYVCRGENVFGSAEIIASLSVKEPTRIELTPKRTELTVGESIVLNCKAIHDASLDVTFYWTLKGQPIDFEEEGGHFESIRAQASSADLMIRNILLMHAGRYGCRVQTTADSVSDEAELLVRGPPGPPGIVIVEEITESTATLSWSPAADNHSPISSYNLQARSPFSLGWQTVKTVPEIITGDMESAMAVDLNPWVEYEFRVVATNPIGTGDPSTPSRMIRTNEAVPKTAPTNVSGRSGRRHELVIAWEPVSEEFQNGEGFGYIVAFRPNGTRGWKEKMVTSSEASKFIYRDESVPPLTPFEVKVGVYNNKGDGPFSQIVVICSAEGEPSAAPTDVKATSVSVSEILVAWKHIKESLGRPQGFEVGYWKDMEQEDTAETVKTRGNESFVILTGLEGNTLYHFTVRAYNGAGYGPPSSEVSATTKKSPPSQAPSNLRWEQQGSQVSLGWEPVIPLANESEVVGYKVFYRQEGHSNSQVIETQKLQAVVPLPDAGVYIIEVRAYSEGGDGTASSQIRVPSYSGGKITSAQSTLHSLSTSSSSVTLLLALMIPSTSW

SEQ ID NO: 6649 - protein, 1029 aa, Homo sapiens
MQTNEGEVSEESSSKVEQEDFVMEGHGKTPPPGEESKQEKEQEREEQLMEDKKRKKEDKKKKEATQKVTEQKTKVPEVTKPSLSQPTAASPIGSSPSPPVNGGNNAKRVAVPNGQPPSAARYMPREVPPRFRCQQDHKVLLKRGQPPPPSCMLLGGGAGPPPCTAPGANPNNAQVTGALLQSESGTAPVWSKSTPPAPDNGTSAWGEPNESSPGWGEMDDTGASTTGWGNTPANAPNAMKPNSKSMQDGWGESDGPVTGARHPSWEEEEDGGVWNTTGSQGSASSHNSASWGQGGKKQMKCSLKGGNNDSWMNPLAKQFSNMGLLSQTEDNPSSKMDLSVGSLSDKKFDVDKRAMNLGDFNDIMRKDRSGFRPPNSKDMGTTDSGPYFEKGGSHGLFGNSTAQSRGLHTPVQPLNSSPSLRAQVPPQFISPQVSASMLKQFPNSGLSPGLFNVGPQLSPQQIAMLSQLPQIPQFQLACQLLLQQQQQQQLLQNQRKISQAVRQQQEQQLARMVSALQQQQQQQQRQPGMKHSPSHPVGPKPHLDNMVPNALNVGLPDLQTKGPIPGYGSGFSSGGMDYGMVGGKEAGTESRFKQWTSMMEGLPSVATQEANMHKNGAIVAPGKTRGGSPYNQFDIIPGDTLGGHTGPAGDSWLPAKSPPTNKIGSKSSNASWPPEFQPGVPWKGIQNIDPESDPYVTPGSVLGGTATSPIVDTDHQLLRDNTTGSNSSLNTSLPSPGAWPYSASDNSFTNVHSTSAKFPDYKSTWSPDPIGHNPTHLSNKMWKNHISSRNTTPLPRPPPGLTNPKPSSPWSSTAPRSVRGWGTQDSRLASASTWSDGGSVRPSYWLVLHNLTPQIDGSTLRTICMQHGPLLTFHLNLTQGTALIRYSTKQEAAKAQTALHMCVLGNTTILAEFATDDEVSRFLAQAQPPTPAATPSAPAAGWQSLETGQNQSDPVGPALNLFGGSTGLGQWSSSAGGSSGADLAGASLWGPPNYSSSLWGVPTVEDPHRMGSPAPLLPGDLLGGGSDSI

SEQ ID NO: 6650 - protein, 713 aa, Homo sapiens [sequence omitted]

SEQ ID NO: 6651 - protein, 644 aa, Homo sapiens
MAKPSHSSYVLQQLNNQREWGFLCDCCIAIDDIYFQAHKAVLAACSSYFRMFFMNHQHSTAQLNLSNMKISAECFDLILQFMYLGKIMTAPSSFEQFKVAMNYLQLYNVPDCLEDIQDADCSSSKCSSSASSKQNSKMIFGVRMYEDTVARNGNEANRWCAEPSSTVNTPHNREADEESLQLGNFPEPLFDVCKKSSVSKLSNPKERVSRRFGRSFTCDSCGFGFSCEKLLDEHVLTCTNRHLYQNTRSYHRIVDIRDGKDSNIKAEFGEKDSSKTFSAQTDKYRGDTSQAADDSASTTGSRKSSTVESEIASEEKSRAAERKRIIIKMEPEDIPTDELKDFNIIKVTDKDCNESTDNDELEDEPEEPFYRYYVEEDVSIKKSGRKTLKPRMSVSADERGGLENMRPPNNSSPVQEDAENASCELCGLTITEEDLSSHYLAKHIENICACGKCGQILVKGRQLQEHAQRCGEPQDLTMNGLGNTEEKMDLEENPDEQSEIRDMFVEMLDDFRDNHYQINSIQKKQLFKHSACPFRCPNCGQRFETENLVVEHMSSCLDQDMFKSAIMEENERDHRRKHFCNLCGKGFYQRCHLREHYTVHTKEKQFVCQTCGKQFLRERQLRLHNDMHKGMASGEIGPSKPVEK

SEQ ID NO: 6652 - protein, 1739 aa, Homo sapiens
MMRNKDKSQEEDSSLHSNASSHSASEEASGSDSGSQSESEQGSDPGSGHGSESNSSSESSESQSESESESAGSKSQPVLPEAKEKPASKKERIADVKKMWEEYPDVYGVRRSNRSRQEPSRFNIKEEASSGSESGSPKRRGQRQLKKQEKWKQEPSEDEQEQGTSAESEPEQKKVKARRPVPRRTVPKPRVKKQPKTQRGKRKKQDSSDEDDDDDEAPKRQTRRRAAKNVSYKEDDDFETDSDDLIEMTGEGVDEQQDNSETIEKVLDSRLGKKGATGASTTVYAIEANGDPSGDFDTEKDEGEIQYLIKWKGWSYIHSTWESEESLQQQKVKGLKKLENFKKKEDEIKQWLGKVSPEDVEYFNCQQELASELNKQYQIVERVIAVKTSKSTLGQTDFPAHSRKPAPSNEPEYLCKWMGLPYSECSWEDEALIGKKFQNCIDSFHSRNNSKTIPTRECKALKQRPRFVALKKQPAYLGGENLELRDYQLEGLNWLAHSWCKNNSVILADEMGLGKTIQTISFLSYLFHQHQLYGPFLIVVPLSTLTSWQREFEIWAPEINVVVYIGDLMSRNTIREYEWIHSQTKRLKFNALITTYEILLKDKTVLGSINWAFLGVDEAHRLKNDDSLLYKTLIDFKSNHRLLITGTPLQNSLKELWSLLHFIMPEKFEFWEDFEEDHGKGRENGYQSLHKVLEPFLLRRVKKDVEKSLPAKVEQILRVEMSALQKQYYKWILTRNYKALAKGTRGSTSGFLNIVMELKKCCNHCYLIKPPEENERENGQEILLSLIRSSGKLILLDKLLTRLRERGNRVLIFSQMVRMLDILAEYLTIKHYPFQRLDGSIKGEIRKQALDHFNADGSEDFCFLLSTRAGGLGINLASADTVVIFDSDWNPQNDLQAQARAHRIGQKKQVNIYRLVTKGTVEEEIIERAKKKMVLDHLVIQRMDTTGRTILENNSGRSNSNPFNKEELTAILKFGAEDLFKELEGEESEPQEMDIDEILRLAETRENEVSTSATDELLSQFKVANFATMEDEEELEERPHKDWDEIIPEEQRKKVEEEERQKELEEIYMLPRIRSSTKKAQTNDSDSDTESKRQAQRSSASESETEDSDDDKKPKRRGRPRSVRKDLVEGFTDAEIRRFIKAYKKFGLPLERLECLARDAELVDKSVADLKRLGELIHNSCVSAMQEYEEQLKENASEGKGPGKRRGPTIKISGVQVNVKSIIQHEEEFEMLHKSIPVDPEEKKKYCLTCRVKAAHFDVEWGVEDDSRLLLGIYEHGYGNWELIKTDPELKLTDKILPVETDKKPQGKQLQTRADYLLKLLRKGLEKKGAVTGGEEAKLKKRKPRVKKENKVPRLKEEHGIELSSPRHSDNPSEEGEVKDDGLEKSPMKKKQKKKENKENKEKQMSSRKDKEGDKERKKSKDKKEKPKSGDAKSSSKSKRSQGPVHITAGSEPVPIGEDEDDDLDQETFSICKERMRPVKKALKQLDKPDKGLNVQEQLEHTRNCLLKIGDRIAECLKAYSDQEHIKLWRRNLWIFVSKFTEFDARKLHKLYKMAHKKRSQEEEEQKKKDDVTGGKKPFRPEASGSSRDSLISQSHTSHNLHPQKPHLPASHGPQMHGHPRDNYNHPNKRHFSNADRGDWQRERKFNYGGGNNNPPWGSDRHHQYEQHWYKDHHYGDRRHMDAHRSGSYRPNNMSRKRPYDQYSSDRDHRGHRDYYDRYAKGCETPGANLCQELFLGRK

SEQ ID NO: 6653 - protein, 733 aa, Homo sapiens
MERRSESPCLRDSPDRRSGSPDVKGPPPVKVARLEQNGSPMGARGRPNGAVAKAVGGLMIPVFCVVEQLDGSLEYDNREEHAEFVLVRKDVLFSQLVETALLALGYSHSSAAQAQGIIKLGRWNPLPLSYVTDAPDATVADMLQDVYHVVTLKIQLQSCSKLEDLPAEQWNHATVRNALKELLKEMNQSTLAKECPLSQSMISSIVNSTYYANVSATKCQEFGRWYKKYKKIKVERVERENLSDYCVLGQRPMHLPNMNQLASLGKTNEQSPHSQIHHSTPIRNQVPALQPIMSPGLLSPQLSPQLVRQQIAMAHLINQQIAVSRLLAHQHPQAINQQFLNHPPIPRAVKPEPTNSSVEVSPDIYQQVRDELKRASVSQAVFARVAFNRTQGLLSEILRKEEDPRTASQSLLVNLRAMQNFLNLPEVERDRIYQDERERSMNPNVSMVSSASSSPSSSRTPQAKTSTPTTDLPIKVDGANINITAAIYDEIQQEMKRAKVSQALFAKVAANKSQGWLCELLRWKENPSPENRTLWENLCTIRRFLNLPQHERDVIYEEESRHHHSERMQHVVQLPPEPVQVLHRQQSQPAKESSPPREEAPPPPPPTEDSCAKKPRSRTKISLEALGILQSFIHDVGLYPDQEAIHTLSAQLDLPKHTIIKFFQNQRYHVKHHGKLKEHLGSAVDVAEYKDEELLTESEENDSEEGSEEMYKVEAEEENADKSKAAPAEIDQR

SEQ ID NO: 6654 - protein, 643 aa, Homo sapiens
MADYSTVPPPSSGSAGGGGGGGGGGGVNDAFKDALQRARQIAAKIGGDAGTSLNSNDYGYGGQKRPLEDGDQPDAKKVAPQNDSFGTQLPPMHQQQRSVMTEEYKVPDGMVGFIIGRGGEQISRIQQESGCKIQIAPDSGGLPERSCMLTGTPESVQSAKRLLDQIVEKGRPAPGFHHGDGPGNAVQEIMIPASKAGLVIGKGGETIKQLQERAGVKMVMIQDGPQNTGADKPLRITGDPYKVQQAKEMVLELIRDQGGFREVRNEYGSRIGGNEGIDVPIPRFAVGIVIGRNGEMIKKIQNDAGVRIQFKPDDGTTPERIAQITGPPDRCQHAAEIITDLLRSVQAGNPGGPGPGGRGRGRGQGNWNMGPPGGLQEFNFIVPTGKTGLIIGKGGETIKSISQQSGARIELQRNPPPNADPNMKLFTIRGTPQQIDYARQLIEEKIGGPVNPLGPPVPHGPHGVPGPHGPPGPPGPGTPMGPYNPAPYNPGPPGPAPHGPPAPYAPQGWGNAYPHWQQQAPPDPAKAGTDPNSAAWAAYYAHYYQQQAQPPPAAPAGAPTTTQTNGQGDQQNPAPAGQVDYTKAWEEYYKKMGQAVPAPTGAPPGGQPDYSAAWAEYYRQQAAYYAQTSPQGMPQHPPAPQGQ

SEQ ID NO: 6655 - protein, 654 aa, Homo sapiens [sequence omitted]

SEQ ID NO: 6656 - protein, 707 aa, Homo sapiens
MVKLAKAGKNQGDPKKMAPPPKEVEEDSEDEEMSEDEEDDSSGEEVVIPQKKGKKAAATSAKKVVVSPTKKVAVATPAKKAAVTPGKKAAATPAKKTVTPAKAVTTPGKKGATPGKALVATPGKKGAAIPAKGAKNGKNAKKEDSDEEEDDDSEEDEEDDEDEDEDEDEIEPAAMKAAAAAPASEDEDDEDDEDDEDDDDDEEDDSEEEAMETTPAKGKKAAKVVPVKAKNVAEDEDEEEDDEDEDDDDDEDDEDDDDEDDEEEEEEEEEEPVKEAPGKRKKEMAKQKAAPEAKKQKVEGTEPTTAFNLFVGNLNFNKSAPELKTGISDVFAKNDLAVVDVRIGMTRKFGYVDFESAEDLEKALELTGLKVFGNEIKLEKPKGKDSKKERDARTLLAKNLPYKVTQDELKEVFEDAAEIRLVSKDGKSKGIAYIEFKTEADAEKTFEEKQGTEIDGRSISLYYTGEKGQNQDYRGGKNSTWSGESKTLVLSNLSYSATEETLQEVFEKATFIKVPQNQNGKSKGYAFIEFASFEDAKEALNSCNKREIEGRAIRLELQGPRGSPNARSQPSKTLFVKGLSEDTTEETLKESFDGSVRARIVTDRETGSSKGFGFVDFNSEEDAKEAMEDGEIDGNKVTLDWAKPKGEGGFGGRGGGRGGFGGRGGGRGGRGGFGGRGRGGFGGRGGFRGGRGGGGDHKPQGKKTKFE

SEQ ID NO: 6657 - protein, 484 aa, Homo sapiens
AGKNQGDPKKMAPPPKEVEEDSEDEEMSEDEEDDSSGEEVVIPQKKGKKAAATSAKKVVVSPTKKVAVATPAKKAAVTPGKKAAATPAKKTVTPAKAVTTPGKKGATPGKALVATPGKKGAAIPAKGAKNGKNAKKEDSDEEEDDDSEEDEEDDEDEDEDEDEIEPAAMKAAAAAPASEDEDDEDDEDDEDDDDDEEDGKELSWIAYIEFKTEADAEKTFEEKQGTEIDGRSISLYYTGEKGQNQDYRGGKNSTWSGESKTLVLSNLSYSATEETLQEVFEKATFIKVPQNQNGKSKGYAFIEFASFEDAKEALNSCNKREIEGRAIRLELQGPRGSPNARSQPSKTLFVKGLSEDTTEETLKESFDGSVRARIVTDRETGSSKGFGFVDFNSEEDAKAAKEAMEDGEIDGNKVTLDWAKPKGEGGFGGRGGGRGGFGGRGGGRGGRGGFGGRGRGGFGGRGGFRGGRGGGGDHKPQGKKTKFE

SEQ ID NO: 6658 - protein, 687 aa, Homo sapiens
MVKLAKAGKNQGDPKKMAPPPKEVEEDSEDEEMSEDEEDDSSGEEVVIPQKKGKKAAATSAKKVVVSPTKKVAVATPAKAVTTPGKKGATPGKALVATPGKKGAAIPAKGAKNGKNAKKEDSDEEEDDDSEEDEEDDEDEDEDEDEIEPAAMKAAAAAPASEDEDDEDDEDDEDDDDDEEDDSEEEAMETTPAKGKKAAKVVPVKAKNVAEDEDEEEDDEDEDDDDDEDDEDDDDEDDEEEEEEEEEEPVKEAPGKRKKEMAKQKAAPEAKKQKVEGTEPTTAFNLFVGNLNFNKSAPELKTGISDVFAKNDLAVVDVRIGMTRKFGYVDFESAEDLEKALELTGLKVFGNEIKLEKPKGKDSKKERDARTLLAKNLPYKVTQDELKEVFEDAAEIRLVSKDGKSKGIAYIEFKTEADAEKTFEEKQGTEIDGRSISLYYTGEKGQNQDYRGGKNSTWSGESKTLVLSNLSYSATEETLQEVFEKATFIKVPQNQNGKSKGYAFIEFASFEDAKEALNSCNKREIGGRAIRLELQGPRGSPNARSQPSKTLFVKGLSEDTTEETLKESFDGSVRARIVTDRETGSSKGFGFVDFNSEEDAKAAKEAMEDGEIDGNKVTLDWAKPKGEGGFGGRGGGRGGFGGRGGGRGGRGGFGGRGRGGFGGRGGFRGGRGGGGDHKPQGKKTKFE

SEQ ID NO: 6659 - protein, 280 aa, Homo sapiens
MKFRAKIVDGACLNHFTRISNMIAKLAKTCTLRISPDKLNFILCDKLANGGVSMWCELEQENFFNEFQMEGVSAENNEIYLELTSENLSRALKTAQNARALKIKLTNKHFPCLTVSVELLSMSSSSRIVTHDIPIKVIPRKLWKDLQEPVVPDPDVSIYLPVLKTMKSVVEKMKNISNHLVIEANLDGELNLKIETELVCVTTHFKDLGNPPLASESTHEDRNVEHMAEVHIDIRKLLQFLAGQQVNPTKALCNIVNNKMVHFDLLHEDVSLQYFIPALS

SEQ ID NO: 6660 - protein, 652 aa, Homo sapiens
MSGQSLTDRITAAQHSVTGSAVSKTVCKATTHEIMGPKKKHLDYLIQCTNEMNVNIPQLADSLFERTTNSSWVVVFKSLITTHHLMVYGNERFIQYLASRNTLFNLSNFLDKSGLQGYDMSTFIRRYSRYLNEKAVSYRQVAFDFTKVKRGADGVMRTMNTEKLLKTVPIIQNQMDALLDFNVNSNELTNGVINAAFMLLFKDAIRLFAAYHEGIINLLEKYFDMKKNQCKEGLDIYKKFLTRMTRISEFLKVAEQVGIDRGDIPDLSQAPSSLLDALEQHLASLEGKKIKDSTAASRATTLSNAVSSLASTGLSLTKVDEREKQAALEEEQARLKALKEQRLKELAKKPHTSLTTAASPVSTSAGGIMTAPAIDIFSTPSSSNSTSKLPNDLLDLQQPTFHPSVHPMSTASQVASTWGDPFSATVDAVDDAIPSLNPFLTKSSGDVHLSISSDVSTFTTRTPTHEMFVGFTPSPVAQPHPSAGLNVDFESVFGNKSTNVIVDSGGFDELGGLLKPTVASQNQNLPVAKLPPSKLVSDDLDSSLANLVGNLGIGNGTTKNDVNWSQPGEKKLTGGSNCEPKVAPTTAWNAATMAPPVMAYPATTPTGMIGYGIPPQMGSVPVMTQPTLIYSQPVMRPPNPFGPVSGAQIQFM

SEQ ID NO: 6661 - protein, 634 aa, Homo sapiens
MSGQSLTDRITAAQHSVTGSAVSKTVCKATTHEIMGPKKKHLDYLIQCTNEMNVNIPQLADSLFERTTNSSWVVVFKSLITTHHLMVYGNERFIQYLASRNTLFNLSNFLDKSGLQGYDMSTFIRRYSRYLNEKAVSYRQVAFDFTKVKRGADGVMRTMNTEKLLKTVPIIQNQMDALLDFNVNSNELTNGVINAAFMLLFKDAIRLFAAYHEGIINLLEKYFDMKKNQCKEGLDIYKKFLTRMTRISEFLKVAEQVGIDRGDIPDLSQAPSSLLDALEQHLASLEGKKIKDSTAASRATTLSNAVSSLASTGLSLTKVDEREKQAALEEEQARLKALKEQRLKELAKKPHTSLTTAASPVSTSAGGIMTAPAIDIFSTPSSSNSTSKLPNDLLDLQQPTFHPSVHPMSTASQVASTWGDPFSATVDAVDDAIPSLNPFLTKSSGDVHLSISSDVSTFTTRTPTHEMFVGFTPSPVAQPHPSAGLNVDFESVFGNKSTNVIVDSGGFDELGGLLKPTVASQNQNLPVAKLPPSKLVSDDLDSSLANLVGNLGIGNGTTKNDVNWSQPGEKKLTGGSNCEPKVAPTTAWNAATMPPPPQMGSVPVMTQPTLIYSQPVMRPPNPFGPVSGAQIQFM

SEQ ID NO: 6662 - protein, 348 aa, Homo sapiens
  VARIANT 154: Xaa = Any Amino Acid
MLSLEKSRLKTTHWGGGGSEDSGRQGAFVAFPERSGVCEVVSIMFSFNMFNHLIPRVFQNRFSTHYRCFSVSTLAGPNDKSDVEKGGKIIMLPSALDQLSQLNITYPMLFKLTSKNLDRMTHCGVLEFVADEGICYLPHWMMQNLLLEEGSLVXVESVNLQVATYSKFQPQSPDILDITNPKAVLDNALRNFACLTTGNVTAINCNEKIYELELRVMETKPNKAVSITECDTNVDSDAPLGYKEPERQVQHEELTEGEADHSGYAGELGFRAFSGSGNRLDGKKESPSPIKPGDIKRGIPNHEFKLGKTPFIRNACPLVKKFEEDEAGGRFVAFSGEGQSLSKKGRKP

SEQ ID NO: 6663 - protein, 987 aa, Homo sapiens
MTPALREATAKGISFSSLPSTMESDKMLYMESPRTVDEKLKGDTFSQMLGFPTPEPTLNTNFVNLKHFGSPQSSKHYQTVFLMRSNSTLNKHNENYKQKKLGEPSCNKLKNILYNGSNIQLSKICLSHSEEFIKKEPLSDTTSQCMKDVQIILDSNITKDTNVDKVQLQNCKWYQENALLDKVTDAEIKKGLLHCTQKKIVPGHSNVPVSSSAAEKEEEVHARLLHCVSKQKILLSQARRTQKHLQMLLAKHVVKHYGQQMKLSMKHQLPKMKTFHEPTTILGNSLPKCTEIKPEVNTLTAENKLWDDAKNGFARCTAAEIQRFAFSATGLLSHVEEGLDSDATDSSSDDDLDEYTLRKNVAVNCSTEWKWLVDRARVGSRWTWLQAQISDLECKIQQLTDIHRQIRASKGIVVLEECQLPKDILKKQMQFADQAASLNILGNPQVPQECQDPVPEQDFEMSPSSPTLLLRNIEKQSAQLTEIINSLIAPLNLSPTSSPLSSKSCSHKCLANGIYRSASENLDELSSSSSWLLNQKHSKKKRKDRTRLKSSSLTFMSTSARTRPLQSFHKRKLYRLSPTFYWTPQTLPSKETAFLNTTQMPCLQSASTWSSYEHNSESYLLREHVSELDSSFHSVLSLPSDVPLHFHFETLLKKTEIKGNLAENKFVDEYIISPSPVHSTLNQWRNGYSPICKPQIRSESSAQLLQGRKKRHLSETALGERTKLEESDFQHTESGSHSNFTAVSNVNVLSRIQNSSRNTARRRLRSESSYDIDNIVIPMSLVAPAKLEKLQYKEILTPSWRMVVLQPLDEYNLGKEEIEDLSDEVFSLRHKKYEEREQARWSLWEQSKWHRRNSRAYSKNVEGQDLLLKEYPNNFSSSQQCAAASPPGLPSENQDLCAYGLPSLNQSQETKSLWWERRAFPLKGEDMAALLCQDEKKDQVERSSTAFHGEIFGTSVPENGHHPKKQSDGMEEYKTFGLGLTNVKKNR

SEQ ID NO: 6664 - protein, 1003 aa, Homo sapiens
MNGGNESSGADRAGGPVATSVPIGWQRCVREGAVLYISPSGTELSSLEQTRSYLLSDGTCKCGLECPLNVPKVFNFDPLAPVTPGGAGVGPASEEDMTKLCNHRRKAVAMATLYRSMETTCSHSSPGEGASPQMFHTVSPGPPSARPPCRVPPTTPLNGGPGSLPPEPPSVSQAFPTLAGPGGLFPPRLADPVPSGGSSSPRFLPRGNAPSPAPPPPPAISLNAPSYNWGAALRSSLVPSDLGSPPAPHASSSPPSDPPLFHCSDALTPPPLPPSNNLPAHPGPASQPPVSSATMHLPLVLGPLGGAPTVEGPGAPPFLASSLLSAAAKAQHPPLPPPSTLQGRRPRAQAPSASHSSSLRPSQRRPRRPPTVFRLLEGRGPQTPRRSRPRAPAPVPQPFSLPEPSQPILPSVLSLLGLPTPGPSHSDGSFNLLGSDAHLPPPPTLSSGSPPQPRHPIQPSLPGTTSGSLSSVPGAPAPPAASKAPVVPSPVLQSPSEGLGMGAGPACPLPPLAGGEAFPFPSPEQGLALSGAGFPGMLGALPLPLSLGQPPPSPLLNHSLFGVLTGGGGQPPPEPLLPPPGGPGPPLAPGEPEGPSLLVASLLPPPPSDLLPPPSAPPSNLLASFLPLLALGPTAGDGEGSAEGAGGPSGEPFSGLGDLSPLLFPPLSAPPTLIALNSALLAATLDPPSGTPPQPCVLSAPQPGPPTSSVTTATTDPGASSLGKAPSNSGRPPQLLSPLLGASLLGDLSSLTSSPGALPSLLQPPGPLLSGQLGLQLLPGGGAPPPLSEASSPLACLLQSLQIPPEQPEAPCLPPESPASALEPEPARPPLSALAPPHGSPDPPVPELLTGRGSGKRGRRGGGGLRGINGEARPARGRKPGSRREPGRLALKWGTRGGFNGQMERSPRRTHHWQHNGELAEGGAEPKDPPPPGPHSEDLKVPPGVVRKSRRGRRRKYNPTRNSNSSRQDITLEPSPTARAAVPLPPRARPGRPAKNKRRKLAP

SEQ ID NO: 6665 - protein, 4349 aa, Homo sapiens [sequence omitted]

SEQ ID NO: 6666 - protein, 2214 aa, Homo sapiens
MATRSSRRESRLPFLFTLVALLPPGALCEVWTQRLHGGSAPLPQDRGFLVVQGDPRELRLWARGDARGASRADEKPLRRKRSAALQPEPIKVYGQVSLNDSHNQMVVHWAGEKSNVIVALARDSLALARPKSSDVYVSYDYGKSFKKISDKLNFGLGNRSEAVIAQFYHSPADNKRYIFADAYAQYLWITFDFCNTLQGFSIPFRAADLLLHSKASNLLLGFDRSHPNKQLWKSDDFGQTWIMIQEHVKSFSWGIDPYDKPNTIYIERHEPSGYSTVFRSTDFFQSRENQEVILEEVRDFQLRDKYMFATKVVHLLGSEQQSSVQLWVSFGRKPMRAAQFVTRHPINEYYIADASEDQVFVCVSHSNNRTNLYISEAEGLKFSLSLENVLYYSPGGAGSDTLVRYFANEPFADFHRVEGLQGVYIATLINGSMNEENMRSVITFDKGGTWEFLQAPAFTGYGEKINCELSQGCSLHLAQRLSQLLNLQLRRMPILSKESAPGLIIATGSVGKNLASKTNVYISSSAGARWREALPGPHYYTWGDHGGIITAIAQGMETNELKYSTNEGETWKTFIFSEKPVFVYGLLTEPGEKSTVFTIFGSNKENVHSWLILQVNATDALGVPCTENDYKLWSPSDERGNECLLGHKTVFKRRTPHATCFNGEDFDRPVVVSNCSCTREDYECDFGFKMSEDLSLEVCVPDPEFSGKSYSPPVPCPVGSTYRRTRGYRKISGDTCSGGDVEARLEGELVPCPLAEENEFILYAVRKSIYRYDLASGATEQLPLTGLRAAVALDFDYEHNCLYWSDLALDVIQRLCLNGSTGQEVIINSGLETVEALAFEPLSQLLYWVDAGFKKIEVANPDGDFRLTIVNSSVLDRPRALVLVPQEGVMFWTDWGDLKPGIYRSNMDGSAAYHLVSEDVKWPNGISVDDQWIYWTDAYLECIERITFSGQQRSVILDNLPHPYAIAVFKNEIYWDDWSQLSIFRASKYSGSQMEILANQLTGLMDMKIFYKGKNTGSNACVPRPCSLLCLPKANNSRSCRCPEDVSSSVLPSGDLMCDCPQGYQLKNNTCVKEENTCLRNQYRCSNGNCINSIWWCDFDNDCGDMSDERNCPTTICDLDTQFRCQESGTCIPLSYKCDLEDDCGDNSDESHCEMHQCRSDEYNCSSGMCIRSSWVCDGDNDCRDWSDEANCTAIYHTCEASNFQCRNGHCIPQRWACDGDTDCQDGSDEDPVNCEKKCNGFRCPNGTCIPSSKHCDGLRDCSDGSDEQHCEPLCTHFMDFVCKNRQQCLFHSMVCDGIIQCRDGSDEDAAFAGCSQDPEFHKVCDEFGFQCQNGVCISLIWKCDGMDDCGDYSDEANCENPTEAPNCSRYFQFRCENGHCIPNRWKCDRENDCGDWSDEKDCGDSHILPFSTPGPSTCLPNYYRCSSGTCVMDTWVCDGYRDCADGSDEEACPLLANVTAASTPTQLGRCDRFEFECHQPKTCIPNWKRCDGHQDCQDGRDEANCPTHSTLTCMSREFQCEDGEACIVLSERCDGFLDCSDESDEKACSDELTVYKVQNLQWTADFSGDVTLTWMRPKKMPSASCVYNVYYRVVGESIWKTLETHSNKTNTVLKVLKPDTTYQVKVQVQCLSKAHNTNDFVTLRTPEGLPDAPRNLQLSLPREAEGVIVGHWAPPIHTHGLIREYIVEYSRSGSKMWASQRAASNFTEIKNLLVNTLYTVRVAAVTSRGIGNWSDSKSITTIKGKVIPPPDIHIDSYGENYLSFTLTMESDIKVNGYVVNLFWAFDTHKQERRTLNFRGSILSHKVGNLTAHTSYEISAWAKTDLGDSPLAFEHVMTRGVRPPAPSLKAKAINQTAVECTWTGPRNVVYGIFYATSFLDLYRNPKSLTTSLHNKTVIVSKDEQYLFLVRVVVPYQGPSSDYVVVKMIPDSRLPPRHLHVVHTGKTSVVIKWESPYDSPDQDLLYAIAVKDLIRKTDRSYKVKSRNSTVEYTLNKLEPGGKYHIIVQLGNMSKDSSIKITTVSLSAPDALKIITENDHVLLFWKSLALKEKHFNESRGYEIHMFDSAMNITAYLGNTTDNFFKISNLKMGHNYTFTVQARCLFGNQICGEPAILLYDELGSGADASATQAARSTDVAAVVVPILFLILLSLGVGFAILYTKHRRLQSSFTAFANSHYSSRLGSAIFSSGDDLGEDDEDAPMITGFSDDVPMVIA

SEQ ID NO: 6667 - protein, 362 aa, Homo sapiens
MELGSCLEGGREAAEEEGEPEVKKRRLLCVEFASVASCDAAVAQCFLAENDWEMERALNSYFEPPVEESALERRPETISEPKTYVDLTNEETTDSTTSKISPSEDTQQENGSMFSLITWNIDGLDLNNLSERARGVCSYLALYSPDVIFLQEVIPPYYSYLKKRSSNYEIITGHEEGYFTAIMLKKSRVKLKSQEIIPFPSTKMMRNLLCVHVNVSGNELCLMTSHLESTRGHAAERMNQLKMVLKKMQEAPESATVIFAGDTNLRDREVTRCGGLPNNIVDVWEFLGKPKHCQYTWDTQMNSNLGITAACKLRFDRIFFRAAAEEGHIIPRSLDLLGLEKLDCGRFPSDHWGLLCNLDIIL

SEQ ID NO: 6668 - protein, 304 aa, Homo sapiens
MATWKSPCFLYCLFILGPRLTGQNNSVDLTNEETTDSTTSKISPSEDTQQENGSMFSLITWNIDGLDLNNLSERARGVCSYLALYSPDVIFLQEVIPPYYSYLKKRSSNYEIITGHEEGYFTAIMLKKSRVKLKSQEIIPFPSTKMMRNLLCVHVNVSGNELCLMTSHLESTRGHAAERMNQLKMVLKKMQEAPESATVIFAGDTNLRDREVTRCGGLPNNIVDVWEFLGKPKHCQYTWDTQMNSNLGITAACKLRFDRIFFRAAAEEGHIIPRSLDLLGLEKLDCGRFPSDHWGLLCNLDIIL

SEQ ID NO: 6669 - protein, 1222 aa, Homo sapiens
MLVGQGAGPLGPAVVTAAVVLLLSGVGPAHGSRDLVVGCGGFVKSDVEINYSLIEIKLYTKHGTLKYQTDCAPNNGYFMIPLYDKGDFILKIEPPLGWSFEPTTVELHVDGVSDICTKGGDINFVFTGFSVNGKVLSKGQPLGPAGVQVSLRNTGTEAKIQSTVTQPGGKFAFFKVLPGDYEILATHPTWALKEASTTVSVTNSNANAASPLIVAGYNVSGSVRSDGEPMKGVKFLLFSSLVTKEDVLGCNVSPVPGFQPQDESLVYLCYTVSREDGSFSFYSLPSGGYTVIPFYRGERITFDVAPSRLDFTVEHDSLKIEPVFHVMGFSVTGRVLNGPEGDGVPEAVVTLNNQIKVKTKADGSFRLENITTGTYTIHAQKEHLYFETVTIKIAPNTPQLADIIATGFSVCGQISIIRFPDTVKQMNKYKVVLSSQDKDKSLVTVETDAHGSFCFKAKPGTYKVQVMVPEAETRAGLTLKPQTFPLTVTNRPMMDVAFVQFLASVSGKVSCLNTCGDLLVTLQSLSRQGEKRSLQLSGKVNAMTFTFDNVLPGKYKISIMHEDWCWKNKSLEVEVLEDDMSAVEFRQTGYMLRCSLSHAITLEFYQDGNGRENVGIYSLFKGVNRFCLSKPGVYKVTPRSCHRFEQAFYIYDTSSPSIFTLTAIRHHVLGTITTDKMMDVTVTIKSSIDSEPALVLGPLKSVQELRREQQLAEIEARRQEREKNGNEEGEERMTKPPVQEMVDELQGPFSYDFSYWARSGEKITVTPSSKELLFYPPSMEAVVSGESCPGKLIEIHGKAGLFLEGQIHPELEGVEIVISEKGASSPLITVFTDDKGAYSVGPLHSDLEYTVTSQKEGYVLTAVEGTIGDFKAYALAGVSFEIKAEDDQPLPGVLLSLSGGLFRSNLLTQDNGILTFSNLSPGQYYFKPMMKEFRFEPSSQMIEVQEGQNLKITITGYRTAYSCYGTVSSLNGEPEQGVAMEAVGQNDCSIYGEDTVTDEEGKFRLRGLLPGCVYHVQLKAEGNDHIERALPHHRVIEVGNNDIDDVNIIVFRQINQFDLSGNVITSSEYLPTLWVKLYKSENLDNPIQTVSLGQSLFFHFPPLLRDGENYVVLLDSTLPRSQYDYILPQVSFTAVGYHKHTTLIFNPTRKLPEQDIAQGSYIALPLTLLVLLAGYNHDKLIPLLLQLTSRLQGVRALGQAASDNSGPEDAKRQAKKQKTRRT

SEQ ID NO: 6670 - protein, 1692 aa, Homo sapiens
IPEGRLSAEHTSSLVPSLHITTLGQEQAILSGAVPASPSTGTADFPSILTFLQPTENHASPSPVPEMPTLPAEGSDGSPPATRDLLLSSKVPNLLSTSWTFPRWKKDSVTAILGKNEEANVTIPLQGFPRKEVLSLHTVNGFVSDFSTGSVSSPIITAPRTNPLSSGPPLPSILSIQATQTVFPSLLAFSSTKPEVYAAAVDHSGLPASAPKQVRASPSSMDVYDSLTIGDMKKPATTDVFWSSLSAETGSLSTESIISGLQQQTNYDLNGHTISTTSWETHLAPTAPPNGLTSAADAIKSQDFKDTAGHSVTAEGFSIQDLVLGTSIEQPVQQSDMTMVGSHIDLWPTSNNNHSRDFQTAEVAYYSPTTRHSVSHPQLQLPNQPAHPLLLTSPGPTSTGSLQEMLSDGTDTGSEISSDINSSPERNASTPFQNILGYHSAAESSISTSVFPRTSSRVLRASQHPKKWTADTVSSKVQPTAAAAVTLFLRKSSPPALSAALVAKGTSSSPLAVASGPAKSSSMTTLAKNVTNKAASGPKRTPGAVHTAFPFTPTYMYARTGHTTSTHTAIARKHGHCLWPVVYNLPPPGKPQAMHTGLPNPTNLEMPRASTPRPLTVTAALTSITASVKATRLPPLRAENTDAVLPAASAAVVTTGKMASNLECQMSSKLLVKTVLFLTQRRVQISESLKFSIAKGLTQALRKAFHQNDVSAHVDILEYSHNVTVGYYATKGKLVYLPAVVIEMLGVYGVSNVTADLKQHTPHLQSVAVLASPWNPQPAGYFQLKTVLQFVSQADNIQSCKFAQTMEQRLQKAFQDAERKVLNTKSNLTIQIVSTSNASQAVTLVYVVGNQSTFLNGTVASSLLSQLSAELVGFYLTYPPLTIAEPLEYPNLDISETTRDYWVITVLQGVDNSLVGLHNQSFARVMEQRLAQLFMMSQQQGRRFKRATTLGSYTVQMVKMQRVPGPKDPAELTYYTLYNGKPLLGTVAAKILSTIDSQRMALTLHHVVLLQADPVVKNPPNNLWIIAAVLAPIAVVTVIIIIITAVLCRKNKNDFKPDTMINLPQRAKPVQGFDYAKQHLGQQGADEEVIPVTQETVVLPLPIRDAPQERDVAQDGSTIKTAKSTETRKSRSPSENGSVISNESGKPSSGRRSPQNVMAQQKVTKEEARKRNVPASDEEEGAVLFDNSSKVAAEPFDTSSGSVQLIAIKPTALPMVPPTSDRSQESSAVLNGEVNKALKQKSDIEHYRNKLRLKAKRKGYYDFPAVETSKGLTERKKMYEKAPKEMEHVLDPDSELCAPFTESKNRQQMKNSVYRSRQSLNSPSPGETEMDLLVTRERPRRGIRNSGYDTEPEIIEETNIDRVPEPRGYSRSRQVKGHSETSTLSSQPSIDEVRQQMHMLLEEAFSLASAGHAGQSRHQEAYGSAQHLPYSEVVTSAPGTMTRPRAGVQWVPTYRPEMYQYSLPRPAYRFSQLPEMVMGSPPPPVPPRTGPVAVASLRRSTSDIGSKTRMAESTGPEPAQLHDSASFTQMSRGPVSVTQLDQSALNYSGNTVPAVFAIPAANRPGFTGYFIPTPPSSYRNQAWMSYAGENELPSQWADSVPLPGYIEAYPRSRYPQSSPSRLPRQYSQPANLHPSLEQAPAPSTAASQQSLAENDPSDAPLTNISTAALVKAIREEVAKLAKKQTDMFEFQV

SEQ ID NO: 6671 - protein, 260 aa, Homo sapiens
MRPEDRMFHIRAVILRALSLAFLLSLRGAGAIKADHVSTYAAFVQTHRPTGEFMFEFDEDEMFYVDLDKKETVWHLEEFGQAFSFEAQGGLANIAILNNNLNTLIQRSNHTQATNDPPEVTVFPKEPVELGQPNTLICHIDKFFPPVLNVTWLCNGELVTEGVAESLFLPRTDYSFHKFHYLTFVPSAEDFYDCRVEHWGLDQPLLKHWEAQEPIQMPETTETVLCALGLVLGLVGIIVGTVLIIKSLRSGHDPRAQGTL

SEQ ID NO: 6672 - protein, 1186 aa, Homo sapiens
MDISTRSKDPGSAERTAQKRKFPSPPHSSNGHSPQDTSTSPIKKKKKPGLLNSNNKEQSELRHGPFYYMKQPLTTDPVDVVPQDGRNDFYCWVCHREGQVLCCELCPRVYHAKCLRLTSEPEGDWFCPECEKITVAECIETQSKAMTMLTIEQLSYLLKFAIQKMKQPGTDAFQKPVPLEQHPDYAEYIFHPMDLCTLEKNAKKKMYGCTEAFLADAKWILHNCIIYNGGNHKLTQIAKVVIKICEHEMNEIEVCPECYLAACQKRDNWFCEPCSNPHPLVWAKLKGFPFWPAKALRDKDGQVDARFFGQHDRAWVPINNCYLMSKEIPFSVKKTKSIFNSAMQEMEVYVENIRRKFGVFNYSPFRTPYTPNSQYQMLLDPTNPSAGTAKIDKQEKVKLNFDMTASPKILMSKPVLSGGTGRRISLSDMPRSPMSTNSSVHTGSDVEQDAEKKATSSHFSASEESMDFLDKSTASPASTKTGQAGSLSGSPKPFSPQLSAPITTKTDKTSTTGSILNLNLDRSKAEMDLKELSESVQQQSTPVPLISPKRQIRSRFQLNLDKTIESCKAQLGINEISEDVYTAVEHSDSEDSEKSDSSDSEYISDDEQKSKNEPEDTEDKEGCQMDKEPSAVKKKPKPTNPVEIKEELKSTSPASEKADPGAVKDKASPEPEKDFSEKAKPSPHPIKDKLKGKDETDSPTVHLGLDSDSESELVIDLGEDHSGREGRKNKKEPKEPSPKQDVVGKTPPSTTVGSHSPPETPVLTRSSAQTSAAGATATTSTSSTVTVTAPAPAATGSPVKKQRPLLPKETAPAVQRVVWNSSSKFQTSSQKWHMQKMQRQQQQQQQQNQQQQPQSSQGTRYQTRQAVKAVQQKEITQSPSTSTITLVTSTQSSPLVTSSGSMSTLVSSVNADLPIATASADVAADIAKYTSKMMDAIKGTMTEIYNDLSKNTTGSTIAEIRRLRIEIEKLQWLHQQELSEMKHNLELTMAEMRQSLEQERDRLIAEVKKQLELEKQQAVDETKKKQWCANCKKEAIFYCCWNTSYCDYPCQQAHWPEHMKSCTQSATAPQQEADAEVNTETLNKSSQGSSSSTQSAPSETASASKEKETSAEKSKESGSTLDLSGSRETPSSILLGSNQGSDHSRSNKSSWSSSDEKRGSTRSDHNTSTSTKSLLPKESRLDTFWD

SEQ ID NO: 6673 - protein, 1188 aa, Homo sapiens
MHPQSLAEEEIKTEQEVVEGMDISTRSKDPGSAERTAQKRKFPSPPHSSNGHSPQDTSTSPIKKKKKPGLLNSNNKEQSELRHGPFYYMKQPLTTDPVDVVPQDGRNDFYCWVCHREGQVLCCELCPRVYHAKCLRLTSEPEGDWFCPECEKITVAECIETQSKAMTMLTIEQLSYLLKFAIQKMKQPGTDAFQKPVPLEQHPDYAEYIFHPMDLCTLEKNAKKKMYGCTEAFLADAKWILHNCIIYNGGNHKLTQIAKVVIKICEHEMNEIEVCPECYLAACQKRDNWFCEPCSNPHPLVWAKLKGFPFWPAKALRDKDGQVDARFFGQHDRAWVPINNCYLMSKEIPFSVKKTKSIFNSAMQEMEVYVENIRRKFGVFNYSPFRTPYTPNSQYQMLLDPTNPSAGTAKIDKQEKVKLNFDMTASPKILMSKPVLSGGTGRRISLSDMPRSPMSTNSSVHTGSDVEQDAEKKATSSHFSASEESMDFLDKSTASPASTKTGQAGSLSGSPKPFSPQLSAPITTKTDKTSTTGSILNLNLDRSKAEMDLKELSESVQQQSTPVPLISPKRQIRSRFQLNLDKTIESCKAQLGINEISEDVYTAVEHSDSEDSEKSDSSDSEYISDDEQKSKNEPEDTEDKEGCQMDKEPSAVKKKPKPTNPVEIKEELKSTSPASEKADPGAVKDKASPEPEKDFSEKAKPSPHPIKDKLKGKDETDSPTVHLGLDSDSESELVIDLGEDHSGREGRKNKKEPKEPSPKQDVVGKTPPSTTVGSHSPPETPVLTRSSAQTSAAGATATTSTSSTVTVTAPAPAATGSPVKKQRPLLPKETAPAVQRVVWNSSTVQQKEITQSPSTSTITLVTSTQSSPLVTSSGSMSTLVSSVNADLPIATASADVAADIAKYTSKMMDAIKGTMTEIYNDLSKNTTGSTIAEIRRLRIEIEKLQWLHQQELSEMKHNLELTMAEMRQSLEQERDRLIAEVKKQLELEKQQAVDETKKKQWCANCKKEAIFYCCWNTSYCDYPCQQAHWPEHMKSCTQSATAPQQEADAEVNTETLNKSSQGSSSSTQSAPSETASASKEKETSAEKSKESGSTLDLSGSRETPSSILLGSNQGSVSKRCDKQPAYAPTTTDHQPHPNYPAQKYHSRSNKSSWSSSDEKRGSTRSDHNTSTSTKSLLPKESRLDTFWD

SEQ ID NO: 6674 - protein, 1180 aa, Homo sapiens
MHPQSLAEEEIKTEQEVVEGDISTRSKDPGSAERTAQKRKFPSPPHSSNGHSPQDTSTSPIKKKKKPGLLNSNNKEQDGRNDFYCWVCHREGQVLCCELCPRVYHAKCLRLTSEPEGDWFCPECEKITVAECIETQSKAMTMLTIEQLSYLLKFAIQKMKQPGTDAFQKPVPLEQHPDYAEYIFHPMDLCTLEKNAKKKMYGCTEAFLADAKWILHNCIIYNGGNHKLTQIAKVVIKICEHEMNEIEVCPECYLAACQKRDNWFCEPCSNPHPLVWAKLKGFPFWPAKALRDKDGQVDARFFGQHDRAWVPINNCYLMSKEIPFSVKKTKSIFNSAMQEMEVYVENIRRKFGVFNYSPFRTPYTPNSQYQMLLDPTNPSAGTAKIDKQEKVKLNFDMTASPKILMSKPVLSGGTGRRISLSDMPRSPMSTNSSVHTGSDVEQDAEKKATSSHFSASEESMDFLDKSTASPASTKTGQAGSLSGSPKPFSPQLSAPITTKTDKTSTTGSILNLNLDRSKAEMDLKELSESVQQQSTPVPLISPKRQIRSRFQLNLDKTIESCKAQLGINEISEDVYTAVEHSDSEDSEKSDSSDSEYISDDEQKSKNEPEDTEDKEGCQMDKEPSAVKKKPKPTNPVEIKEELKSTSPASEKADPGAVKDKASPEPEKDFSEKAKPSPHPIKDKLKGKDETDSPTVHLGLDSDSESELVIDLGEDHSGREGRKNKKEPKEPSPKQDVVGKTPPSTTVGSHSPPETPVLTRSSAQTSAAGATATTSTSSTVTVTAPAPAATGSPVKKQRPLLPKETAPAVQRVVWNSSSKFQTSSQKWHMQKMQRQQQQQQQQNQQQQPQSSQGTRYQTRQAVKAVQQKEITQSPSTSTITLVTSTQSSPLVTSSGSMSTLVSSVNADLPIATASADVAADIAKYTSKMMDAIKGTMTEIYNDLSKNTTGSTIAEIRRLRIEIEKLQWLHQQELSEMKHNLELTMAEMRQSLEQERDRLIAEVKKQLELEKQQAVDETKKKQWCANCKKEAIFYCCWNTSYCDYPCQQAHWPEHMKSCTQSATAPQQEADAEVNTETLNKSSQGSSSSTQSAPSETASASKEKETSAEKSKESGSTLDLSGSRETPSSILLGSNQGSDHSRSNKSSWSSSDEKRGSTRSDHNTSTSTKSLLPKESRLDTFWD

SEQ ID NO: 6675 - protein, 995 aa, Homo sapiens
MTMLTIEQLSYLLKFAIQKMKQPGTDAFQKPVPLEQHPDYAEYIFHPMDLCTLEKNAKKKMYGCTEAFLADAKWILHNCIIYNGGNHKLTQIAKVVIKICEHEMNEIEVCPECYLAACQKRDNWFCEPCSNPHPLVWAKLKGFPFWPAKALRDKDGQVDARFFGQHDRAWVPINNCYLMSKEIPFSVKKTKSIFNSAMQEMEVYVENIRRKFGVFNYSPFRTPYTPNSQYQMLLDPTNPSAGTAKIDKQEKVKLNFDMTASPKILMSKPVLSGGTGRRISLSDMPRSPMSTNSSVHTGSDVEQDAEKKATSSHFSASEESMDFLDKSTASPASTKTGQAGSLSGSPKPFSPQLSAPITTKTDKTSTTGSILNLNLDRSKAEMDLKELSESVQQQSTPVPLISPKRQIRSRFQLNLDKTIESCKAQLGINEISEDVYTAVEHSDSEDSEKSDSSDSEYISDDEQKSKNEPEDTEDKEGCQMDKEPSAVKKKPKPTNPVEIKEELKSTSPASEKADPGAVKDKASPEPEKDFSEKAKPSPHPIKDKLKGKDETDSPTVHLGLDSDSESELVIDLGEDHSGREGRKNKKEPKEPSPKQDVVGKTPPSTTVGSHSPPETPVLTRSSAQTSAAGATATTSTSSTVTVTAPAPAATGSPVKKQRPLLPKETAPAVQRVVWNSSTVQQKEITQSPSTSTITLVTSTQSSPLVTSSGSMSTLVSSVNADLPIATASADVAADIAKYTSKMMDAIKGTMTEIYNDLSKNTTGSTIAEIRRLRIEIEKLQWLHQQELSEMKHNLELTMAEMRQSLEQERDRLIAEVKKQLELEKQQAVDETKKKQWCANCKKEAIFYCCWNTSYCDYPCQQAHWPEHMKSCTQSATAPQQEADAEVNTETLNKSSQGSSSSTQSAPSETASASKEKETSAEKSKESGSTLDLSGSRETPSSILLGSNQGSDHSRSNKSSWSSSDEKRGSTRSDHNTSTSTKSLLPKESRLDTFWD

SEQ ID NO: 6676 - protein, 764 aa, Homo sapiens
MLLDPTNPSAGTAKIDKQEKVKLNFDMTASPKILMSKPVLSGGTGRRISLSDMPRSPMSTNSSVHTGSDVEQDAEKKATSSHFSASEESMDFLDKSTASPASTKTGQAGSLSGSPKPFSPQLSAPITTKTDKTSTTGSILNLNLDRSKAEMDLKELSESVQQQSTPVPLISPKRQIRSRFQLNLDKTIESCKAQLGINEISEDVYTAVEHSDSEDSEKSDSSDSEYISDDEQKSKNEPEDTEDKEGCQMDKEPSAVKKKPKPTNPVEIKEELKSTSPASEKADPGAVKDKASPEPEKDFSEKAKPSPHPIKDKLKGKDETDSPTVHLGLDSDSESELVIDLGEDHSGREGRKNKKEPKEPSPKQDVVGKTPPSTTVGSHSPPETPVLTRSSAQTSAAGATATTSTSSTVTVTAPAPAATGSPVKKQRPLLPKETAPAVQRVVWNSSTVQQKEITQSPSTSTITLVTSTQSSPLVTSSGSMSTLVSSVNADLPIATASADVAADIAKYTSKMMDAIKGTMTEIYNDLSKNTTGSTIAEIRRLRIEIEKLQWLHQQELSEMKHNLELTMAEMRQSLEQERDRLIAEVKKQLELEKQQAVDETKKKQWCANCKKEAIFYCCWNTSYCDYPCQQAHWPEHMKSCTQSATAPQQEADAEVNTETLNKSSQGSSSSTQSAPSETASASKEKETSAEKSKESGSTLDLSGSRETPSSILLGSNQGSDHSRSNKSSWSSSDEKRGSTRSDHNTSTSTKSLLPKESRLDTFWD

SEQ ID NO: 6677 - protein, 1920 aa, Homo sapiens
HTQKPDEQRSEPSAGIPKVTSRCIDSKEPIERPEEKPKKEGFIRSSEGPKPEKVYKSKSETRWGPRPSSNRREEVNDRPVRRSGPIKKPVLRDMKEEREQRKEKEGEKAEKVTEKVVVKPEKTEKKDLPPPPPPPQPPAPIQPQSVPPPIQPEAEKFPSTETATLAQKPSQDTEKPLEPVSTVQVEPAVKTVNQQTMAAPVVKEEKQPEKVISKDLVIERPRPDSRPAVKKESTLPPRTYWKEARERDWFPDQGYRGRGRGEYYSRGRSYRGSYGGRGRGGRGHTRDYPQYRDNKPRAEHIPSGPLRQREESETRSESSDFEVVPKRRRQRGSETDTDSEIHESASDKDSLSKGKLPKREERPENKKPVKPHSSFKPDNHVRIDNRLLEKPYVRDDDKAKPGFLPKGEPTRRGRGGTFRRGGRDPGGRPSRPSTLRRPAYRDNQWNPRQSEVPKPEDGEPPRRHEQFIPIAADKRPPKFERKFDPARERPRRQRPTRPPRQDKPPRFRRLREREAASKSNEVVAVPTNGTVNNVAQEPVNTLGDISGNKTPDLSNQNSSDQANEEWETASESSDFNERRERDEKKNADLNAQTVVKVGENVLPPKREIAKRSFSSQRPVDRQNRRGNNGPPKSGRNFSGPRNERRSGPPSKSGKRGPFDDQPAGTTGVDLINGSSAHHQEGVPNGTGQKNSKDSTGKKREDPKPGPKKPKEKVDALSQFDLNNYASVVIIDDHPEVTVIEDPQSNLNDDGFTEVVSKKQQKRLQDEERRKKEEQVIQVWNKKNANEKGRSQTSKLPPRFAKKQATGIQQAQSSASVPPLASAPLPPSTSSPLAPVSASASVSASVPASTSAAAITSSSAPASAPAPTPILASVSTPASVTILASASIPILASALASTSAPTPAPAASSPAAPVITAPTIPASAPTASVPLAPASASAPAPAPTPVSAPNPAPPAPAQTQAQTHKPVQNPLQTTSQSSKQPPPSIRLPSAQTPNGTDYVASGKSIQTPQSHGTLTAELWDNKVAPPAVLNDISKKLGPISPPQPPSVSAWNKPLTSFGSAPSSEGAKNGQESGLEIGTDTIQFGAPASNGNENEVVPVLSEKSADKIPEPKEQRQKQPRAGPIKAQKLPDLSPVENKEHKPGPIGKERSLKNRKVKDAQQVEPEGQEKPSPATVRSTDPVTTKETKAVSEMSTEIGTMISVSSAEYGTNAKESVTDYTTPSSSLPNTVATNNTKMEDTLVNNVPLPNTLPLPKRETIQQSSSLTSVPPTTFSLTFKMESARKAWENSPNVREKGSPVTSTAPPIATGVSSSASGPSTANYNSFSSASMPQIPVASVTPTASLSGAGTYTTSSLSTKSTTTSDPPNICKVKPQQLQTSSLPSASHFSQLSCMPSLIAQQQQNPQVYVSQSAAAQIPAFYMDTSHLFNTQHARLAPPSLAQQQGFQPGLSQPTSVQQIPIPIYAPLQGQHQAQLSLGAGPAVSQAQELFSSSLQPYRSQPAFMQSSLSQPSVVLSGTAIHNFPTVQHQELAKAQSGLAFQQTSNTQPIPILYEHQLGQASGLGGSQLIDTHLLQARANLTQASNLYSGQVQQPGQTNFYNTAQSPSALQQVTVPLPASQLSLPNFGSTGQPLIALPQTLQPPLQHTTPQAQAQSLSRPAQVSQPFRGLIPAGTQHSMIATTGKMSEMELKAFGSGIDIKPGTPPIAGRSTTPTSSPATSTSPNSQSSKMNSIVYQKQFQSAPATVRMTQPFPTQFAPQILSQPNLVPPLVRAPHTNTFPAPVQRPPMALASQMPPPLTTGLMSHARLPHVARGPCGSLSGVRGNQAQAALKAEQDMKAKQRAEVLQSTQRFFSEQQQSKQIGGGKAQKVDSDSSKPPETLTDPPGVCQEKVEEKPPPAPSIATKPVRTGPIKPQAIKTEETKS

SEQ ID NO: 6678 - protein, 2701 aa, Homo sapiens
MSEKSGQSTKAKDGKKYATLSLFNTYKGKSLETQKTTARHGLQSLGKVGISRRMPPPANLPSLKAENKGNDPNVNIVPKDGTGWASKQEQHEEEKTPEVPPAQPKPGVAAPPEVAPAPKSWASNKQGGQGDGIQVNSQFQQEFPSLQAAGDQEKKEKETNDDNYGPGPSLRPPNVACWRDGGKAAGSPSSSDQDEKLPGQDESTAGTSEQNDILKVVEKRIACGPPQAKLNGQQAALASQYRAMMPPYMFQQYPRMTYPPLHGPMRFPPSLSETNKGLRGRGPPPSWASEPERPSILSASELKELDKFDNLDAEADEGWAGAQMEVDYTEQLNFSDDDEQGSNSPKENNSEDQGSKASENNENKKETDEVSNTKSSSQIPAQPSVAKVPYGKGPSFNQERGTSSHLPPPPKLLAQQHPPPDRQAVPGRPGPFPSKQQVADEDEIWKQRRRQQSEISAAVERARKRREEEERRMEEQRKAACAEKLKRLDEKLGILEKQPSPEEIREREREKEREREKELEKEQEQEREKEREKDRERQQEKEKELEKEQEKQREMEKERKQEKEKELERQKEKEKELQKMKEQEKECELEKEREKLEEKIEPREPNLEPMVEKQESENSCNKEEEPVFTRQDSNRSEKEATPVVHETEPESGSQPRPAVLSGYFKQFQKSLPPRFQRQQEQMKQQQWQQQQQQGVLPQTVPSQPSSSTVPPPPHRPLYQPMQPHPQHLASMGFDPRWLMMQSYMDPRMMSGRPAMDIPPIHPGMIPPKPLMRRDQMEGSPNSSESFEHIARSARDHAISLSEPRMLWGSDPYPHAEPQQATTPKATEEPEDVRSEAALDQEQITAAYSVEHNQLEAHPKADFIRESSEAQVQKFLSRSVEDVRPHHTDANNQSACFEAPDQKTLSAPQEERISAVESQPSRKRSVSHGSNHTQKPDEQRSEPSAGIPKVTSRCIDSKEPIERPEEKPKKEGFIRSSEGPKPEKVYKSKSETRWGPRPSSNRREEVNDRPVRRSGPIKKPVLRDMKEEREQRKEKEGEKAEKVTEKVVVKPEKTEKKDLPPPPPPPQPPAPIQPQSVPPPIQPEAEKFPSTETATLAQKPSQDTEKPLEPVSTVQVEPAVKTVNQQTMAAPVVKEEKQPEKVISKDLVIERPRPDSRPAVKKESTLPPRTYWKEARERDWFPDQGYRGRGRGEYYSRGRSYRGSYGGRGRGGRGHTRDYPQYRDNKPRAEHIPSGPLRQREESETRSESSDFEVVPKRRRQRGSETDTDSEIHESASDKDSLSKGKLPKREERPENKKPVKPHSSFKPDNHVRIDNRLLEKPYVRDDDKAKPGFLPKGEPTRRGRGGTFRRGGRDPGGRPSRPSTLRRPAYRDNQWNPRQSEVPKPEDGEPPRRHEQFIPIAADKRPPKFERKFDPARERPRRQRPTRPPRQDKPPRFRRLREREAASKSNEVVAVPTNGTVNNVAQEPVNTLGDISGNKTPDLSNQNSSDQANEEWETASESSDFNERRERDEKKNADLNAQTVVKVGENVLPPKREIAKRSFSSQRPVDRQNRRGNNGPPKSGRNFSGPRNERRSGPPSKSGKRGPFDDQPAGTTGVDLINGSSAHHQEGVPNGTGQKNSKDSTGKKREDPKPGPKKPKEKVDALSQFDLNNYASVVIIDDHPEVTVIEDPQSNLNDDGFTEVVSKKQQKRLQDEERRKKEEQVIQVWNKKNANEKGRSQTSKLPPRFAKKQATGIQQAQSSASVPPLASAPLPPSTSASVPASTSAPLPATLTPVPASTSAPVPASTLAPVLASTSAPVPASPLAPVSASASVSASVPASTSAAAITSSSAPASAPAPTPILASVSTPASVTILASASIPILASALASTSAPTPAPAASSPAAPVITAPTIPASAPTASVPLAPASASAPAPAPTPVSAPNPAPPAPAQTQAQTHKPVQNPLQTTSQSSKQPPPSIRLPSAQTPNGTDYVASGKSIQTPQSHGTLTAELWDNKVAPPAVLNDISKKLGPISPPQPPSVSAWNKPLTSFGSAPSSEGAKNGQESGLEIGTDTIQFGAPASNGNENEVVPVLSEKSADKIPEPKEQRQKQPRAGPIKAQKLPDLSPVENKEHKPGPIGKERSLKNRKVKDAQQVEPEGQEKPSPATVRSTDPVTTKETKAVSEMSTEIGTMISVSSAEYGTNAKESVTDYTTPSSSLPNTVATNNTKMEDTLVNNVPLPNTLPLPKRETIQQSSSLTSVPPTTFSLTFKMESARKAWENSPNVREKGSPVTSTAPPIATGVSSSASGPSTANYNSFSSASMPQIPVASVTPTASLSGAGTYTTSSLSTKSTTTSDPPNICKVKPQQLQTSSLPSASHFSQLSCMPSLIAQQQQNPQVYVSQSAAAQIPAFYMDTSHLFNTQHARLAPPSLAQQQGFQPGLSQPTSVQQIPIPIYAPLQGQHQAQLSLGAGPAVSQAQELFSSSLQPYRSQPAFMQSSLSQPSVVLSGTAIHNFPTVQHQELAKAQSGLAFQQTSNTQPIPILYEHQLGQASGLGGSQLIDTHLLQARANLTQASNLYSGQVQQPGQTNFYNTAQSPSALQQVTVPLPASQLSLPNFGSTGQPLIALPQTLQPPLQHTTPQAQAQSLSRPAQVSQPFRGLIPAGTQHSMIATTGKMSEMELKAFGSGIDIKPGTPPIAGRSTTPTSSPSGLLLQVRTASPAK

SEQ ID NO: 6679 - protein, 1299 aa, Homo sapiens
AVPTNGTVNNVAQEPVNTLGDISGNKTPDLSNQNSSDQANEEWETASESSDFNERRERDEKKNADLNAQTVVKVGENVLPPKREIAKRSFSSQRPVDRQNRRGNNGPPKSGRNFSGPRNERRSGPPSKSGKRGPFDDQPAGTTGVDLINGSSAHHQEGVPNGTGQKNSKDSTGKKREDPKPGPKKPKEKVDALSQFDLNNYASVVIIDDHPEVTVIEDPQSNLNDDGFTEVVSKKQQKRLQDEERRKKEEQVIQVWNKKNANEKGRSQTSKLPPRFAKKQATGIQQAQSSASVPPLASAPLPPSTSASVPASTSAPLPATLTPVPASTSAPVPASTLAPVLASTSAPVPASPLAPVSASASVSASVPASTSAAAITSSSAPASAPAPTPILASVSTPASVTILASASIPILASALASTSAPTPAPAASSPAAPVITAPTIPASAPTASVPLAPASASAPAPAPTPVSAPNPAPPAPAQTQAQTHKPAQNPLQTTSQSSKQPPPSIRLPSAQTPNGTDYVASGKSIQTPQSHGTLTAELWDNKVAPPAVLNDISKKLGPISPPQPPSVSAWNKPLTSFGSAPSSEGAKNGQESGLEIGTDTIQFGAPASNGNENEVVPVLSEKSADKIPEPKEQRQKQPRAGPIKAQKLPDLSPVENKEHKPGPIGKERSLKNRKVKDAQQVEPEGQEKPSPATVRSTDPVTTKETKAVSEMSTEIGTMISVSSAEYGTNAKMESARKAWENSPNVREKGSPVTSTAPPIATGVSSSASGPSTANYNSFSSASMPQIPVASVTPTASLSGAGTYTTSSLSTKSTTTSDPPNICKVKPQQLQTSSLPSASHFSQLSCMPSLIAQQQQNPQVYVSQSAAAQIPAFYMDTSHLFNTQHARLAPPSLAQQQGFQPGLSQPTSVQQIPIPIYAPLQGQHQAQLSLGAGPAVSQAQELFSSSLQPYRSQPAFMQSSLSQPSVVLSGTAIHNFPTVQHQELAKAQSGLAFQQTSNTQPIPILYEHQLGQASGLGGSQLIDTHLLQARANLTQASNLYSGQVQQPGQTNFYNTAQSPSALQQVTVPLPASQLSLPNFGSTGQPLIALPQTLQPPLQHTTPQAQAQSLSRPAQVSQPFRGLIPAGTQHSMIATTGKMSEMELKAFGSGIDIKPGTPPIAGRSTTPTSSPFRATSTSPNSQSSKMNSIVYQKQFQSAPATVRMTQPFPTQFAPQAKQRAEVLQSTQRFFSEQQQSKQIGGGKAQKVDSDSSKPPETLTDPPGVCQEKVEEKPPPAPSIATKPVRTGPIKPQAIKTEETKS

SEQ ID NO: 6680 - protein, 183 aa, Homo sapiens
MLYKSSDRPAHKVSMLLLCHALAIAVVQIVIFSESWAFAKNINFYNVRPPLDPTPFPNSFKCFTCENAGDNYNCNRWAEDKWCPQNTQYCLTVHHFTSHGRSTSITKKCASRSECHFVGCHHSRDSEHTECRSCCEGMICNVELPTNHTNAVFAVMHAQRTSGSSAPTLYLPVLAWVFVLPLL

SEQ ID NO: 6681 - protein, 342 aa, Homo sapiens
ADFLSRAGWVGTGSLPPPQRWPLPHCRPPGPPFNLVVEPCGFPAEPGPGLLPRGRGSPVPARPPPAPQVVQGGEEPRPAPRGSSQRRPQAGALGAWAGSRVRAPRGSVGAGGEICHTSACCWQPSWTRLLLLITWMLLITLSANLFTVPERSLTTTFSFSRYKSSDRPAHKVSMLLLCHALAIAVVQIVIFSESWAFAKNINFYNVRPPLDPTPFPNSFKCFTCENAGDNYNCNRWAEDKWCPQNTQYCLTVHHFTSHGRSTSITKKCASRSECHFVGCHHSRDSEHTECRSCCEGMICNVELPTNHTNAVFAVMHAQRTSGSSAPTLYLPVLAWVFVLPLL

SEQ ID NO: 6682 - protein, 303 aa, Homo sapiens
MSKSESPKEPEQLRKLFIGGLSFETTDESLRSHFEQWGTLTDCVVMRDPNTKRSRGFGFVTYATVEEVDAAMNARPHKVDGRVVEPKRAVSREDSQRPGAHLTVKKIFVGGIKEDTEEHHLRDYFEQYGKIEVIEIMTDRGSGKKRGFAFVTFDDHDSVDKTVIQKYHTVNGHNCEVRSGSGNFGGGRGGGFGGNDNFGRGGNFSGRGGFGGSHGGGGYGGSGDGYNGFGNDGSNFGGGGSYNDFGNYNNQSSNFGPMKGGNFGGRSSGPYGGGGQYFAKPRNQVAMAVPAAAVAMAVAEDFN

SEQ ID NO: 6683 - protein, 320 aa, Homo sapiens
MSKSESPKEPEQLRKLFIGGLSFETTDESLRSHFEQWGTLTDCVVMRDPNTKRSRGFGFVTYATVEEVDAAMNARPHKVDGRVVEPKRAVSREDSQRPGAHLTVKKIFVGGIKEDTEEHHLRDYFEQYGKIEVIEIMTDRGSGKKRGFAFVTFDDHDSVDKIVIQKYHTVNGHNCEVRKALSKQEMASASSSQRGRSGSGNFGGGRGGGFGGNDNFGRGGNFSGRGGFGGSRGGGGYGGSGDGYNGFGNDGSNFGGGGSYNDFGNYNNQSSNFGPMKGGNFGGRSSGPYGGGGQYFAKPRNQGGYGGSSSSSSYGSGRRF

SEQ ID NO: 6684 - protein, 372 aa, Homo sapiens
MSKSESPKEPEQLRKLFIGGLSFETTDESLRSHFEQWGTLTDCVVMRDPNTKRSRGFGFVTYATVEEVDAAMNARPHKVDGRVVEPKRAVSREDSQRPGAHLTVKKIFVGGIKEDTEEHHLRDYFEQYGKIEVIEIMTDRGSGKKRGFAFVTFDDHDSVDKIVIQKYHTVNGHNCEVRKALSKQEMASASSSQRGRSGSGNFGGGRGGGFGGNDNFGRGGNFSGRGGFGGSRGGGGYGGSGDGYNGFGNDGGYGGGGPGYSGGSRGYGSGGQGYGNQGSGYGGSGSYDSYNNGGGGGFGGGSGSNFGGGGSYNDFGNYNNQSSNFGPMKGGNFGGRSSGPYGGGGQYFAKPRNQGGYGGSSSSSSYGSGRRF

SEQ ID NO: 6685 - protein, 1197 aa, Homo sapiens
MHIKSIILEGFKSYAQRTEVNGFDPLFNAITGLNGSGKSNILDSICFLLGISNLSQVRASNLQDLVYKNGQAGITKASVSITFDNSDKKQSPLGFEVHDEITVTRQVVIGGRNKYLINGVNANNTRVQDLFCSVGLNVNNPHFLIMQGRITKVLNMKPPEILSMIEEAAGTRMYEYKKIAAQKTIEKKEAKLKEIKTILEEEITPTIQKLKEERSSYLEYQKVMREIEHLSRLYIAYQFLLAEDTKVRSAEELKEMQDKVIKLQEELSENDKKIKALNHEIEELEKRKDKETGVILRSLEDALAEAQRVNTKSQSAFDLKKKNLACEESKRKELEKNMVEDSKTLAAKEKEVKKITDGLHALQEASNKDAEALAAAQQHFNAVSAGLSSNEDGAEATLAGQMMACKNDISKAQTEAKQAQMKLKHAQQELKNKQAEVKKMDSGYRKDQEALEAVKRLKEKLEAEMKKLNYEENKEESLLEKRRQLSRDIGRLKETYEALLARFPNLRFAYKDPEKNWNRNCVKGLVASLISVKDTSATTALELVAGERLYNVVVDTEVTGKKLLERGELKRRYTIIPLNKISARCIAPETLRVAQNLVGPDNVHVALSLVEYKPELQKAMEFVFGTTFVCDNMDNAKKVAFDKRIMTRTVTLGGDVFDPHGTLSGGARSQAASILTKFQELKDVQDELRIKENELRALEEELAGLKNTAEKYRQLKQQWEMKTEEADLLQTKLQQSSYHKQQEELDALKKTIEESEETLKNTKEIQRKAEEKYEVLENKMKNAEAERERELKDAQKKLDCAKTKADASSKKMKEKQQEVEAITLELEELKREHTSYKQQLEAVNEAIKSYESQIEVMAAEVAKNKESVNKAQEEVTKQKEVITAQDTVIKLNMQKWQNTRSKTMILSLKIKELDHHISKHKREAEDGAAKVSKMLKDYDWINAERHLFGQPNSAYDFKTNNPKEAGQRLQKLQEMKEKLGRNVNMRAMNVLTEAEERCNDLMKKKRIVENDKSKILTTIEDLDQKKNQALNIAWQKVNKDFGSIFSTLLPGANAMLAPPEGQTVLDGLEFKVALGNTWKENLTELSGGQRSLVALSLILSMLLFKPAPIYILDEVDAALDLSHTQNIGQMLRTHFTHSQFIVVSLKEGMFNNANVLFKTKFVDGVSTVARFTQCQNGKISKEAKSKAKPPKGAHVEV

SEQ ID NO: 6686 - protein, 1099 aa, Homo sapiens
MHIKSIILEGFKSYAQRTEVNGFDPLFNAITGLNGSGKSNILDSICFLLGISNLSQVRASNLQDLVYKNGQAGITKASVSITFDNSDKKQSPLGFEVHDEITVTRQVVIGGRNKYLINGVNANNTRVQDLFCSVGLNVNNPHFLIMQGRITKVLNMKPPEILSMIEEAAGTRMYEYKKIAAQKTIEKKEAKLKEIKTILEEEITPTIQKLKEERSSYLEYQKVMREIEHLSRLYIAYQFLLAEDTKVRSAEELKEMQDKVIKLQEELSENDKKIKALNHEIEELEKRKDKETGVILRSLEDALAEAQRVNTKSQSAFDLKKKNLACEESKRKELEKNMVEDSKTLAAKEKEVKKITDGLHALQEASNKDAEALAAAQQHFNAVSAGLSSNEDGAEATLAGQMMACKNDISKAQTEAKQAQMKLKHAQQELKNKQAEVKKMDSGYRKDQEALEAVKRLKEKLEAEMKKLNYEENKEESLLEKRRQLSRDIGRLKETYEALLARFPNLRFAYKDPEKNWNRNCVKGLVASLISVKDTSATTALELVAGERLYNVVVDTEVTGKKLLERGELKRRYTIIPLNKISARCIAPETLRVAQNLVGPDNVHVALSLVEYKPELQKAMEFVFGTTFVCDNMDNAKKVAFDKRIMTRTVTLGGDVFDPHGTLSGGARSQAASILTKFQELKDVQDELRIKENELRALEEELAGLKNTAEKYRQLKQQWEMKTEEADLLQTKLQQSSYHKQQEELDALKKTIEESEETLKNTKEIQRKAEEKYEVLENKMKNAEAERERELKDAQKKLDCAKTKADASSKKMKEKQQEVEAITLELEELKREHTSYKQQLEAVNEAIKSYESQIEVMAAEVAKNKESVNKAQEEVTKQKEVITAQDTVIKLNMQKWQNTRSKTMILSLKIKELDHHISKHKREAEDGAAKVSKMLKDYDWINAERHLFGQPNSAYDFKTNNPKEAGQRLQKLQEMKEKLGRNVNMRAMNVLTEAEERCNDLMKKKRIVENDKSKILTTIEDLDQKKNQALNIAWQKVNKDFGSIFSTLLPGANAMLAPPEGQTVLDGLEFKVALGNTWKENLTELSGGQRQKQQNHTTG

SEQ ID NO: 6687 - protein, 1412 aa, Homo sapiens [sequence omitted]

SEQ ID NO: 6688 - protein, 1371 aa, Homo sapiens
MTTKRSLFVRLVPCRCLRGEEETVTTLDYSHCSLEQVPKEIFTFEKTLEELYLDANQIEELPKQLFNCQSLHKLSLPDNDLTTLPASIANLINLRELDVSKNGIQEFPENIKNCKVLTIVEASVNPISKLPDGFSQLLNLTQLYLNDAFLEFLPANFGRLTKLQILELRENQLKMLPKTMNRLTQLERLDLGSNEFTEVPEVLEQLSGLKEFWMDANRLTFIPGFIGSLKQLTYLDVSKNNIEMVEEGISTCENLQDLLLSSNSLQQLPETIGSLKNITTLKIDENQLMYLPDSIGGLISVEELDCSFNEVEALPSSIGQLTNLRTFAADHNYLQQLPPEIGSWKNITVLFLHSNKLETLPEEMGDMQKLKVINLSDNRLKNLPFSFTKLQQLTAMWLSDNQSKPLIPLQKETDSETQKMVLTNYMFPQQPRTEDVMFISDNESFNPSLWEEQRKQRAQVAFECDEDKDEREAPPREGNLKRYPTPYPDELKNMVKTVQTIVHRLKDEETNEDSGRDLKPHEDQQDINKDVGVKTSESTTTVKSKVDEREKYMIGNSVQKISEPEAEISPGSLPVTANMKASENLKHIVNHDDVFEESEELSSDEEMKMAEMRPPLIETSINQPKVVALSNNKKDDTKETDSLSDEVTHNSNQNNSNCSSPSRMSDSVSLNTDSSQDTSLCSPVKQTHIDINSKIRQEDENFNSLLQNGDILNSSTEEKFKAHDKKDFNLPEYDLNVEERLVLIEKSVDSTATADDTHKLDHINMNLNKLITNDTFQPEIMERSKTQDIVLGTSFLSINSKEETEHLENGNKYPNLESVNKVNGHSEETSQSPNRTEPHDSDCSVDLGISKSTEDLSPQKSGPVGSVVKSHSITNMEIGGLKIYDILSDNGPQQPSTTVKITSAVDGKNIVRSKSATLLYDQPLQVFTGSSSSSDLISGTKAIFKFDSNHNPEEPNIIRGPTSGPQSAPQIYGPPQYNIQYSSSAAVKDTLWHSKQNPQIDHASFPPQLLPRSESTENQSYAKHSANMNFSNHNNVRANTAYHLHQRLGPARHGEMWAISPNDRLIPAVTRSTIQRQSSVSSTASVNLGDPGSTRRAQIPEGDYLSYREFHSAGRTPPMMPGSQRPLSARTYSIDGPNASRPQSARPSINEIPERTMSVSDFNYSRTSPSKRPNARVGSEHSLLDPPGKSKVPRDWREQVLRHIEAKKLEKMPLSNGQMGQPLRPQANYSQIHHPPQASVARHPSREQLIDYLMLKVAHQPPYTQPHCSPRQGHELAKQEIRVRVEKDPELGFSISGGVGGRGNPFRPDDDGIFVTRVQPEGPASKLLQPGDKIIQANGYSFINIEHGQAVSLLKTFQNTVELIIVREVSS

SEQ ID NO: 6689 - protein, 2725 aa, Homo sapiens
MNGHRFTFRTRSLLPLQKGQHRCITKLLAHNDPWGIFRAPSSRRSYSVSGVCQPAIPNSSLHIPHNACWLKWKLCSEIALPYHHILGERRKLCSIRKFEFEDWREDVRSCCQARVLPRGRTLGLWLALIGREEFAMNLLRRSGKRRRSESGSDSFSGSGGDSSASPQFLSGSVLSPPPGLGRCLKAAAAGECKPTVPDYERDKLLLANWGLPKAVLEKYHSFGVKKMFEWQAECLLLGQVLEGKNLVYSAPTSAGKTLVAELLILKRVLEMRKKALFILPFVSVAKEKKYYLQSLFQEVGIKVDGYMGSTSPSRHFSSLDIAVCTIERANGLINRLIEENKMDLLGMVVVDELHMLGDSHRGYLLELLLTKICYITRKSASCQADLASSLSNAVQIVGMSATLPNLELVASWLNAELYHTDFRPVPLLESVKVGNSIYDSSMKLVREFEPMLQVKGDEDHVVSLCYETICDNHSVLLFCPSKKWCEKLADIIAREFYNLHHQAEGLVKPSECPPVILEQKELLEVMDQLRRLPSGLDSVLQKTVPWGVAFHHAGLTFEERDIIEGAFRQGLIRVLAATSTLSSGVNLPARRVIIRTPIFGGRPLDILTYKQMVGRAGRKGVDTVGESILICKNSEKSKGIALLQGSLKPVRSCLQRREGEEVTGSMIRAILEIIVGGVASTSQDMHTYAACTFLAASMKEGKQGIQRNQESVQLGAIEACVMWLLENEFIQSTEASDGTEGKVYHPTHLGSATLSSSLSPADTLDIFADLQRAMKGFVLENDLHILYLVTPMFEDWTTIDWYRFFCLWEKLPTSMKRVAELVGVEEGFLARCVKGKVVARTERQHRQMAIHKRFFTSLVLLDLISEVPLREINQKYGCNRGQIQSLQQSAAVYAGMITVFSNRLGWHNMELLLSQFQKRLTFGIQRELCDLVRVSLLNAQRARVLYASGFHTVADLARANIVEVEVILKNAVPFKSARKAVDEEEEAVEERRNMRTIWVTGRKGLTEREAAALIVEEARMILQQDLVEMGVQWNPCALLHSSTCSLTHSESEVKEHTFISQTKSSYKKLTSKNKSNTIFSDSYIKHSPNIVQDLNKSREHTSSFNCNFQNGNQEHQTCSIFRARKRASLDINKEKPGASQNEGKTSDKKVVQTFSQKTKKAPLNFNSEKMSRSFRSWKRRKHLKRSRDSSPLKDSGACRIHLQGQTLSNPSLCEDPFTLDEKKTEFRNSGPFAKNVSLSGKEKDNKTSFPLQIKQNCSWNITLTNDNFVEHIVTGSQSKNVTCQATSVVSEKGRGVAVEAEKINEVLIQNGSKNQNVYMKHHDIHPINQYLRKQSHEQTSTITKQKNIIERQMPCEAVSSYINRDSNVTINCERIKLNTEENKPSHFQALGDDISRTVIPSEVLPSAGAFSKSEGQHENFLNISRLQEKTGTYTTNKTKNNHVSDLGLVLCDFEDSFYLDTQSEKIIQQMATENAKLGAKDTNLAAGIMQKSLVQQNSMNSFQKECHIPFPAEQHPLGATKIDHLDLKTVGTMKQSSDSHGVDILTPESPIFHSPILLEENGLFLKKNEVSVTDSQLNSFLQGYQTQETVKPVILLIPQKRTPTGVEGECLPVPETSLNMSDSLLFDSFSDDYLVKEQLPDMQMKEPLPSEVTSNHFSDSLCLQEDLIKKSNVNENQDTHQQLTCSNDESIIFSEMDSVQMVEALDNVDIFPVQEKNHTVVSPRALELSDPVLDEHHQGDQDGGDQDERAEKSKLTGTRQNHSFIWSGASFDLSPGLQRILDKVSSPLENEKLKSMTINFSSLNRKNTELNEEQEVISNLETKQVQGISFSSNNEVKSKIEMLENNANHDETSSLLPRKESNIVDDNGLIPPTPIPTSASKLTFPGILETPVNPWKTNNVLQPGESYLFGSPSDIKNHDLSPGSRNGFKDNSPISDTSFSLQLSQDGLQLTPASSSSESLSIIDVASDQNLFQTFIKEWRCKKRFSISLACEKIRSLTSSKTATIGSRFKQASSPQEIPIRDDGFPIKGCDDTLVVGLAVCWGGRDAYYFSLQKEQKHSEISASLVPPSLDPSLTLKDRMWYLQSCLRKESDKECSVVIYDFIQSYKILLLSCGISLEQSYEDPKVACWLLDPDSQEPTLHSIVTSFLPHELPLLEGMETSQGIQSLGLNAGSEHSGRYRASVESILIFNSMNQLNSLLQKENLQDVFRKVEMPSQYCLALLELNGIGFSTAECESQKHIMQAKLDAIETQAYQLAGHSFSFTSSDDIAEVLFLELKLPPNREMKNQGSKKTLGSTRRGIDNGRKLRLGRQFSTSKDVLNKLKALHPLPGLILEWRRITNAITKVVFPLQREKCLNPFLGMERIYPVSQSHTATGRITFTEPNIQNVPRDFEIKMPTLVGESPPSQAVGKGLLPMGRGKYKKGFSVNPRCQAQMEERAADRGMPFSISMRHAFVPFPGGSILAADYSQLELRILAHLSHDRRLIQVLNTGADVFRSIAAEWKMIEPESVGDDLRQQAKQICYGIIYGMGAKSLGEQMGIKENDAACYIDSFKSRYTGINQFMTETVKNCKRDGFVQTILGRRRYLPGIKDNNPYRKAHAERQAINTIVQGSAADIVKIATVNIQKQLETFHSTFKSHGHREGMLQSDQTGLSRKRKLQGMFCPIRGGFFILQLHDELLYEVAEEDVVQVAQIVKNEMESAVKLSVKLKVKVKIGASWGELKDFDV

SEQ ID NO: 6690 - protein, 1740 aa, Homo sapiens
SEANCSWDKVIIDRTDKEAWPSITGTETESASECTTDTDSASNCGSENSSMATGSAQGNFTGHTKKTNGNNGTNGALVQSPSNQSALGAGGANSNGSAARVWGVATGSSSGLAHCSVSGGDGKMDTMIGDGRSQNCWGASNSNAGINLNLNPNANPAAWPVLGHEGTVATGNPSSICSPVSAIGQNMGNQNGNPTGTLGAWGNLLPQESTEPQTSTSQNVSFSAQPQNLNTDGPNNTNPMNSSPNPINAMQTNGLPNWGMAVGMGAIIPPHLQGLPGANGSSVSQVSGGSAEGISNSVWGLSPGNPATGNSNSGFSQGNGDTVNSALSAKQNGSSSAVQKEGSGGNAWDSGPPAGPGILAWGRGSGNNGVGNIHSGAWGHPSRSTSNGVNGEWGKPPNQHSNSDINGKGSTGWESPSVTSQNPTVQPGGEHMNSWAKAASSGTTASEGSSDGSGNHNEGSTGREGTGEGRRRDKGIIDQGHIQLPRNDLDPRVLSNTGWGQTPVKQNTAWEFEESPRSERKNDNGTEAWGCAATQASNSGGKNDGSIMNSTNTSSVSGWVNAPPAAVPANTGWGDSNNKAPSGPGVWGDSISSTAVSTAAAAKSGHAWSGAANQEDKSPTWGEPPKPKSQHWGDGQRSNPAWSAGGGDWADSSSVLGHLGDGKKNGSGWDADSNRSGSGWNDTTRSGNSGWGNSTNTKANPGTNWGETLKPGPQQNWASKPQDNNVSNWGGAASVKQTGTGWIGGPVPVKQKDSSEATGWEEPSPPSIRRKMEIDDGTSAWGDPSNYNNKTVNMWDRNNPVIQSSTTTNTTTTTTTTTSNTTHRVETPPPHQAGTQLNRSPLLGPGRKVSSGWGEMPNVHSKTENSWGEPSSPSTLVDNGTAAWGKPPSSGSGWGDHPAEPPVAFGRAGAPVAASALCKPASKSMQEGWGSGGDEMNLSTSQWEDEEGDVWNNAASQESTSSCSSWGNAPKKGLQKGMKTSGKQDEAWIMSRLIKQLTDMGFPREPAEEALKSNNMNLDQAMSALLEKKVDVDKRGLGVTDHNGMAAKPLGCRPPISKESSVDRPTFLDKDGGLVEEPTPSPFLPSPSLKLPLSHSALPSQALGGIASGLGMQNLNSSRQIPSGNLGMFGNSGAAQARTMQQPPQPPVQPLNSSQPSLRAQVPQFLSPQVQAQLLQFAAKNIGLNPALLTSPINPQHMTMLNQLYQLQLAYQRLQIQQQMLQAQRNVSGSMRQQEQQVARTITNLQQQIQQHQRQLAQALLVKQPPPPPPPPHLSLHPSAGKSAMDSFPSHPQTPGLPDLQTKEQQSSPNTFAPYPLAGLNPNMNVNSMDMTGGLSVKDPSQSQSRLPQWTHPNSMDNLPSAASPLEQNPSKHGAIPGGLSIGPPGKSSIDDSYGRYDLIQNSESPASPPVAVPHSWSRAKSDSDKISNGSSINWPPEFHPGVPWKGLQNIDPENDPDVTPGSVPTGPTINTTIQDVNRYLLKSGGKLSDIKSTWSSGPTSHTQASLSHELWKVPRNSTAPTRPPPGLTNPKPSSTWGASPLGWTSSYSSGSAWSTDTSGRTSSWLVLRNLTPQIDGSTLRTLCLQHGPLITFHLNLTQGNAVVRYSSKEEAAKAQKSLHMCVLGNTTILAEFAGEEEVNRFLAQGQALPPTSSWQSSSASSQPRLSAAGSSHGLVRSDAGHWNAPCLGGKGSSELLWGGVPQYSSSLWGPPSADDSRVIGSPTPLTTLLPGDLLSGESL

SEQ ID NO: 6691 - protein, 1031 aa, Homo sapiens
MKIPNIGNVMNKFEILGVVGEGAYGVVLKCRHKARTHEIVAIKKFKDSEENEEVKETTLRELKMLRTLKQENIVELKEAFRRRGKLYLVFEYVEKNMLELLEEMPNGVPPEKVKSYIYQLIKAIHWCHKNDIVHRDIKPENLLISHNDVLKLCDFGFARNLSEGNNANYTEYVATRWYRSPELLLGAPYGKSVDMWSVGCILGELSDGQPLFPGESEIDQLFTIQKVLGPLPSEQMKLFYSNPRFHGLRFPAVNHPQSLERRYLGILNSVLLDLMKNLLKLDPADRYLTEQCLNHPTFQTQRLLDRSPSRSAKRKPYHVESSTLSNRNQAGKSTALQSHHRSNSKDIQNLSVGLPRADEGLPANESFLNGNLAGASLSPLHTKTYQASSQPGSTSKDLTNNNIPHLLSPKEAKSKTEFDFNIDPKPSEGPGTKYLKSNSRSQQNRHSFMESSQSKAGTLQPNEKQSRHSYIDTIPQSSRSPSYRTKAKSHGALSDSKSVSNLSEARAQIAEPSTSRYFPSSCLDLNSPTSPTPTRHSDTRTLLSPSGRNNRNEGTLDSRRTTTRHSKTMEELKLPEHMDSSHSHSLSAPHESFSYGLGYTSPFSSQQRPHRHSMYVTRDKVRAKGLDGSLSIGQGMAARANSLQLLSPQPGEQLPPEMTVARSSVKETSREGTSSFHTRQKSEGGVYHDPHSDDGTAPKENRHLYNDPVPRRVGSFYRVPSPRPDNSFHENNVSTRVSSLPSESSSGTNHSKRQPAFDPWKSPENISHSEQLKEKEKQGFFRSMKKKKKKSQTVPNSDSPDLLTLQKSIHSASTPSSRPKEWRPEKISDLQTQSQPLKSLRKLLHLSSASNHPASSDPRFQPLTAQQTKNSFSEIRIHPLSQASGGSSNIRQEPAPKGRPALQLPDGGCDGRRQRHHSGPQDRRFMLRTTEQQGEYFCCGDPKKPHTPCVPNRALHRPISSPAPYPVLQVRGTSMCPTLQVRGTDAFSCPTQQSGFSFFVRHVMREALIHRAQVNQAALLTYHENAALTGK

SEQ ID NO: 6692 - protein, 115 aa, Homo sapiens
MPRRRRRRGSSGAGGRGRTCSRTVRAELSFSVSQVERSLREGHYAQRLSRTAPVYLAAVIEYLTAKVLELAGNEAQNSGERNITPLLLDMVVHNDRLLSTLFNTTTISQVAPGED

SEQ ID NO: 6693 - protein, 687 aa, Homo sapiens
MDGGALTDTSLTDSYFSTSFIGVNGFGSPVETKYPLMQRMTNSSSSPSLLNDSAKPYSAHDPLTSPASSLFNDFGALNISQRQKTPNPTASEFIPKGGSTSRLSNVSQSNMSAFSQVFSHPSMGSPATAGLAPGMSLSAGSSPLHSPKITPHTSPAPRRRSHTPNPASYMVPSSASTSVNNPVSQTPSSGQVIQKETVGGTTYFYTDTTPAPLTGMVFPNYHIYPPTAPHVAYMQPKANAPSFFMADELRQELINRHLITMAQIDQADMPAVPTEVDSYHSLFPLEPLPPPNRIQKSSNFGYITSCYKAVNSKDDLPYCLRRIHGFRLVNTKCMVLVDMWKKIQHSNIVTLREVFTTKAFAEPSLVFAYDFHAGGETMMSRHFNDPNADAYFTKRKWGQHEGPLPRQHAGLLPESLIWAYIVQLSSALRTIHTAGLACRVMDPTKILITGKTRLRVNCVGVFDVLTFDNSQNNNPLALMAQYQQADLISLGKVVLALACNSLAGIQRENLQKAMELVTINYSSDLKNLILYLLTDQNRMRSVNDIMPMIGARFYTQLDAAQMRNDVIEEDLAKEVQNGRLFRLLAKLGTINERPEFQKDPTWSETGDRYLLKLFRDHLFHQVTEAGAPWIDLSHIISCLNKLDAGVPEKISLISRDEKSVLVVTYSDLKRCFENTFQELIAAANGQL

SEQ ID NO: 6694 - protein, 1849 aa, Homo sapiens
MAVSRLDRLFILLDTGTTPVTRKAAAQQLGEVVKLHPHELNNLLSKVLIYLRSANWDTRIAAGQAVEAIVKNVPEWNPVPRTRQEPTSESSMEDSPTTERLNFDRFDICRLLQHGASLLGSAGAEFEVQDEKSGEVDPKERIARQRKLLQKKLGLNMGEAIGMSTEELFNDEDLDYTPTSASFVNKQPTLQAAELIDSEFRAGMSNRQKNKAKRMAKLFAKQRSRDAVETNEKSNDSTDGEPEEKRRKIANVVINQSANDSKVLIDNIPDSSSLIEETNEWPLESFCEELCNDLFNPSWEVRHGAGTGLREILKAHGKSGGKMGDSTLEEMIQQHQEWLEDLVIRLLCVFALDRFGDFVSDEVVAPVRETCAQTLGVVLKHMNETGVHKTVDVLLKLLTQEQWEVRHGGLLGIKYALAVRQDVINTLLPKVLTRIIEGLQDLDDDVRAVAAASLVPVVESLVYLQTQKVPFIINTLWDALLELDDLTASTNSIMTLLSSLLTYPQVQQCSIQQSLTVLVPRVWPFLHHTISSVRRAALETLFTLLSTQDQNSSSWLIPILPDMLRHIFQFCVLESSQEILDLIHKVWMELLSKASVQYVVAAACPWMGAWLCLMMQPSHLPIDLNMLLEVKARAKEKTGGKVRQGQSQNKEVLQEYIAGADTIMEDPATRDFVVMRARMMAAKLLGALCCCICDPGVNVVTQEIKPAESLGQLLLFHLNSKSALQRISVALVICEWAALQKECKAVTLAVQPRLLDILSEHLYYDEIAVPFTRMQNECKQLISSLADVHIEVGNRVNNNVLTIDQASDLVTTVFNEATSSFDLNPQVLQQLDSKRQQVQMTVTETNQEWQVLQLRVHTFAACAVVSLQQLPEKLNPIIKPLMETIKKEENTLVQNYAAQCIAKLLQQCTTRTPCPNSKIIKNLCSSLCVDPYLTPCVTCPVPTQSGQENSKGSTSEKDGMHHTVTKHRGIITLYRHQKAAFAITSRRGPTPKAVKAQIADLPAGSSGNILVELDEAQKPYLVQRRGAEFALTTIVKHFGGEMAVKLPHLWDAMVGPLRNTIDINNFDGKSLLDKGDSPAQELVNSLQVFETAAASMDSELHPLLVQHLPHLYMCLQYPSTAVRHMAARCVGVMSKIATMETMNIFLEKVLPWLGAIDDSVKQEGAIEALACVMEQLDVGIVPYIVLLVVPVLGRMSDQTDSVRFMATQCFATLIRLMPLEAGIPDPPNMSAELIQLKAKERHFLEQLLDGKKLENYKIPVPINAELRKYQQDGVNWLAFLNKYKLHGILCDDMGLGKTLQSICILAGDHCHRAQEYARSKLAECMPLPSLVVCPPTLTGHWVDEVGKFCSREYLNPLHYTGPPTERIRLQHQVKRHNLIVASYDVVRNDIDFFRNIKFNYCILDEGHVIKNGKTKLSKAVKQLTANYRIILSGTPIQNNVLELWSLFDFLMPGFLGTERQFAARYGKPILASRDARSSSREQEAGVLAMDALHRQVLPFLLRRMKEDVLQDLPPKIIQDYYCTLSPLQVQLYEDFAKSRAKCDVDETVSSATLSEETEKPKLKATGHVFQALQYLRKLCNHPALVLTPQHPEFKTTAEKLAVQNSSLHDIQHAPKLSALKQLLLDCGLGNGSTSESGTESVVAQHRILIFCQLKSMLDIVEHDLLKPHLPSVTYLRLDGSIPPGQRHSIVSRFNNDPSIDVLLLTTHVGGLGLNLTGADTVVFVEHDWNPMRDLQAMDRAHRIGQKRVVNVYRLITRGTLEEKIMGLQKFKMNIANTVISQENSSLQSMGTDQLLDLFTLDKDGKAEKADTSTSGKASMKSILENLSDLWDQEQYDSEYSLENFMHSLK

SEQ ID NO: 6695 - protein, 625 aa, Homo sapiens
MNVTSIALRAGTWLLAAWHVKVPPMWLEACINWIQEENNNVNLSQAQMNKQVFEQWLLTDLRDLEHPLLPDGILEIPKGELNGFYALQINSLVDVSQPAYSQIQKLRGKNTTNDLVTAEAQVTPKPWEAKPSRMLMLQLTDGIVQIQGMEYQPIPILHSDLPPGTKILIYGNISFRLGVLLLKPENVKVLGGEVDALLEEYAQEKVLARLIGEPDLVVSVIPNNSNENIPRVTDVLDPALGPSDEELLASLDENDELTTNNDTSSERCFTTGSSSNTIPTRQSSFEPEFVISPRPKEEPSNLSIHVMDGELDDFSLEEALLLEETVQKEQMETKELQPLTFNRNADRSIERFSHNPNTTNNFSLTCKNGNNNWSEKNVSEQMTNEDKSFGCPSVRDQNRSIFSVHCNVPLAHDFTNKEKNLETDNKIKQTSSSDSHSLNNKILNREVVNYVQKRSSQISNENDCNLQSCSLRSSENSINLSIAMDLYSPPFVYLSVLMASKPKEVTTVKVKAFIVTLTGNLSSSGGIWSITAKVSDGTAYLDVDFVDEILTSLIGFSVPEMKQSKKDPLQYQKFLEGLQKCQRDLIDLCCLMTISFNPSLSKAMVLALQDVNMEHLENLKKRLNK

SEQ ID NO: 6696 - protein, 1205 aa, Homo sapiens
EAAASLRPAPPASSLAPGSSRRLLPPHGSSRRSPGSLLPQLRLGGGGQLQWCRMADLSLADALTEPSPDIEGEIKRDFIATLEAEAFDDVVGETVGKTDYIPLLDVDEKTGNSESKKKPCSETSQIEDTPSSKPTLLANGGHGVEGSDTTGSPTEFLEEKMAYQEYPNSQNWPEDTNFCFQPEQVVDPIQTDPFKMYHDDDLADLVFPSSATADTSIFAGQNDPLKDSYGMSPCNTAVVPQGWSVEALNSPHSESFVSPEAVAEPPQPTAVPLELAKEIEMASEERPPAQALEIMMGLKTTDMAPSKETEMALAKDMALATKTEVALAKDMESPTKLDVTLAKDMQPSMESDMALVKDMELPTEKEVALVKDVRWPTETDVSSAKNVVLPTETEVAPAKDVTLLKETERASPIKMDLAPSKDMGPPKENKKETERASPIKMDLAPSKDMGPPKENKIVPAKDLVLLSEIEVAQANDIISSTEISSAEKVALSSETEVALARDMTLPPETNVILTKDKALPLEAEVAPVKDMAQLPETEIAPAKDVAPSTVKEVGLLKDMSPLSETEMALGKDVTPPPETEVVLIKNVCLPPEMEVALTEDQVPALKTEAPLAKDGVLTLANNVTPAKDVPPLSETEATPVPIKDMEIAQTQKGISEDSHLESLQDVGQSAAPTFMISPETVTGTGKKCSLPAEEDSVLEKLGERKPCNSQPSELSSETSGIARPEEGRPVVSGTGNDITTPPNKELPPSPEKKTKPLATTQPAKTSTSKAKTQPTSLPKQPAPTTIGGLNKKPMSLASGLVPAAPPKRPAVASARPSILPSKDVKPKPIADAKAPEKRASPSKPASAPASRSGSKSTQTVAKTTTAAAVASTGPSSRSPSTLLPKKPTAIKTEGKPAEVKKMTAKSVPADLSRPKSTSTSSMKKTTTLSGTAPAAGVVPSRVKATPMPSRPSTTPFIDKKPTSAKPSSTTPRLSRLATNTSAPDLKNVRSKVGSTENIKHQPGGGRAKVEKKTEAAATTRKPESNAVTKTAGPIASAQKQPAGKVQIVSKKVSYSHIQSKCGSKDNIKHVPGGGNVQIQNKKVDISKVSSKCGSKANIKHKPGGGDVKIESQKLNFKEKAQAKVGSLDNVGHLPAGGAVKTEGGGSEAPLCPGPPAGEEPAISEAAPEAGAPTSASGLNGHPTLSGGGDQREAQTLDSQIQETSI

SEQ ID NO: 6697 - protein, 1167 aa, Homo sapiens
EAAASLRPAPPASSLAPGSSRRLLPPHGSSRRSPGSLLPQLRLGGGGQLQWCRMADLSLADALTEPSPDIEGEIKRDFIATLEAEAFDDVVGETVGKTDYIPLLDVDEKTGNSESKKKPCSETSQIEDTPSSKPTLLANGGHGVEGSDTTGSPTEFLEEKMAYQEYPNSQNWPEDTNFCFQPEQVVDPIQTDPFKMYHDDDLADLVFPSSATADTSIFAGQNDPLKDSYGMSPCNTAVVPQGWSVEALNSPHSESFVSPEAVAEPPQPTAVPLELAKEIEMASEERPPAQALEIMMGLKTTDMAPSKETEMALAKDMALATKTEVALAKDMESPTKLDVTLAKDMQPSMESDMALVKDMELPTEKEVALVKDVRWPTETDVSSAKNVVLPTETEVAPAKDVTLLKETERASPIKMDLAPSKDMGPPKENKKETERASPIKMDLAPSKDMGPPKENKIVPAKDLVLLSEIEVAQANDIISSTEISSAEKVALSSETEVALARDMTLPPETNVILTKDKALPLEAEVAPVKDMAQLPETEIAPAKDVAPSTVKEVGLLKDMSPLSETEMALGKDVTPPPETEVVLIKNVCLPPEMEVALTEDQVPALKTEAPLAKDGVLTLANNVTPAKDVPPLSETEATPVPIKDMEIAQTQKGISEDSHLESLQDVGQSAAPTFMISPETVTGTGKKCSLPAEEDSVLEKLGERKPCNSQPSELSSETSGIARPEEGRPVVSGTGNDITTPPNKELPPSPEKKTKPLATTQPAKTSTSKAKTQPTSLPKQPAPTTIGGLNKKPMSLASGLVPAAPPKRPAVASARPSILPSKDVKPKPIADAKAPEKRASPSKPASAPASRSGSKSTQTVAKTTTAAAVASTGPSSRSPSTLLPKKPTAIKTEGKPAEVKKMTAKSVPADLSRPKSTSTSSMKKTTTLSGTAPAAGVVPSRVKATPMPSRPSTTPFIDKKPTSAKPSSTTPRLSRLATNTSAPDLKNVRSKVGSTENIKHQPGGGRVQIVSKKVSYSHIQSKCGSKDNIKHVPGGGNVQIQNKKVDISKVSSKCGSKANIKHKPGGGDVKIESQKLNFKEKAQAKVGSLDNVGHLPAGGAVKTEGGGSEAPLCPGPPAGEEPAISEAAPEAGAPTSASGLNGHPTLSGGGDQREAQTLDSQIQETSI

SEQ ID NO: 6698 - protein, 1135 aa, Homo sapiens
EAAASLRPAPPASSLAPGSSRRLLPPHGSSRRSPGSLLPQLRLGGGGQLQWCRMADLSLADALTEPSPDIEGEIKRDFIATLEAEAFDDVVGETVGKTDYIPLLDVDEKTGNSESKKKPCSETSQIEDTPSSKPTLLANGGHGVEGSDTTGSPTEFLEEKMAYQEYPNSQNWPEDTNFCFQPEQVVDPIQTDPFKMYHDDDLADLVFPSSATADTSIFAGQNDPLKDSYGMSPCNTAVVPQGWSVEALNSPHSESFVSPEAVAEPPQPTAVPLELAKEIEMASEERPPAQALEIMMGLKTTDMAPSKETEMALAKDMALATKTEVALAKDMESPTKLDVTLAKDMQPSMESDMALVKDMELPTEKEVALVKDVRWPTETDVSSAKNVVLPTETEVAPAKDVTLLKETERASPIKMDLAPSKDMGPPKENKKETERASPIKMDLAPSKDMGPPKENKIVPAKDLVLLSEIEVAQANDIISSTEISSAEKVALSSETEVALARDMTLPPETNVILTKDKALPLEAEVAPVKDMAQLPETEIAPAKDVAPSTVKEVGLLKDMSPLSETEMALGKDVTPPPETEVVLIKNVCLPPEMEVALTEDQVPALKTEAPLAKDGVLTLANNVTPAKDVPPLSETEATPVPIKDMEIAQTQKGISEDSHLESLQDVGQSAAPTFMISPETVTGTGKKCSLPAEEDSVLEKLGERKPCNSQPSELSSETSGIARPEEGRPVVSGTGNDITTPPNKELPPSPEKKTKPLATTQPAKTSTSKAKTQPTSLPKQPAPTTIGGLNKKPMSLASGLVPAAPPKRPAVASARPSILPSKDVKPKPIADAKAPEKRASPSKPASAPASRSGSKSTQTVAKTTTAAAVASTGPSSRSPSTLLPKKPTAIKTEGKPAEVKKMTAKSVPADLSRPKSTSTSSMKKTTTLSGTAPAAGVVPSRVKATPMPSRPSTTPFIDKKPTSAKPSSTTPRLSRLATNTSAPDLKNVRSKVGSTENIKHQPGGGRVQIQNKKVDISKVSSKCGSKANIKHKPGGGDVKIESQKLNFKEKAQAKVGSLDNVGHLPAGGAVKTEGGGSEAPLCPGPPAGEEPAISEAAPEAGAPTSASGLNGHPTLSGGGDQREAQTLDSQIQETN

SEQ ID NO: 6699 - protein, 187 aa, Homo sapiens
PSSTTPRLSRLATNTSAPDLKNVRSKVQIVSKKVSYSHIQSKCGSKDNIKHVPGGGNVQIQNKKVDISKVSSKCGSKANIKHKPGGGDVKIESQKLNFKEKAQAKVGSLDNVGHLPAGGAVKTEGGGSEAPLCPGPPAGEEPAISEAAPEAGAPTSASGLNGHPTLSGGGDQREAQTLDSQIQETSI

SEQ ID NO: 6700 - protein, 979 aa, Homo sapiens
MADLSLADALTEPSPDIEGEIKRDFIATLEAEAFDDVVGETVGKTDYIPLLDVDEKTGNSESKKKPCSETSQIEDTPSSKPTLLANGGHGVEGSDTTGSPTEFLEEKMAYQEYPNSQNWPEDTNFCFQPEQVVDPIQTDPFKMYHDDDLADLVFPSSATADTSIFAGQNDPLKDSYGMSPCNTAVVPQGWSVEALNSPHSESFVSPEAVAEPPQPTAVPLELAKEIEMASEERPPAQALEIMMGLKTTDMAPSKETEMALAKDMALATKTEVALAKDMESPTKLDVTLAKDMQPSMESDMALVKDMELPTEKEVALVKDVRWPTETDVSSAKNVVLPTETEVAPAKDVTLLKETERASPIKMDLAPSKDMGPPKENKKETERASPIKMDLAPSKDMGPPKENKIVPAKDLVLLSEIEVAQANDIISSTEISSAEKVALSSETEVALARDMTLPPETNVILTKDKALPLEAEVAPVKDMAQLPETEIAPAKDVAPSTVKEVGLLKDMSPLSETEMALGKDVTPPPETEVVLIKNVCLPPEMEVALTEDQVPALKTEAPTTIGGLNKKPMSLASGLVPAAPPKRPAVASARPSILPSKDVKPKPIADAKAPEKRASPSKPASAPASRSGSKSTQTVAKTTTAAAVASTGPSSRSPSTLLPKKPTAIKTEGKPAEVKKMTAKSVPADLSRPKSTSTSSMKKTTTLSGTAPAAGVVPSRVKATPMPSRPSTTPFIDKKPTSAKPSSTTPRLSRLATNTSAPDLKNVRSKVGSTENIKHQPGGGRAKVEKKTEAAATTRKPESNAVTKTAGPIASAQKQPAGKVQIVSKKVSYSHIQSKCGSKDNIKHVPGGGNVQIQNKKVDISKVSSKCGSKANIKHKPGGGDVKIESQKLNFKEKAQAKVGSLDNVGHLPAGGAVKTEGGGSEAPLCPGPPAGEEPAISEAAPEAGAPTSASGLNGHPTLSGGGDQREAQTLDSQIQETSI

SEQ ID NO: 6701 - protein, 1041 aa, Homo sapiens
MADLSLADALTEPSPDIEGEIKRDFIATLEAEAFDDVVGETVGKTDYIPLLDVDEKTGNSESKKKPCSETSQIEDTPSSKPTLLANGGHGVEGSDTTGSPTEFLEEKMAYQEYPNSQNWPEDTNFCFQPEQVVDPIQTDPFKMYHDDDLADLVFPSSATADTSIFAGQNDPLKDSYVPLELAKEIEMASEERPPAQALEIMMGLKTTDMAPSKETEMALAKDMALATKTEVALAKDMESPTKLDVTLAKDMQPSMESDMALVKDMELPTEKEVALVKDVRWPTETDVSSAKNVVLPTETEVAPAKDVTLLKETERASPIKMDLAPSKDMGPPKENKKETERASPIKMDLAPSKDMGPPKENKIVPAKDLVLLSEIEVAQANDIISSTEISSAEKVALSSETEVALARDMTLPPETNVILTKDKALPLEAEVAPVKDMAQLPETEIAPAKDVAPSTVKEVGLLKDMSPLSETEMALGKDVTPPPETEVVLIKNVCLPPEMEVALTEDQVPALKTEAPLAKDGVLTLANNVTPAKDVPPLSETEATPVPIKDMEIAQTQKGISEDSHLESLQDVGQSAAPTFMISPETITGTGKKCSLPAEEDSVLEKLGERKPCNSQPSELSSETSGIARPEEGRPVVSGTGNDITTPPNKELPPSPEKKTKPLATTQPAKTSTSKAKTQPTSLPKQPAPTTIGGLNKKPMSLASGLVPAAPPKRPAVASARPSILPSKDVKPKPIADAKAPEKRASPSKPASAPASRSGSKSTQTVAKTTTAAAVASTGPSSRSPSTLLPKKPTAIKTEGKPAEVKKMTAKSVPADLSRPKSTSTSSMKKTTTLSGTAPAAGVVPSRVKATPMPSRPSTTPFIDKKPTSAKPSSTTPRLSRLATNTSAPDLKNVRSKVGSTENIKHQPGGGRVQIQNKKVDISKVSSKCGSKANIKHKPGGGDVKIESQKLNFKEKAQAKVGSLDNVGHLPAGGAVKTEGGGSEAPLCPGPPAGEEPAISEAAPEAGAPTSASGLNGHPTLSGGGDQREAQTLDSQIQETN

SEQ ID NO: 6702 - protein, 859 aa, Homo sapiens
PSELINKSSPLEVLESAACEKLPTPTPQVVKEGDSFPDTLAKNGQEIAPAQISKSLMVDNYTKDGVPGQERPKGPSAVVPSTSTGGVALPITTAIETVNIHGDHSLKNKAELADSMKNEAGIDEGHVIGESESVHSGASKHSVEKVTELAKGHLLPGVPVEDQSLPGEARALEGYADRGNFPAHPVNEEKETKEGSVAVQIPDLLEDKAQKLSFCEDQNAQDRNSKGSDSLNKKVDLTLLSPKSENDKLKEISLACKITELESVSLPTPEIQSDFLHSKVEAPPSEVADTLVIMTASKGVRLPEPKDKILETPQKMTEKSESKTPGEGKKEDKSRMAEPMKGYMRPTKSRGLTPLLPKSTIQEQERHKQLKSAGIARPEEGRPVVSGTGNDITTPPNKELPPSPEKKTKPLATTQPAKTSTSKAKTQPTSLPKQPAPTTIGGLNKKPMSLASGLVPAAPPKRPAVASARPSILPSKDVKPKPIADAKAPEKRASPSKPASAPASRSGSKSTQTVAKTTTAAAVASTGPSSRSPSTLLPKKPTAIKTEGKPAEVKKMTAKSVPADLSRPKSTSTSSMKKTTTLSGTAPAAGVVPSRVKATPMPSRPSTTPFIDKKPTSAKPSSTTPRLSRLATNTSAPDLKNVRSKVGSTENIKHQPGGGRAKVEKKTEAAATTRKPESNAVTKTAGPIASAQKQPAGKVQIVSKKVSYSHIQSKCGSKDNIKHVPGGGNVQIQNKKVDISKVSSKCGSKANIKHKPGGGDVKIESQKLNFKEKAQAKVGSLDNVGHLPAGGAVKTEGGGSEAPLCPGPPAGEEPAISEAAPEAGAPTSASGLNGHPTLSGGGDQREAQTLDSQIQETSI

SEQ ID NO: 6703 - protein, 520 aa, Homo sapiens
MALSSRARAFSVEALVGRPSKRKLQDPIQAEQPELREKKGGEEEEERRSSAAGKSEPLEKQPKTEPSTSASSGCGSDSGYGNSSESLEEKDIQMELQGSELWKRFHDIGTEMIITKAGRRMFPSVRVKVKGLDPGKQYHVAIDVVPVDSKRYRYVYHSSQWMVAGNTDHLCIIPRFYVHPDSPCSGETWMRQIISFDRMKLTNNEMDDKGHIILQSMHKYKPRVHVIEQGSSVDLSQIQSLPTEGVKTFSFKETEFTTVTAYQNQQITKLKIERNPFAKGFRDTGRNRGVLDGLLETYPWRPSFTLDFKTFGADTQSGSSGSSPVTSSGGAPSPLNSLLSPLCFSPMFHLPTSSLGMPCPEAYLPNVNLPLCYKICPTNFWQQQPLVLPAPERLASSNSSQSLAPLMMEVPMLSSLGVTNSKSGSSEDSSDQYLQAPNSTNQMLYGLQSPGNIFLPNSITPEALSCSFHPSYDFYRYNFSMPSRLISGSNHLKVNDDSQVSFGEGKCNHVHWYPAINHYL

SEQ ID NO: 6704 - protein, 202 aa, Homo sapiens [sequence omitted]

SEQ ID NO: 6705 - protein, 821 aa, Homo sapiens
MEVRGSFLAACRRRMATWRKNRDKDGFSNPGYRVRQKDLGMIHKAAIAGDVNKVMESILLRLNDLNDRDKKNRTALLLACAHGRPGVVADLVARKCQLNLTDSENRTALIKAVQCQEEVCASILLEHGANPNVRDMYGNTALHYAIDNENISMARKLLAYGADIEARSQDGHTSLLLAVNRKKEQMVAFLLKKKPDLTAIDNFGRTALILAARNGSTSVVYQLLQHNIDVFCQDISGWTAEDYAVASKFQALARKTSNEKSKVKSQIYFTDDLNDISGSSEKTSEDDELPYSDDENFMLLIEQSGMECKDFVSLSKSKNATAACGRSIEDQKCYCERLKVKFQKMKNNISVLQKAFKISIFNYRFILQQQEEERIKAEELYEKDIEELKIMEEQYRTQTEVKKQSKLTLKSLEVELKTVRSNSNQNFHTHERERDLWQENHLMRDEIARLRLEIDTIKHQNQETENKYFKDIEIIKENNEDLEKTLKRNEEALTKTITRYSKELNVLMDENTMLNSELQKEKQSMSRLETEMESYRCRLAAALCDHDQRQSSKRDLQLAFQSTVNEWCHLQEDTNSHIQILSQQLSKAESTSSGLETELHYEREALKEKTLHIEHMQGVLSRTQRRLEDIEHMYQNDQPILEKYVRKQQSVEDGLFQLQSQNLLYQQQCNDARKKADNQEKTIINIQVKCEDTVEKLQAECRKLEENNKGLMKECTLLKERQCQYEKEKEEREVVRRQLQREVDDALNKQLLLEAMLEISSERRINLEDEAQSLKKKLGQMRSQLQEMQNQRTEILRRAEELPDHMQKYSLKQHTKYLEYL

SEQ ID NO: 6706 - protein, 966 aa, Homo sapiens
EDGCLEIRQFSSCSPRFNKVYSSMERLSLLEERRTPPPTKRSLSEEKEDHSDGLAGLKGRDRSWVIGSPEILRKRLSVSESSHTESDSSPPMTVRRRCSGLLDAPRFPEGPEEASSTLRRQPQEGIWVLTPPSGEGVSGPVTEHSGEQRPKLDEEAVGRSSGSSPAMETRGRGTSQLAEGATAKAISDLAVRRARHRLLSGDSTEKRTARPVNKVIKSASATALSLLIPSEHHTCSPLASPMSPHSQSSNPSSRDSSPSRDFLPALGSMRPPIIIHRAGKKYGFTLRAIRVYMGDSDVYTVHHMVWHVEDGGPASEAGLRQGDLITHVNGEPVHGLVHTEVVELILKSGNKVAISTTPLENTSIKVGPARKGSYKAKMARRSKRSRGKDGQESRKRSSLFRKITKQASLLHTSRSLSSLNRSLSSGESGPGSPTHSHSLSPRSPTQGYRVTPDAVHSVGGNSSQSSSPSSSVPSSPAGSGHTRPSSLHGLAPKLQRQYRSPRRKSAGSIPLSPLAHTPSPPPPTASPQRSPSPLSGHVAQAFPTKLHLSPPLGRQLSRPKSAEPPRSPLLKRVQSAEKLAAALAASEKKLATSRKHSLDLPHSELKKELPPREVSPLEVVGARSVLSGKGALPGKGVLQPAPSRALGTLRQDRAERRESLQKQEAIREVDSSEDDTEEGPENSQGAQELSLAPHPEVSQSVAPKGAGESGEEDPFPSRDPRSLGPMVPSLLTGITLGPPRMESPSGPHRRLGSPQAIEEAASSSSAGPNLGQSGATDPIPPEGCWKAQHLHTQALTALSPSTSGLTPTSSCSPPSSTSGKLSMWSWKSLIEGPDRASPSRKATMAGGLANLQDLENTTPAQPKNLSPREQGKTQPPSAPRLAHPSYEDPSQGWLWESECAQAVKEDPALSITQVPDASGDRRQDVPCRGCPLTQKSEPSLRRGQEPGGHQKHRDLALVPDELLKQT

SEQ ID NO: 6707 - protein, 1530 aa, Homo sapiens
MPIRPDLQQLEKCIDDALRKNDFKPLKTLLQIDICEDVKIKCSKQFFHKVDNLICRELNKEDIHNVSAILVSVGRCGKNISVLGQAGLLTMIKQGLIQKMVAWFEKSKDIIQSQGNSKDEAVLNMIEDLVDLLLVIHDVSDEGKKQVVESFVPRICSLVIDSRVNICIQQEIIKKMNAMLDKMPQDARKILSNQEMLILMSSMGERILDAGDYDLQVGIVEALCRMTTEKQRQELAHQWFSMDFIAKAFKRIKDSEFETDCRIFLNLVNGMLGDKRRVFTFPCLSAFLDKYELQIPSDEKLEEFWIDFNLGSQTLSFYIAGDNDDHQWEAVTVPEEKVQIYSIEVRESKKLLTIILKNTVKISKREGKELLLYFDASLEITNVTQKIFGATKHRESIRKQGISVAKTSLHILFDASGSQILVPESQISPVGEELVSLKEKSKSPKEFAKPSKYIKNSDKGNRNNSQLEKTTPSKRKMSEASMIVSGADRYTMRSPVLFSNTSIPPRRRRIKPPLQMTSSAEKPSVSQTSENRVDNAASLKSRSSEGRHRRDNIDKHIKTAKCVENTENKNVEFPNQNFSELQDVIPDSQAAEKRDHTILPGVLDNICGNKIHSKWACWTPVTNIELCNNQRASTSSGDTLNQDIVINKKLTKQKSSSSISDHNSEGTGKVKYKKEQTDHIKIDKAEVEVCKKHNQQQNHPKYSGQKNTENAKQSDWPVESETTFKSVLLNKTIEESLIYRKKYILSKDVNTATCDKNPSASKNVQSHRKAEKELTSELNSWDSKQKKMREKSKGKEFTNVAESLISQINKRYKTKDDIKSTRKLKESLINSGFSNKPVVQLSKEKVQKKSYRKLKTTFVNVTSECPVNDVYNFNLNGADDPIIKLGIQEFQATAKEACADRSIRLVGPRNHDELKSSVKTKDKKIITNHQKKNLFSDTETEYRCDDSKTDISWLREPKSKPQLIDYSRNKNVKNHKSGKSRSSLEKGQPSSKMTPSKNITKKMDKTIPEGRIRLPRKATKTKKNYKDLSNSESECEQEFSHSFKENIPVKEENIHSRMKTVKLPKKQQKVFCAETEKELSKQWKNSSLLKDAIRDNCLDLSPRSLSGSPSSIEVTRCIEKITEKDFTQDYDCITKSISPYPKTSSLESLNSNSGVGGTIKSPKNNEKNFLCASESCSPIPRPLFLPRHTPTKSNTIVNRKKISSLVLTQETQNSNSYSDVSSYSSEERFMEIESPHINENYIQSKREESHLASSLSKSSEGREKTWFDMPCDATHVSGPTQHLSRKRIYIEDNLSNSNEVEMEEKGERRANLLPKKLCKIEDADHHIHKMSESVSSLSTNDFSIPWETWQNEFAGIEMTYETYERLNSEFKRRNNIRHKMLSYFTTQSWKTAQQHLRTMNHQSQDSRIKKLDKFQFIIIEELENFEKDSQSLKDLEKEFVDFWEKIFQKFSAYQKSEQQRLHLLKTSLAKSVFCNTDSEETVFTSEMCLMKEDMKVLQDRLLKDMLEEELLNVRRELMSVFMSHERNANV

SEQ ID NO: 6708 - protein, 574 aa, Homo sapiens
MGNNFSSIPSLPRGNPSRAPRGHPQNLKDSIGGPFPVTSHRCHHKQKHCPAVLPSGGLPATPLLFHPHTKGSQILMDLSHKAVKRQASFCNAITFSNRPVLIYEQVRLKITKKQCCWSGALRLGFTSKDPSRIHPDSLPKYACPDLVSQSGFWAKALPEEFANEGNIIAFWVDKKGRVFHRINDSAVMLFFSGVRTADPLWALVDVYGLTRGVQLLDSELVLPDCLRPRSFTALRRPSLRREADDARLSVSLCDLNVPGADGDEAAPAAGCPIPQNSLNSQHSRALPAQLDGDLRFHALRAGAHVRILDEQTVARVEHGRDERALVFTSRPVRVAETIFVKVTRSGGARPGALSFGVTTCDPGTLRPADLPFSPEALVDRKEFWAVCRVPGPLHSGDILGLVVNADGELHLSHNGAAAGMQLCVDASQPLWMLFGLHGTITQIRILGSTILAERGIPSLPCSPASTPTSPSALGSRLSDPLLSTCSSGPLGSSAGGTAPNSPVSLPESPVTPGLGQWSDECTICYEHAVDTVIYTCGHMCLCYACGLRLKKALHACCPICRRPIKDIIKTYRSS

SEQ ID NO: 6709 - protein, 311 aa, Homo sapiens
MADVINVSVNLEAFSQAISAIQALRSSVSRVFDCLKDGMRNKETLEGREKAFIAHFQDNLHSVNRDLNELERLSNLVGKPSENHPLHNSGLLSLDPVQDKTPLYSQLLQAYKWSNKLQYHAGLASGLLNQQSLKRSANQMGVSAKRRPKAQPTTLVLPPQYVDDVISRIDRMFPEMSIHLSRPNGTSAMLLVTLGKVLKVIVVMRSLFIDRTIVKGYNENVYTEDGKLDIWSKSNYQVFQKVTDHATTALLHYQLPQMPDVVVRSFMTWLRSYIKLFQAPCQRCGKFLQDGLPPTWRDFRTLEAFHDTCRQ

SEQ ID NO: 6710 - protein, 1677 aa, Homo sapiens
MTFVKGHLPRVRHKGSAGAEIREGRCGEAPLDCEQAQVRGQGQTGPASTKMSATSWFLVSSSGARHRLPRELIFVGREECELMLQCPCAQCKPGTELVPSEQALNDAGTWTQAGLPAVAVTPVVAQAVVQETTAWAGPDLLCPVHRAGLLRVPVAANGELGVDKQHAVINYDQDRDEHWVKDLGSLNGTFVNDMRIPDQKYVTLKLNDVIRFGYDSNMYVLERVQHRVPEEALKHEKYTSQLQVSVKGLAPKRSEALPEHTPYCEASNPRPEKGDRRPGTEAASYRTPLYGQPSWWGEDDGSTLPDAQRQGEPYPERPKGPVQQDGELHGFRAPAEPQGCSFRREPSYFEIPTKETPQPSQPPEVPAHEMPTKDAEAGGGGAAPVVQSHASFTIEFDDCSPGKMKIKDHITKFSLRQRRPPGKEATPGEMVSAETKVADWLVQNDPSLLHRVGPGDDRHSTKSDLPVHTRTLKGHKHEDGTQSDSEDPLAKAASAAGVPLEASGEQVRLQRQIKRDPQELLHNQQAFVIEFFDEDTPRKKRSQSFTHSPSGDPKADKRRGPTPADRDRPSVPAPVQAGGRSSGPQRAGSLKREKTEERLGSPSPASRTPARPFGSVGRRSRLAQDFMAQCLRESSPAARPSPEKVPPVLPAPLTPHGTSPVGPPTPPPAPTDPQLTKARKQEEDDSLSDAGTYTIETEAQDTEVEEARKMIDQVFGVLESPELSRASSATFRPVIRGDRDESDDGGVAQRMALLQEFASRPLGAAPQAEHQGLPVPGSPGGQKWVSRWASLADSYSDPGLTEDGLGRRGGEPEGSLPVRMRRRLPQLPSERADSPAGPESSRRSGPGPPELDSEQPSRLFGQEELDPDSLSDASGSDGGRGPEPGVEPQDSRRRSPQEGPTWSRGRRSPRAPGEPTPASFFIGDQNGDAVLSRKPLAAPGDGEGLGQTAQPSPPARDGVYVSANGRMVIQLRPGRSPEPDGPAPAFLRQESFTKEPASGPPAPGKPPHISSHPLLQDLAATRAARMDFHSQDTHLILKETETALAALEARLLSNSVDAECEGGSTPRPPEDALSGDSDVDTASTVSLRSGKSGPSPTTPQPLRAQKEMSPSPPAAQDPGGTALVSAREQSSERQHHPLGPTDMGRGEPVRRSAIRRGHRPRGSLDWPSEERGPVLAHLPSSDVMASNHETPEATGAGRLGSRRKPAAPPPSPAAREEQSRSSASSQKGPQALTRSNSLSTPRPTRASRLRRARLGDASDTEAADGERGSLGNPEPVGRPAAEQAKKLSRLDILAMPRKRAGSFTGTSDPEAAPARTSFSGRSVELCCASRKPTMAEARAVSRKAANTATTTGPRQPFSRARSGSARYTSTTQTPRAGSSSRARSRAPGPRDTDDDEEEPDPYGFIVQTAEIAEIARLSQTLVKDVAILAQEIHDVAGDGDTLGSSEPAHSASLSNMPSTPASTISAREELVQRIPEASLNFQKVPPGSLNSRDFDQNMNDSCEDALANKTRPRNREEVIFDNLMLNPVSQLSQAIRENTEHLAEKMKILFQNTGRAWEDLEARINAENEVPILKTSNKEISSILKELRRVQKQLEVINAIVDPSGSLDLLTGNRSLASSAQPGLGKGRVAAQSPPSPASAEALLPALPLRNFPQRASCGPPSLPDPTFLPDAERFLI

SEQ ID NO: 6711 - protein, 586 aa, Homo sapiens
MAASGVEKSSKKKTEKKLAAREEAKLLAGFMGVMNNMRKQKTLCDVILMVQERKIPAHRVVLAAASHFFNLMFTTNMLESKSFEVELKDAEPDIIEQLVEFAYTARISVNSNNVQSLLDAANQYQIEPVKKMCVDFLKEQVDASNCLGISVLAECLDCPELKATADDFIHQHFTEVYKTDEFLQLDVKRVTHLLNQDTLTVRAEDQVYDAAVRWLKYDEPNRQPFMVDILAKVRFPLISKNFLSKTVQAEPLIQDNPECLKMVISGMRYHLLSPEDREELVDGTRPRRKKHDYRIALFGGSQPQSCRYFNPKDYSWTDIRCPFEKRRDAACVFWDNVVYILGGSQLFPIKRMDCYNVVKDSWYSKLGPPTPRDSLAACAAEGKIYTSGGSEVGNSALYLFECYDTRTESWHTKPSMLTQRCSHGMVEANGLIYVCGGSLGNNVSGRVLNSCEVYDPATETWTELCPMIEARKNHGLVFVKDKIFAVGGQNGLGGLDNVEYYDIKLNEWKMVSPMPWKGVTVKCAAVGSIVYVLAGFQGVGRLGHILEYNTETDKWVANSKVRAFPVTSCLICVVDTCGANEETLET

SEQ ID NO: 6712 - protein, 586 aa, Homo sapiens
MAASGVEKSSKKKTEKKLAAREEAKLLAGFMGVMNNMRKQKTLCDVILMVQERKIPAHRVVLAAASHFFNLMFTTNMLESKSFELELKDAEPDIIEQLVEFAYTARISVNSNNVQSLLDAANQYQIEPVKKMCVDFLKEQVDASNCLGISVLAECLDCPELKATADDFIHQHFTEVYKTDEFLQLDVKRVTHLLNQDTLTVRAEDQVYDAAVRWLKYDEPNRQPFMVDILAKVRFPLISKNFLSKTVQAEPLIQDNPECLKMVISGMRYHLLSPEDREELVDGTRPRRKKHDYRIALFGGSQPQSCRYFNPKDYSWTDIRCPFEKRRDAACVFWDNVVYILGGSQLFPIKRMDCYNVVKDSWYSKLGPPTPRDSLAACAAEGKIYTSGGSEVGNSALYLFECYDTRTESWHTKPSMLTQRCSHGMVEANGLIYVCGGSLGNNVSGRVLNSCEVYDPATETWTELCPMIEARKNHGLVFVKDKIFAVGGQNGLGGLDNVEYYDIKLNEWKMVSPMPWKGVTVKCAAVGSIVYVLAGFQGVGRLGHILEYNTETDKWVANSKVRAFPVTSCLICVVDTCGANEETLET

SEQ ID NO: 6713 - protein, 564 aa, Homo sapiens
MLGGTDCRTFLTSHINLKKTLCDVILMVQERKIPAHRVVLAAASHFFNLMFTTNMLESKSFEVELKDAEPDIIEQLVEFAYTARISVNSNNVQSLLDAANQYQIEPVKKMCVDFLREQVDASNCLGISVLAECLDCPELKATADDFIHQHFTEVYKTDEFLQLDVKRVTHLLNQDTLTVRAEDQVYDAAVRWLKYDEPNRQPFMVDILAKVRFPLISKNFLSKTVQAEPLIQDNPECLKMVISGMRYHLLSPEDREELVDGTRPRRKKHDYRIALFGGSQPQSCRYFNPKDYSWTDIRCPFEKRRDAACVFWDNVVYILGGSQLFPIKRMDCYNVVKDSWYSKLGPPTPRDSLAACAAEGKIYTSGGSEVGNSALYLFECYDTRTESWHTKPSMLTQRCSHGMVEANGLIYVCGGSLGNNVSGRVLNSCEVYDPATETWTELCPMIEARKNHGLVFVKDKIFAVGGQNGLGGLDNVEYYDIKLNEWKMVSPMPWKGVTVKCAAVGSIVYVLAGFQGVGRLGHILEYNTETDKWVANSKVRAFPVTSCLICVVDTCGANEETLET

SEQ ID NO: 6714 - protein, 257 aa, Homo sapiens
MRIPVDASTSRRFTPPSTALSPGKMSEALPLGAPDAGAALAGKLRSGDRSMVEVLADHPGELVRTDSPNFLCSVLPTHWRCNKTLPIAFKVVALGDVPDGTLVTVMAGNDENYSAELRNATAAMKNQVARFNDLRFVGRSGRGKSFTLTITVFTNPPQVATYHRAIKITVDGPREPRRHRQKLDDQTKPGSLSFSERLSELEQLRRTAMRVSPHHPAPTPNPRASLNHSTAFNPQPQSQMQDTRQIQPSPPWSYDQS

SEQ ID NO: 6715 - protein, 453 aa, Homo sapiens [sequence omitted]

SEQ ID NO: 6716 - protein, 242 aa, Homo sapiens
MRIPVDASTSRRFTPPSTALSPGKMSEALPLGAPDAGAALAGKLRSGDRSMVEVLADHPGELVRTDSPNFLCSVLPTHWRCNKTLPIAFKVVALGDVPDGTLVTVMAGNDENYSAELRNATAAMKNQVARFNDLRFVDGPREPRRHRQKLDDQTKPGSLSFSERLSELEQLRRTAMRVSPHHPAPTPNPRASLNHSTAFNPQPQSQMQDTRQIQPSPPWSYDQSYQYLGSIASPSVHPATPI

SEQ ID NO: 6717 - protein, 480 aa, Homo sapiens
MASDSIFESFPSYPQCFMRECILGMNPSRDVHDASTSRRFTPPSTALSPGKMSEALPLGAPDAGAALAGKLRSGDRSMVEVLADHPGELVRTDSPNFLCSVLPTHWRCNKTLPIAFKVVALGDVPDGTLVTVMAGNDENYSAELRNATAAMKNQVARFNDLRFVGRSGRGKSFTLTITVFTNPPQVATYHRAIKITVDGPREPRRHRQKLDDQTKPGSLSFSERLSELEQLRRTAMRVSPHHPAPTPNPRASLNHSTAFNPQPQSQMQDTRQIQPSPPWSYDQSYQYLGSIASPSVHPATPISPGRASGMTTLSAELSSRLSTAPDLTAFSDPRQFPALPSISDPRMHYPGAFTYSPTPVTSGIGIGMSAMGSATRYHTYLPPPYPGSSQAQGGPFQASSPSYHLYYGASAGSYQFSMVGGERSPPRILPPCTNASTGFALLNPSLPNQSDVVEAEGSHSNSPTNMAPSARLEEAVWRPY

SEQ ID NO: 6718 - protein, 472 aa, Homo sapiens
MRIPVDASTSRRFTPPSTALSPGKMSEALPLGAPDAGAALAGKLRSGDRSMVEVLADHPGELVRTDSPNFLCSVLPTHWRCNKTLPIAFKVVALGDVPDGTLVTVMAGNDENYSAELRNATAAMKNQVARFNDLRFVGRSGRGKSFTLTITVFTNPPQVATYHRAIKITVDGPREPRRHRQKLDDQTKPGSLSFSERLSELEQLRRTAMRVSPHHPAPTPNPRASLNHSTAFNPQPQSQMQDTRQIQPSPPWSYDQSYQYLGSIASPSVHPATPISPGRASGMTTLSAELSSRLSTAPDLTAFSDPRQFPALPSISDPRMHYPGAFTYSPTPVTSGIGIGMSAMGSATRYHTYLPPPYPGSSQAQGGPFQASSPSYHLYYGASAGSYQFSMVGGERSPPRILPPCTNASTGFALLNPSLPNQSDVVEAEGSHSNSPTNMGGASCSRQARRDPGPWARTPSWGRGRPTDRISL

SEQ ID NO: 6719 - protein, 348 aa, Homo sapiens
MAGNDENYSAELRNATAAMKNQVARFNDLRFVGRSGRGKSFTLTITVFTNPPQVATYHRAIKITVDGPREPRRHRQKLDDQTKPGSLSFSERLSELEQLRRTAMRVSPHHPAPTPNPRASLNHSTAFNPQPQSQMQDTRQIQPSPPWSYDQSYQYLGSIASPSVHPATPISPGRASGMTTLSAELSSRLSTAPDLTAFSDPRQFPALPSISDPRMHYPGAFTYSPTPVTSGIGIGMSAMGSATRYHTYLPPPYPGSSQAQGGPFQASSPSYHLYYGASAGSYQFSMVGGERSPPRILPPCTNASTGFALLNPSLPNQSDVVEAEGSHSNSPTNMAPSARLEEAVWRPY

SEQ ID NO: 6720 - protein, 468 aa, Homo sapiens
MPAAPRGPAQGEAAARTRSRDASTSRRFTPPSTALSPGKMSEALPLGAPDAGAALAGKLRSGDRSMVEVLADHPGELVRTDSPNFLCSVLPTHWRCNKTLPIAFKVVALGDVPDGTLVTVMAGNDENYSAELRNATAAMKNQVARFNDLRFVGRSGRGKSFTLTITVFTNPPQVATYHRAIKITVDGPREPRRHRQKLDDQTKPGSLSFSERLSELEQLRRTAMRVSPHHPAPTPNPRASLNHSTAFNPQPQSQMQDTRQIQPSPPWSYDQSYQYLGSIASPSVHPATPISPGRASGMTTLSAELSSRLSTAPDLTAFSDPRQFPALPSISDPRMHYPGAFTYSPTPVTSGIGIGMSAMGSATRYHTYLPPPYPGSSQAQGGPFQASSPSYHLYYGASAGSYQFSMVGGERSPPRILPPCTNASTGFALLNPSLPNQSDVVEAEGSHSNSPTNMAPSARLEEAVWRPY

SEQ ID NO: 6721 - protein, 456 aa, Homo sapiens
MNPSRDVHDASTSRRFTPPSTALSPGKMSEALPLGAPDAGAALAGKLRSGDRSMVEVLADHPGELVRTDSPNFLCSVLPTHWRCNKTLPIAFKVVALGDVPDGTLVTVMAGNDENYSAELRNATAAMKNQVARFNDLRFVGRSGRGKSFTLTITVFTNPPQVATYHRAIKITVDGPREPRRHRQKLDDQTKPGSLSFSERLSELEQLRRTAMRVSPHHPAPTPNPRASLNHSTAFNPQPQSQMQDTRQIQPSPPWSYDQSYQYLGSIASPSVHPATPISPGRASGMTTLSAELSSRLSTAPDLTAFSDPRQFPALPSISDPRMHYPGAFTYSPTPVTSGIGIGMSAMGSATRYHTYLPPPYPGSSQAQGGPFQASSPSYHLYYGASAGSYQFSMVGGERSPPRILPPCTNASTGFALLNPSLPNQSDVVEAEGSHSNSPTNMAPSARLEEAVWRPY

SEQ ID NO: 6722 - protein, 250 aa, Homo sapiens
MRIPVDASTSRRFTPPSTALSPGKMSEALPLGAPDAGAALAGKLRSGDRSMVEVLADHPGELVRTDSPNFLCSVLPTHWRCNKTLPIAFKVVALGDVPDGTLVTVMAGNDENYSAELRNATAAMKNQVARFNDLRFVGRSGRGKSFTLTITVFTNPPQVATYHRAIKITVDGPREPRRHRQKLDDQTKPGSLSFSERLSELEQLRRTAMRVSPHHPAPTPNPRASLNHSTAFNPQPQSQMQEEDTAPWRC

SEQ ID NO: 6723 - protein, 1436 aa, Homo sapiens
MAQCVQSVQELIPDSFVPCVAALCSDEAERLTRLNHLSFAELLKPFSRLTSEVHMRDPNNQLHVIKNLKIAVSNIVTQPPQPGAIRKLLNDVVSGSQPAEGLVANVITAGDYDLNISATTPWFESYRETFLQSMPALDHEFLNHYLACMLVASSSEAEPVEQFSKLSQEQHRIQHNSDYSYPKWFIPNTLKYYVLLHDVSAGDEQRAESIYEEMKQKYGTQGCYLLKINSRTSNRASDEQIPDPWSQYLQKNSIQNQESYEDGPCTITSNKNSDNNLLSLDGLDNEVKVDGLPNNFRAHPLQLEQSSDPSNSIDGPDHLRSASSLHETKKGNTGIIHGACLTLTDHDRIRQFIQEFTFRGLLPHIEKTIRQLNDQLISRKGLSRSLFSATKKWFSGSKVPEKSINDLKNTSGLLYPPEAPELQIRKMADLCFLVQHYDLAYSCYHTAKKDFLNDQAMLYAAGALEMAAVSAFLQPGAPRPYPAHYMDTAIQTYRDICKNMVLAERCVLLSAELLKSQSKYSEAAALLIRLTSEDSDLRSALLLEQAAHCFINMKSPMVRKYAFHMILAGHRFSKAGQKKHALRCYCQAMQVYKGKGWSLAEDHINFTIGRQSYTLRQLDNAVSAFRHILINESKQSAAQQGAFLREYLYVYKNVSQLSPDGPLPQLPLPYINSSATRVFFGHDRRPADGEKQAATHVSLDQEYDSESSQQWRELEEQVVSVVNKGVIPSNFHPTQYCLNSYSDNSRFPLAVVEEPITVEVAFRNPLKVLLLLTDLSLLWKFHPKDFSGKDNEEVKQLVTSEPEMIGAEVISEFLINGEESKVARLKLFPHHIGELHILGVVYNLGTIQGSMTVDGIGALPGCHTGKYSLSMSVRGKQDLEIQGPRLNNTKEEKTSVKYGPDRRLDPIITEEMPLLEVFFIHFPTGLLCGEIRKAYVEFVNVSKCPLTGLKVVSKRPEFFTFGGNTAVLTPLSPSASENCSAYKTVVTDATSVCTALISSASSVDFGIGTGSQPEVIPVPLPDTVLLPGASVQLPMWLRGPDEEGVHEINFLFYYESVKKQPKIRHRILRHTAIICTSRSLNVRATVCRSNSLENEEGRGGNMLVFVDVENTNTSEAGVKEFHIVQVSSSSKHWKLQKSVNLSENKDTKLASREKGKFCFKAIRCEKEEAATQSSEKYTFADIIFGNEQIISSASPCADFFYRSLSSELKKPQAHLPVHTEKQSTEDAVRLIQKCSEVDLNIVILWKAYVVEDSKQLILEGQHHVILRTIGKEAFSYPQKQEPPEMELLKFFRPENITVSSRPSVEQLSSLIKTSLHYPESFNHPFHQKSLCLVPVTLLLSNCSKADVDVIVDLRHKTTSPEALEIHGSFTWLGQTQYKLQLKSQEIHSLQLKACFVHTGVYNLGTPRVFAKLSDQVTVFETSQQNSMPALIIISNV

SEQ ID NO: 6724 - protein, 1348 aa, Homo sapiens
MAQCVQSVQELIPDSFVPCVAALCSDEAERLTRLNHLSFAELLKPFSRLTSEVHMRDPNNQLHVIKNLKIAVSNIVTQPPQPGAIRKLLNDVVSGSQPAEGLVANVITAGDYDLNISATTPWFESYRETFLQSMPASDHEFLNHYLACMLVASSSEAEPVEQFSKLSQEQHRIQHNSDYSYPKWFIPNTLKYYVLLHDVSAGDEQRAESIYEEMKQKYGTQGCYLLKINSRTSNRASDEQIPDPWSQYLQKNSIQNQESYEDGPCTITSNKNSDNNLLSLDGLDNEVKDGLPNNFRAHPLQLEQSSDPSNSIDGPDHLRSASSLHETKKGNTGIIHGACLTLTDHDRIRQFIQEFTFRGLLPHIEKTIRQLNDQLISRKGLSRSLFSATKKWFSGSKVPEKSINDLKNTSGLLYPPEAPELQIRKMADLCFLVQHYDLAYSCYHTAKKDFLNDQAMLYAAGALEMAAVSAFLQPGAPRPYPAHYMDTAIQTYRDICKNMVLAERCVLLSAELLKSQSKYSEAAALLIRLTSEDSDLRSALLLEQAAHCFINMKSPMVRKYAFHMILAGHRFSKAGQKKHALRCYCQAMQVYKGKGWSLAEDHINFTIGRQSYTLRQLDNAVSAFRHILINESKQSAAQQGAFLREYLYVYKNVSQLSPDGPLPQLPLPYINSSATRVFFGHDRRPADGEKQAATHVSLDQEYDSESSQQWRELEEQVVSVVNKGVIPSNFHPTQYCLNSYSDNSRFPLAVVEEPITVEVAFRNPLKVLLLLTDLSLLWKFHPKDFSGKDNEEVKQLVTSEPEMIGAEVISEFLINGEESKVARLKLFPHHIGELHILGVVYNLGTIQGSMTVDGIGALPGCHTGKYSLSMSVRGKQDLEIQGPRLNNTKEEKTSVKYGPDRRLDPIITEEMPLLEDFGIGTGSQPEVIPVPLPDTVLLPGASVQLPMWLRGPDEEGVHEINFLFYYESVKKQPKIRHRILRHTAIICTSRSLNVRATVCRSNSLENEEGRGGNMLVFVDVENTNTSEAGVKEFHIVQVSSSSKHWKLQKSVNLSENKDAKLASREKGKFCFKAIRCEKEEAATQSSEKYTFADIIFGNEQIISSASPCADFFYRSLSSELKKPQAHLPVHTEKQSTEDAVRLIQKCSEVDLNIVILWKAYVVEDSKQLILEGQHHVILRTIGKEAFSYPQKQEPPEMELLKFFRPENITVSSRPSVEQLSSLIKTSLHYPESFNHPFHQKSLCLVPVTLLLSNCSKADVDVIVDLRHKTTSPEALEIHGSFTWLGQTQYKLQLKSQEIHSLQLKACFVHTGVYNLGTPRVFAKLSDQVTVFETSQQNSMPALIIISNV

SEQ ID NO: 6725 - protein, 462 aa, Homo sapiens
MDKDSQGLLDSSLMASGTASRSEDEESLAGQKRASSQALGTIPKRRSSSRFIKRKKFDDELVESSLAKSSTRAKGASGVEPGRCSGSEPSSSEKKKVSKAPSTPVPPSPAPAPGLTKRVKKSKQPLQVTKDLGRWKPADDLLLINAVLQTNDLTSVHLGVKFSCRFTLREVQERWYALLYDPVISKLACQAMRQLHPEAIAAIQSKALFSKAEEQLLSKVGSTSQPTLETFQDLLHRHPDAFYLARTAKALQAHWQLMKQYYLLEDQTVQPLPKGDQVLNFSDAEDLIDDSKLKDMRDEVLEHELMVADRRQKREIRQLEQELHKWQVLVDSITGMSSPDFDNQTLAVLRGRMVRYLMRSREITLGRATKDNQIDVDLSLEGPAWKISRKQGVIKLKNNGDFFIANEGRRPIYIDGRPVLCGSKWRLSNNSVVEIASLRFVFLINQDLIALIRAEAAKITPQ

SEQ ID NO: 6726 - protein, 2715 aa, Homo sapiens
MKMKIQKKEKQLSNLKVLNHSPMSDASVNFDYKSPSPFDCSTDQEEKIEDVASHCLPQKDLYTAEEEAATLFPRKMTSHNGMEDSGGGGTGVKKKRKKKEPGDQEGAAKGSKDREPKPKRKREPKEPKEPRKAKEPKKAKEHKEPKQKDGAKKARKPREASGTKEAKEKRSCTDSAARTKSRKASKEQGPTPVEKKKKGKRKSETTVESLELDQGLTNPSLRSPEESTESTDSQKRRSGRQVKRRKYNEDLDFKVVDDDGETIAVLGAGRTSALSASTLAWQAEEPPEDDANIIEKILASKTVQEVHPGEPPFDLELFYVKYRNFSYLHCKWATMEELEKDPRIAQKIKRFRNKQAQMKHIFTEPDEDLFNPDYVEVDRILEVAHTKDAETGEEVTHYLVKWCSLPYEESTWELEEDVDPAKVKEFESLQVLPEIKHVERPASDSWQKLEKSREYKNSNQLREYQLEGMNWLLFNWYNRKNCILADEMGLGKTIQSITFLSEIFLRGIHGPFLIIAPLSTITNWEREFRTWTEMNAIVYHGSQISRQMIQQYEMVYRDAQGNPLSGVFKFHVVITTFEMILADCPELKKIHWSCVIIDEAHRLKNRNCKLLEGLKLMALEHKVLLTGTPLQNSVEELFSLLNFLEPSQFPSETAFLEEFGDLKTEEQVKKLQSILKPMMLRRLKDDVEKNLAPKQETIIEVELTNIQKKYYRAILEKNFSFLTKGANQHNMPNLINTMMELRKCCNHPYLINGAEEKILEDFRKTHSPDAPDFQLQAMIQAAGKLVLIDKLLPKLIAGGHKVLIFSQMVRCLDILEDYLIQRRYTYERIDGRVRGNLRQAAIDRFCKPDSDRFVFLLCTRAGGLGINLTAADTCIIFDSDWNPQNDLQAQARCHRIGQSKAVKVYRLITRNSYEREMFDKASLKLGLDKAVLQDINRKGGTNGVQQLSKMEVEDLLRKGAYGALMDEEDEGSKFCEEDIDQILQRRTHTITIQSEGKGSTFAKASFVASGNRTDISLDDPNFWQKWAKIAELDTEAKNEKESLVIDRPRVRKQTKHYNSFEEDELMEFSELDSDSDERPTRSRRLNDKARRYLRAECFRVEKNLLIFGWGRWKDILTHGRFKWHLNEKDMEMICRALLVYCVKHYKGDEKIKSFIWELITPTKDGQAQTLQNHSGLSAPVPRGRKGKKTKNQLLIPELKDADWLATCNPEVVLHDDGYKKHLKQHCNKVLLRVRMLYYLKAEILGEAAEKAFEGSPARELDVPLPDIDYMEIPVDWWDAEADKSLLIGVFKHGYERYNAMRADPALCFLEKVGMPDEKSLSAEQGVTDGTSDIPERGNTDKEDNAEDKVDGLQKQTESSSDGGDGVFSEKKDDSRAAQDGSDPDKSPWPVSSALTARLRRLVTVYQRCNRKELCRPEILGPGNQGYWVQEEMFRRTSEMDLINKEAQKRWTRREQADFYRTVSSFGVVYDQEKKTFDWTQFRIISRLDKKSDESLEQYFYSFVAMCRNVCRLPTWKDGGPPDTTIYVEPITEERAARTLYRIELLRKVREQVLKCPQLHERLQLCRPSLYLPVWWECGKHDRDLLIGTAKHGLNRTDCYIMNDPQLSFLDAYRNYAQHKRSGTQAPGNLCCLYQTNSKLYESLTYSQMSRTSESLENEPENLVRVESRDDHLSLPDVTCENFISKVQDVISINHDESLLPESLESMMYGKKVLSQEPSSFQESPSTNTESRKDVITISISKDGNCQSGGPEAEIASGPTFMGSLEAGGVAQANIKNGKHLLMSISKEGELCCSEAGQRPENIGQLEAKCLASPSLNPGNESGFVDMCSLSVCDSKRNLSSDQQLIDLLENKSLESKLILSQNHSDEEEEEEENEEENLAMAVGMGERPEVLHLTEPTTNISREKNQGFQDETKKGSLEVANQTPGLQRAFPAPAACQCHCKHMERWMHGLENDEFEIEKPKAYIPDLFKSKTNTIAMEGEPTAIPSQPFKVKHELLKEPWKESAEGQNVFPTYPLEGSELKSEDMDFENKDDYDRDGNCHSQDYPGKYSEEESKSSTSGITGDIGDELQEARAPTIAQLLQEKTLYSFSEWPKDRVIINRLDNICHVVLKGKWPSSQQYEPSGTLPTPVLTSSAGSRTSLSEPEAAEHSFSNGAALAAQIHKESFLAPVFTKDEQKHRRPYEFEVERDAKARGLEQFSATHGHTPIILNGWHGESAMDLSCSSEGSPGATSPFPVSASTPKIGAISSLQGALGMDLSGILQAGLIHPVTGQIVNGSLRRDDAATRRRRGRRKHVEGGMDLIFLKEQTLQAGILEVHEDPGQATLSTTHPEGPGPATSAPEPATAASSQAEKSIPSKSLLDWLRQQADYSLEVPGFGANFSDKPKQRRPRCKEPGKLDVSSLSGEERVPAIPKEPGLRGFLPENKFNHTLAEPILRDTGPRRRGRRPRSELLKAPSIVADSPSGMGPLFMNGLIAGMDLVGLQNMRNMPGIPLTGLVGFPAGFATMPTGEEVKSTLSMLPMMLPGMAAVPQMFGVGGLLSPPMATTCTSTAPASLSSTTKSGTAVTEKTAEDKPSSHDVKTDTLAEDKPGPGPFSDQSEPAITTSSPVAFNPFLIPGVSPGLIYPSMFLSPGMGMALPAMQQARHSEIVGLESQKRKKKKTKGDNPNSHPEPAPSCEREPSGDENCAEPSAPLPAEREHGAQAGEGALKDSNNDTN

SEQ ID NO: 6727 - protein, 994 aa, Homo sapiens
MRRRPPSRGGRGAARARETRRQPRHRSGRRMAEAISCTLNCSCQSFKPGKINHRQCDQCKHGWVAHALSKLRIPPMYPTSQVEIVQSNVVFDISSLMLYGTQAIPVRLKILLDRLFSVLKQDEVLQILHALDWTLQDYIRGYVLQDASGKVLDHWSIMTSEEEVATLQQFLRFGETKSIVELMAIQEKEEQSIIIPPSTANVDIRAFIESCSHRSSSLPTPVDKGNPSSIHPFENLISNMTFMLPFQFFNPLPPALIGSLPEQYMLEQGHDQSQDPKQEVHGPFPDSSFLTSSSTPFQVEKDQCLNCPDAITKKEDSTHLSDSSSYNIVTKFERTQLSPEAKVKPERNSLGTKKGRVFCTACEKTFYDKGTLKIHYNAVHLKIKHKCTIEGCNMVFSSLRSRNRHSANPNPRLHMPMNRNNRDKDLRNSLNLASSENYKCPGFTVTSPDCRPPPSYPGSGEDSKGQPAFPNIGQNGVLFPNLKTVQPVLPFYRSPATPAEVANTPGILPSLPLLSSSIPEQLISNEMPFDALPKKKSRKSSMPIKIEKEAVEIANEKRHNLSSDEDMPLQVVSEDEQEACSPQSHRVSEEQHVQSGGLGKPFPEGERPCHRESVIESSGAISQTPEQATHNSERETEQTPALIMVPREVEDGGHEHYFTPGMEPQVPFSDYMELQQRLLAGGLFSALSNRGMAFPCLEDSKELEHVGQHALARQIEENRFQCDICKKTFKNACSVKIHHKNMHVKEMHTCTVEGCNATFPSRRSRDRHSSNLNLHQKALSQEALESSEDHFRAAYLLKDVAKEAYQDVAFTQQASQTSVIFKGTSRMGSLVYPITQVHSASLESYNSGPLSEGTILDLSTTSSMKSESSSHSSWDSDGVSEEGTVLMEDSDGNCEGSSLVPGEDEYPICVLMEKADQSLASLPSGLPITCHLCQKTYSNKGTFRAHYKTVHLRQLHKCKVPGCNTMFSSVRSRNRHSQNPNLHKSLASSPSHLQ

SEQ ID NO: 6728 - protein, 703 aa, Homo sapiens
MAELMLLSEIADPTRFFTDNLLSPEDWGLQNSTLYSGLDEVAEEQTQLFRCPEQDVPFDGSSLDVGMDVSPSEPPWELLPIFPDLQVKSEPSSPCSSSSLSSESSRLSTEPSSEALGVGEVLHVKTESLAPPLCLLGDDPTSSFETVQINVIPTSDDSSDVQTKIEPVSPCSSVNSEASLLSADSSSQAFIGEEVLEVKTESLSPSGCLLWDVPAPSLGAVQISMGPSLDGSSGKALPTRKPPLQPKPVVLTTVPMPSRAVPPSTTVLLQSLVQPPPVSPVVLIQGAIRVQPEGPAPSLPRPERKSIVPAPMPGNSCPPEVDAKLLKRQQRMIKNRESACQSRRKKKEYLQGLEARLQAVLADNQQLRRENAALRRRLEALLAENSELKLGSGNRKVVCIMVFLLFIAFNFGPVSISEPPSAPISPRMNKGEPQPRRHLLGFSEQEPVQGVEPLQGSSQGPKEPQPSPTDQPSFSNLTAFPGGAKELLLRDLDQLFLSSDCRHFNRTESLRLADELSGWVQRHQRGRRKIPQRAQERQKSQPRKKSPPVKAVPIQPPGPPERDSVGQLQLYRHPDRSQPAFLDAIDRREDTFYVVSFRRDHLLLPAISHNKTSRPKMSLVMPAMAPNETLSGRGAPGDYEEMMQIECEVMDTRVIHIKTSTVPPSLRKQPSPTPGNATGGPLPVSAASQAHQASHQPLYLNHP

SEQ ID NO: 6729 - protein, 700 aa, Homo sapiens
MAELMLLSEIADPTRFFTDNLLSPEDWDSTLYSGLDEVAEEQTQLFRCPEQDVPFDGSSLDVGMDVSPSEPPWELLPIFPDLQVKSEPSSPCSSSSLSSESSRLSTEPSSEALGVGEVLHVKTESLAPPLCLLGDDPTSSFETVQINVIPTSDDSSDVQTKIEPVSPCSSVNSEASLLSADSSSQAFIGEEVLEVKTESLSPSGCLLWDVPAPSLGAVQISMGPSLDGSSGKALPTRKPPLQPKPVVLTTVPMPSRAVPPSTTVLLQSLVQPPPVSPVVLIQGAIRVQPEGPAPSLPRPERKSIVPAPMPGNSCPPEVDAKLLKRQQRMIKNRESACQSRRKKKEYLQGLEARLQAVLADNQQLRRENAALRRRLEALLAENSELKLGSGNRKVVCIMVFLLFIAFNFGPVSISEPPSAPISPRMNKGEPQPRRHLLGFSEQEPVQGVEPLQGSSQGPKEPQPSPTDQPSFSNLTAFPGGAKELLLRDLDQLFLSSDCRHFNRTESLRLADELSGWVQRHQRGRRKIPQRAQERQKSQPRKKSPPVKAVPIQPPGPPERDSVGQLQLYRHPDRSQPAFLDAIDRREDTFYVVSFRRDHLLLPAISHNKTSRPKMSLVMPAMAPNETLSGRGAPGDYEEMMQIECEVMDTRVIHIKTSTVPPSLRKQPSPTPGNATGGPLPVSAASQAHQASHQPLYLNHP

SEQ ID NO: 6730 - protein, 410 aa, Homo sapiens
IFGSFKTGLYLPTSDIDLVVFGKWENLPLWTLEEALRKHKVADEDSVKVLDKATVPIIKLTDSFTEVKVDISFNVQNGVRAADLIKDFTKKYPVLPYLVLVLKQFLLQRDLNEVFTGGIGSYSLFLMAVSFLQLHPREDACIPNTNYGVLLIEFFELYGRHFNYLKTGIRIKDGGSYVAKDEVQKNMLDGYRPSMLYIEDPLQPGNDVGRSSYGAMQVKQAFDYAYVVLSHAVSPIAKYYPNNETESILGRIIRVTDEVATYRDWISKQWGLKNRPEPSCNGPVSSSSATQSSSSDVDSDATPCKTPKQLLCRPSTGNRVGSQDVSLESSQAVGKMQSTQTTNTSNSTNKSQHGSARLFRSSSKGFQGTTQTSHGSLMTNKQHQGKSNNQYYHGKKRKHKRDAPLSDLCR

SEQ ID NO: 6731 - protein, 379 aa, Homo sapiens
HEVKVLDKATVPIIKLTDSFTEVKVDISFNVQNGVRAADLIKDFTKKYPVLPYLVLVLKQFLLQRDLNEVFTGGIGSYSLFLMAVSFLQLHPREDACIPNTNYGVLLIEFFELYGRHFNYLKTGIRIKDGGSYVAKDEVQKNMLDGYRPSMLYIEDPLQPGNDVGRSSYGAMQVKQAFDYAYVVLSHAVSPIAKYYPNNETESILGRIIRVTDEVATYRDWISKQWGLKNRPEPSCNGNGVTLIVDTQQLDKCNNNLSEENEALGKCRSKTSESLSKHSSNSSSGPVSSSSATQSSSSDVDSDATPCKTPKQLLCRPSTGNRVGSQDVSLESSQAVGKMQSTQTTNTSNSTNKSQHGSARLFRSSSKGFQGTTQTSHGS

SEQ ID NO: 6732 - protein, 503 aa, Homo sapiens
MATTVTCTRFTDEYQLYEDIGKGAFSVVRRCVKLCTGHEYAAKIINTKKLSARDHQKLEREARICRLLKHSNIVRLHDSISEEGFHYLVFDLVTGGELFEDIVAREYYSEADASHCIQQILEAVLHCHQMGVVHRDLKPENLLLASKCKGAAVKLADFGLAIEVQGDQQAWFGFAGTPGYLSPEVLRKEAYGKPVDIWACGVILYILLVGYPPFWDEDQHKLYQQIKAGAYDFPSPEWDTVTPEAKNLINQMLTINPAKRITAHEALKHPWVCQRSTVASMMHRQETVECLKKFNARRKLKGAILTTMLATRNFSAAKSLLNKKADGVKPQTNSTKNSAAATSPKGTLPPAALESSDSANTTIEDEDAKARKQEIIKTTEQLIEAVNNGDFEAYAKICDPGLTSFEPEALGNLVEGMDFHRFYFENLLAKNSKPIHTTILNPHVHVIGEDAACIAYIRLTQYIDGQGRPRTSQSEETRVWHRRDGKWQNVHFHCSGAPVAPLQ

SEQ ID NO: 6733 - protein, 499 aa, Homo sapiens [sequence omitted]

SEQ ID NO: 6734 - protein, 478 aa, Homo sapiens
MASTTTCTRFTDEYQLFEELGKGAFSVVRRCMKIPTGQEYAAKIINTKKLSARDHQKLEREARICRLLKHPNIVRLHDSISEEGFHYLVFDLVTGGELFEDIVAREYYSEADASHCIQQILESVNHCHLNGIVHRDLKPENLLLASKSKGAAVKLADFGLAIEVQGDQQAWFGFAGTPGYLSPEVLRKDPYGKPVDMWACGVILYILLVGYPPFWDEDQHRLYQQIKAGAYDFPSPEWDTVTPEAKDLINKMLTINPAKRITASEALKHPWICQRSTVASMMHRQETVDCLKKFNARRKLKGAILTTMLATRNFSAAKSLLKKPDGVKESTESSNTTIEDEDVKARKQEIIKVTEQLIEAINNGDFEAYTKICDPGLTAFEPEALGNLVEGMDFHRFYFENALSKSNKPIHTIILNPHVHLVGDDAACIAYIRLTQYMDGSGMPKTMQSEETRVWHRRDGKWQNVHFHRSGSPTVPIN

SEQ ID NO: 6735 - protein, 518 aa, Homo sapiens
MATTVTCTRFTDEYQLYEDIGKGAFSVVRRCVKLCTGHEYAAKIINTKKLSARDHQKLEREARICRLLKHSNIVRLHDSISEEGFHYLVFDLVTGGELFEDIVAREYYSEADASHCIQQILEAVLHCHQMGVVHRDLKPENLLLASKCKGAAVKLADFGLAIEVQGDQQAWFGFAGTPGYLSPEVLRKEAYGKPVDIWACGVILYILLVGYPPFWDEDQHKLYQQIKAGAYDFPSPEWDTVTPEAKNLINQMLTINPAKRITAHEALKHPWVCQRSTVASMMHRQETVECLKKFNARRKLKGAILTTMLATRNFSAAKSLLNKKADGVKPQTNSTKNSAAATSPKGTLPPAALEPQTTVIHNPVDGIKESSDSANTTIEDEDAKARKQEIIKTTEQLIEAVNNGDFEAYAKICDPGLTSFEPEALGNLVEGMDFHRFYFENLLAKNSKPIHTTILNPHVHVIGEDAACIAYIRLTQYIDGQGRPRTSQSEETRVWHRRDGKWQNVHFHCSGAPVAPLQ

SEQ ID NO: 6736 - protein, 478 aa, Homo sapiens
MASTTTCTRFTDEYQLFEELGKGAFSVVRRCMKIPTGQEYAAKIINTKKLSARDHQKLEREARICRLLKHPNIVRLHDSISEEGFHYLVFDLVTGGELFEDIVAREYYSEADASHCIQQILESVNHCHLNGIVHRDLKPENLLLASKSKGAAVKLADFGLAIEVQGDQQAWFGFAGTPGYLSPEVLRKDPYGKPVDMWACGVILYILLVGYPPFWDEDQHRLYQQIKAGAYDFPSPEWDTVTPEAKDLINKMLTINPAKRITASEALKHPWICQRSTVASMMHRQETVDCLKKFNARRKLKGAILTTMLATRNFSAAKSLLKKPDGVKESTESSNTTIEDEDVKARKQEIIKVTEQLIEAINNGDFEAYTKICDPGLTAFEPEALGNLVEGMDFHRFYFENALSKSNKPIHTIILNPHVHLVGDDAACIAYIRLTQYMDGSGMPKTMQSEETRVWHRRDGKWQNVHFHRSGSPTVPIK

SEQ ID NO: 6737 - protein, 479 aa, Homo sapiens
MATTVTCTRFTDEYQLYEDIGKGAFSVVRRCVKLCTGHEYAAKIINTKKLSARDHQKLEREARICRLLKHSNIVRLHDSISEEGFHYLVFDLVTGGELFEDIVAREYYSEADASHCIQQILEAVLHCHQMGVVHRDLKPENLLLASKCKGAAVKLADFGLAIEVQGDQQAWFGFAGTPGYLSPEVLRKEAYGKPVDIWACGVILYILLVGYPPFWDEDQHKLYQQIKAGAYDFPSPEWDTVTPEAKNLINQMLTINPAKRITAHEALKHPWVCQRSTVASMMHRQETVECLKKFNARRKLKGAILTTMLATRNFSAAKSLLNKKADGVKESSDSANTTIEDEDAKARKQEIIKTTEQLIEAVNNGDFEAYAKICDPGLTSFEPEALGNLVEGMDFHRFYFENLLAKNSKPIHTTILNPHVHVIGEDAACIAYIRLTQYIDGQGRPRTSQSEETRVWHRRDGKWQNVHFHCSGAPVAPLQ

SEQ ID NO: 6738 - protein, 574 aa, Homo sapiens
KEAASGKSDRRTPESSLHEALDQCMTALDLFLTNQFSEALSYLKPRTKESMYHSLTYATILEMQAMMTFDPQDILLAGNMMKEAQMLCQRHRRKSSVTDSFSSLVNRPTLGQFTEEEIHAEVCYAECLLQRAALTFLQDENMVSFIKGGIKVRNSYQTYKELDSLVQSSQYCKGENHPHFEGGVKLGVGAFNLTLSMLPTRILRLLEFVGFSGNKDYGLLQLEEGASGHSFRSVLCVMLLLCYHTFLTFVLGTGNVNIEEAEKLLKPYLNRYPKGAIFLFFAGRIEVIKGNIDAAIRRFEECCEAQQHWKQFHHMCYWELMWCFTYKGQWKMSYFYADLLSKENCWSKATYIYMKAAYLSMFGKEDHKPFGDDEVELFRAVPGLKLKIAGKSLPTEKFAIRKSRRYFSSNPISLPVPALEMMYIWNGYAVIGKQPKLTDGILEIITKAEEMLEKGPENEYSVDDECLVKLLKGLCLKYLGRVQEAEENFRSISANEKKIKYDHYLIPNALLELALLLMEQDRNEEAIKLLESAKQNYKNYSMESRTHFRIQAATLQAKSSLENSSRSMVSSVSL

SEQ ID NO: 6739 - protein, 453 aa, Homo sapiens
VETPPQGSVHSGHLGSVVGDPHTGTGNAGERGPRGKGARVLALDSGGMDSSPSLPLIRTPESSLHEALDQCMTALDLFLTNQFSEALSYLKPRTKESMYHSLTYATILEMQAMMTFDPQDILLAGNMMKEAQMLCQRHRRKSSVTDSFSSLVNRPTLGQFTEEEIHAEVCYAECLLQRAALTFLQGSSHGGAVRPRALHDPSHACSCPPGPGRQHLFLLQDENMVSFIKGGIKVRNSYQTYKELDSLVQSSQYCKGENHPHFEGGVKLGVGAFNLTLSMLPTRILRLLEFVGFSGNKDYGLLQLEEGASGHSFRSVLCVMLLLCYHTFLTFVLGTGNVNIEEAEKLLKPYLNRYPKGAIFLFFAGRIEVIKGNIDAVSDGGPGRGWGSLGVSQTSRKSGTCDILRDRIDWGRGGGPRENQPESRGRRGPSGRAAWEDKGGGGICGAWDFDWEI

SEQ ID NO: 6740 - protein, 214 aa, Homo sapiens
VSTEHFTQQYSSCSTIFLDDSIASQPHLTMTLKSVTLALYYHIKQSTSGFFLQWILTLHPFFFQRKEVLEEYFKYDPEHKLIFRFVRTLFKAMRLTAEFAIVSLIYIERLVSYADIDICPTNWKRIVLGAILLASKVWSDMAVWNEDYCKLFKNITVEEMNELERQFLKLINYNNSITNSVYSRFYFDLRTLAHNNGLYSPVYLLDRERAWKLE

SEQ ID NO: 6741 - protein, 430 aa, Homo sapiens
MHTQSPERFTSASELGTNNVSAFQSDQAASEIEVTSSVLHATSLSVSTARQPAPNANISGHSLQAPNDSGTLTVTKSVSPRNSPTTHGWPDPRASPGLHQHQGLVCHCESEIYEAAAGDLIAGVPVAAAVEPGEVTFVAGEGLHMHHICEREMPEDIPLEPNPSDHPKASTIFLRKSQTDVPSRAMGFSHIESIEEVSTEHFTQQYSSCSTIFLDDSIASQPHLTMTLKSSLLLKCDLGTILSYQAKRKEVLEEYFKYDPEHKLIFRFVRTLFKAMRLTAEFAIIYIERLVSYADIDICPTNWKRIVLGAILLASKVWSDMAVWNEDYCKLFKNITVEEMNELERQFLKLINYNNSITNSVYSRFYFDLRTLAHNNGLYSPVYLLDRERAWKLEAFSRMEQDKVFYSAAKNGSLSADDLIHLQRAKAILF

SEQ ID NO: 6742 - protein, 213 aa, Homo sapiens
IYEHFTQQYSSCSTIFLDDSIASQPHLTMTLKSVTLALYYHIKQSTSGFFLQWILTLHPFFFQRKEVLEEYFKYDPEHKLIFRFVRTLFKAMRLTAEFAIVSLIYIERLVSYADIDICPTNWKRIVLGAILLASKVWSDMAVWNEDYCKLFKNITVEEMNELERQFLKLINYNNSITNSVYSRFYFDLRTLAHNNGLYSPVYLLDRERAWKLE

SEQ ID NO: 6743 - protein, 367 aa, Homo sapiens
MAALRWVQENIAAFGGDPGNVTLFGQSAGAMSISGLMMSPLASGLFHRAISQSGTALFRPFITSNPLKVAKKVAHLAGCNHNSTQILVNCLRALSGTKVMRVSNKMRFLQLNFQRDPEEIIWSMSPVVDGVVIPDDPLVLLTQGKVSSVPYLLGVNNLEFNWLLPYIMKFPLNRQAMRKETITKMLWSTRTLLNITKEQVPLVVEEYLDNVNEHDWKMLRNRMMDIVQDATFVYATLQTAHYHRDAGLPVYLYEFEHHARGIIVKPRTDGADHGDEMYFLFGGPFATGLSMGKEKALSLQMMKYWANFARTGNPNDGNLPCWPRYNKDEKYLQLDFTTRVGMKLKEKKMAFWMSLYQSQRPEKQRQF

SEQ ID NO: 6744 - protein, 1557 aa, Homo sapiens
MQNIPFPSPQRPRILVQLSVHDALILSQPVSTPLPLSGANFSTLLMNLGPENCATLLLFVLLESKILLHSLRPAVLTGVAEAVVAMIFPFQWQCPYIPLCPLSLAAVLSAPLPFIVGVDSRYFDLHDPPQDVVCIDLDTNMLYVSDEKKNMNWKQLPKKPCKNLLSTLKKLYPQLSSVHQKTQEGSAIDMTPIEADFSWQKKMTQLEMEIQEAFLRFMASILKGYRTYLRPITEAPSNKATAADSLFDRQGFLKSRDRAYAKFYTLLSKTQIFIRFIEECSFVSDKDTGLAFFDDCIEKLFPDKGTEKTDKVDFDSAEDTRLIELDDSQKGEHTVFIMPPEPPPDDGKDLSPKYSYKYFPRLDLKLFDRPQELKLCFSRHPTGNSITKSPPLMAKRTKQEIKTAHKLAKRCYTNPPQWAKCLFSHCYSLWFICLPAYVRVSHPKVRALQQAYDVLIKMRKTDVDPLDEVCYRVVMQLCGLWGHPVLAVRVLFEMKTARIKPNAITYGYYNKVVLESPWPSSTRSGIFLWTKVRNVVRGLAQFRQPLKKTVQRSQVSSISGGQSDQGYGSKDELIKDDAEIHVPEEQAARELITKTKMQTEEVCDASAIVAKHSQPSPEPHSPTEPPAWGSSIVKVPSGIFDVNSRKSSTGSISNVLFSTQDPVEDAVFGEATNLKKNGDRGEKRQKHFPERSCSFSSESRAGMLLKKSSLDSNSSEMAIMMGADAKILTAALTCPKTSLLHIARTHSFENVSCHLPDSRTCMSESTWNPEHRSSPVPEMLEESQELLEPVVDDVPKTTATVDTYESLLSDSNSNQSRDLKTVSKDLRNKRSSLYGIAKVVQREDVETGLDPLSLLATECTGGKTPDSEDKLFSPVIARNLADEIESYMNLKSPLGSKSSSMELHREENRESGMTTAFIHALERRSSLPLDHGSPAQENPESEKSSPAVSRSKTFTGRFKQQTPSRTHKERSTSLSALVRSSPHGSLGSVVNSLSGLKLDNILSGPKIDVLKSGMKQAATVASKMWVAVASAYSYSDDEEETNRDYSFPAGLEDHILGENISPNTSISGLVPSELTQSNTSLGSSSSSGDVGKLHYPTGEVPFPRGMKGQDFEKSDHGSSQNTSMSSIYQNCAMEVLMSSCSQCRACGALVYDEEIMAGWTADDSNLNTACPFCKSNFLPLLNIEFKDLRGSASFFLKPSTSGDSLQSGSIPLANESLEHKPVSSLAEPDLINFMDFPKHNQIITEETGSAVEPSDEIKRASGDVQTMKISSVPNSLSKRNVSLTRSHSVGGPLQNIDFTQRPFHGISTVSLPNSLQEVVDPLGKRPNPPPVSVPYLSPLVLRKELESLLENEGDQVIHTSSFINQHPIIFWNLVWYFRRLDLPSNLPGLILTSEHCNEGVQLPLSSLSQDSKLVYIQLLWDNINLHQEPREPLYVSWRNFNSEKKSSLLSEEQQETSTLVETIRQSIQHNNVLKPINLLSQQMKPGMKRQRSLYREILFLSLVSLGRENIDIEAFDNEYGIAYNSLSSEILERLQKIDAPPSASVEWCRKCFGAPLI

SEQ ID NO: 6745 - protein, 1179 aa, Homo sapiens [sequence omitted]

SEQ ID NO: 6746 - protein, 672 aa, Homo sapiens
MRSIRSFANDDRHVMVKHSTIYPSPEELEAVQNMVSTVECALKHVSDWLDETNKGTKTEGETEVKKDEAGENYSKDQGGRTLCGVMRIGLVAKGLLIKDDMDLELVLMCKDKPTETLLNTVKDNLPIQIQKLTEEKYQVEQCVNEASIIIRNTKEPTLTLKVILTSPLIRDELEKKDGENVSMKDPPDLLDRQKCLNALASLRHAKWFQARANGLKSCVIVLRILRDLCNRVPTWAPLKGWPLELICEKSIGTCNRPLGAGEALRRVMECLASGILLPGGPGLHDPCERDPTDALSYMTIQQKEDITHSAQHALRLSAFGQIYKVLEMDPLPSSKPFQKYSWSVTDKEGAGSSALKRPFEDGLGDDKDPNKKMKRNLRKILDSKAIDLMNALMRLNQIRPGLQYKLLSQSGPVHAPVFTMSVDVDGTTYEASGPSKKTAKLHVAVKVLQAMGYPTGFDADIECMSSDEKSDNESKNETVSSNSSNNTGNSTTETSSTLEVRTQGPILTASGKNPVMELNEKRRGLKYELISETGGSHDKRFVMEVEVDGQKFRGAGPNKKVAKASAALAALEKLFSGPNAANNKKKKIIPQAKGVVNTAVSAAVQAVRGRGRGTLTRGAFVGATAAPGYIAPGYGTPYGYSTAAPAYGLPKRMVLLPVMKFPTYPVPHYSFF

SEQ ID NO: 6747 - protein, 530 aa, Homo sapiens [sequence omitted]

SEQ ID NO: 6748 - protein, 957 aa, Homo sapiens
MAQVAMSTLPVEDEESSESRMVVTFLMSALESMCKELAKSKAEVACIAVYETDVFVVGTERGRAFVNTRKDFQKDFVKYCVEEEEKAAEMHKMKSTTQANRMSVDAVEIETLRKTVEDYFCFCYGKALGKSTVVPVPYEKMLRDQSAVVVQGLPEGVAFKHPENYDLATLKWILENKAGISFIIKRPFLEPKKHVGGRVMVTDADRSILSPGGSCGPIKVKTEPTEDSGISLEMAAVTVKEESEDPDYYQYNIQGSHHSSEGNEGTEMEVPAEDDDYSPPSKRPKANELPQPPVPEPANAGKRKVREFNFEKWNARITDLRKQVEELFERKYAQAIKAKGPVTIPYPLFQSHVEDLYVEGLPEGIPFRRPSTYGIPRLERILLAKERIRFVIKKHELLNSTREDLQLDKPASGVKEEWYARITKLRKMVDQLFCKKFAEALGSTEAKAVPYQKFEAHPNDLYVEGLPENIPFRSPSWYGIPRLEKIIQVGNRIKFVIKRPELLTHSTTEVTQPRTNTPVKEDWNVRITKLRKQVEEIFNLKFAQALGLTEAVKVPYPVFESNPEFLYVEGLPEGIPFRSPTWFGIPRLERIVRGSNKIKFVVKKPELVISYLPPGMASKINTKALQSPKRPRSPGSNSKVPEIEVTVEGPNNNNPQTSAVRTPTQTNGSNVPFKPRGREFSFEAWNAKITDLKQKVENLFNEKCGEALGLKQAVKVPFALFESFPEDFYVEGLPEGVPFRRPSTFGIPRLEKILRNKAKIKFIIKKPEMFETAIKESTSSKSPPRKINSSPNVNTTASGVEDLNIIQVTIPDDDNERLSKVEKARQLREQVNDLFSRKFGEAIGMGFPVKVPYRKITINPGCVVVDGMPPGVSFKAPSYLEISSMRRILDSAEFIKFTVIRPFPGLVINNQLVDQSESEGPVIQESAEPSQLEVPATEEIKETDGSSQIKQEPDPTW

SEQ ID NO: 6749 - protein, 998 aa, Homo sapiens
MAQVAMSTLPVEDEESSESRMVVTFLMSALESMCKELAKSKAEVACIAVYETDVFVVGTERGRAFVNTRKDFQKDFVKYCVEEEEKAAEMHKMKSTTQANRMSVDAVEIETLRKTVEDYFCFCYGKALGKSTVVPVPYEKMLRDQSAVVVQGLPEGVAFKHPENYDLATLKWILENKAGISFIIKRPFLEPKKHVGGRVMVTDADRSILSPGGSCGPIKVKTEPTEDSGISLEMAAVTVKEESEDPDYYQYNIQAGPSETDDVDEKQPLSKPLQGSHHSSEGNEGTEMEVPAEDSTQHVPSETSEDPEVEVTIEDDDYSPPSKRPKANELPQPPVPEPANAGKRKVREFNFEKWNARITDLRKQVEELFERKYAQAIKAKGPVTIPYPLFQSHVEDLYVEGLPEGIPFRRPSTYGIPRLERILLAKERIRFVIKKHELLNSTREDLQLDKPASGVKEEWYARITKLRKMVDQLFCKKFAEALGSTEAKAVPYQKFEAHPNDLYVEGLPENIPFRSPSWYGIPRLEKIIQVGNRIKFVIKRPELLTHSTTEVTQPRTNTPVKEDWNVRITKLRKQVEEIFNLKFAQALGLTEAVKVPYPVFESNPEFLYVEGLPEGIPFRSPTWFGIPRLERIVRGSNKIKFVVKKPELVISYLPPGMASKINTKALQSPKRPRSPGSNSKVPEIEVTVEGPNNNNPQTSAVRTPTQTNGSNVPFKPRGREFSFEAWNAKITDLKQKVENLFNEKCGEALGLKQAVKVPFALFESFPEDFYVEGLPEGVPFRRPSTFGIPRLEKILRNKAKIKFIIKKPEMFETAIKESTSSKSPPRKINSSPNVNTTASGVEDLNIIQVTIPDDDNERLSKVEKARQLREQVNDLFSRKFGEAIGMGFPVKVPYRKITINPGCVVVDGMPPGVSFKAPSYLEISSMRRILDSAEFIKFTVIRPFPGLVINNQLVDQSESEGPVIQESAEPSQLEVPATEEIKETDGSSQIKQEPDPTW

SEQ ID NO: 6750 - protein, 718 aa, Homo sapiens
MRCTEGSQQSEFLVYPQGNEHGTLTTANDHFLFQDDDYSPPSKRPKANELPQPPVPEPANAGKRKVREFNFEKWNARITDLRKQVEELFERKYAQAIKAKGPVTIPYPLFQSHVEDLYVEGLPEGIPFRRPSTYGIPRLERILLAKERIRFVIKKHELLNSTREDLQLDKPASGVKEEWYARITKLRKMVDQLFCKKFAEALGSTEAKAVPYQKFEAHPNDLYVEGLPENIPFRSPSWYGIPRLEKIIQVGNRIKFVIKRPELLTHSTTEVTQPRTNTPVKEDWNVRITKLRKQVEEIFNLKFAQALGLTEAVKVPYPVFESNPEFLYVEGLPEGIPFRSPTWFGIPRLERIVRGSNKIKFVVKKPELVISYLPPGMASKINTKALQSPKRPRSPGSNSKVPEIEVTVEGPNNNNPQTSAVRTPTQTNGSNVPFKPRGREFSFEAWNAKITDLKQKVENLFNEKCGEALGLKQAVKVPFALFESFPEDFYVEGLPEGVPFRRPSTFGIPRLEKILRNKAKIKFIIKKPEMFETAIKESTSSKSPPRKINSSPNVNTTASGVEDLNIIQVTIPDDDNERLSKVEKARQLREQVNDLFSRKFGEAIGMGFPVKVPYRKITINPGCVVVDGMPPGVSFKAPSYLEISSMRRILDSAEFIKFTVIRPFPGLVINNQLVDQSESEGPVIQESAEPSQLEVPATEEIKETDGSSQIKQEPDPTW

SEQ ID NO: 6751 - protein, 977 aa, Homo sapiens
MAQVAMSTLPVEDEESSESRMVVTFLMSALESMCKELAKSKAEVACIAVYETDVFVVGTERGRAFVNTRKDFQKDFVKYCVEEEEKAAEMHKMKSTTQANRMSVDAVEIETLRKTVEDYFCFCYGKALGKSTVVPVPYEKMLRDQSAVVVQGLPEGVAFKHPENYDLATLKWILENKAGISFIIKRPFLEPKKHVGGRVMVTDADRSILSPGGSCGPIKVKTEPTEDSGISLEMAAVTVKEESEDPDYYQYNIQAGPSETDDVDEKQPLSKPLQGSHHSSEGNEGTEMEVPAEDDDYSPPSKRPKANELPQPPVPEPANAGKRKVREFNFEKWNARITDLRKQVEELFERKYAQAIKAKGPVTIPYPLFQSHVEDLYVEGLPEGIPFRRPSTYGIPRLERILLAKERIRFVIKKHELLNSTREDLQLDKPASGVKEEWYARITKLRKMVDQLFCKKFAEALGSTEAKAVPYQKFEAHPNDLYVEGLPENIPFRSPSWYGIPRLEKIIQVGNRIKFVIKRPELLTHSTTEVTQPRTNTPVKEDWNVRITKLRKQVEEIFNLKFAQALGLTEAVKVPYPVFESNPEFLYVEGLPEGIPFRSPTWFGIPRLERIVRGSNKIKFVVKKPELVISYLPPGMASKINTKALQSPKRPRSPGSNSKVPEIEVTVEGPNNNNPQTSAVRTPTQTNGSNVPFKPRGREFSFEAWNAKITDLKQKVENLFNEKCGEALGLKQAVKVPFALFESFPEDFYVEGLPEGVPFRRPSTFGIPRLEKILRNKAKIKFIIKKPEMFETAIKESTSSKSPPRKINSSPNVNTTASGVEDLNIIQVTIPDDDNERLSKVEKARQLREQVNDLFSRKFGEAIGMGFPVKVPYRKITINPGCVVVDGMPPGVSFKAPSYLEISSMRRILDSAEFIKFTVIRPFPGLVINNQLVDQSESEGPVIQESAEPSQLEVPATEEIKETDGSSQIKQEPDPTW

SEQ ID NO: 6752 - protein, 530 aa, Homo sapiens [sequence omitted]

SEQ ID NO: 6753 - protein, 978 aa, Homo sapiens
MAQVAMSTLPVEDEESSESRMVVTFLMSALESMCKELAKSKAEVACIAVYETDVFVVGTERGRAFVNTRKDFQKDFVKYCVEEEEKAAEMHKMKSTTQANRMSVDAVEIETLRKTVEDYFCFCYGKALGKSTVVPVPYEKMLRDQSAVVVQGLPEGVAFKHPENYDLATLKWILENKAGISFIIKRPFLEPKKHVGGRVMVTDADRSILSPGGSCGPIKVKTEPTEDSGISLEMAAVTVKEESEDPDYYQYNIQGSHHSSEGNEGTEMEVPAEDSTQHVPSETSEDPEVEVTIEDDDYSPPSKRPKANELPQPPVPEPANAGKRKVREFNFEKWNARITDLRKQVEELFERKYAQAIKAKGPVTIPYPLFQSHVEDLYVEGLPEGIPFRRPSTYGIPRLERILLAKERIRFVIKKHELLNSTREDLQLDKPASGVKEEWYARITKLRKMVDQLFCKKFAEALGSTEAKAVPYQKFEAHPNDLYVEGLPENIPFRSPSWYGIPRLEKIIQVGNRIKFVIKRPELLTHSTTEVTQPRTNTPVKEDWNVRITKLRKQVEEIFNLKFAQALGLTEAVKVPYPVFESNPEFLYVEGLPEGIPFRSPTWFGIPRLERIVRGSNKIKFVVKKPELVISYLPPGMASKINTKALQSPKRPRSPGSNSKVPEIEVTVEGPNNNNPQTSAVRTPTQTNGSNVPFKPRGREFSFEAWNAKITDLKQKVENLFNEKCGEALGLKQAVKVPFALFESFPEDFYVEGLPEGVPFRRPSTFGIPRLEKILRNKAKIKFIIKKPEMFETAIKESTSSKSPPRKINSSPNVNTTASGVEDLNIIQVTIPDDDNERLSKVEKARQLREQVNDLFSRKFGEAIGMGFPVKVPYRKITINPGCVVVDGMPPGVSFKAPSYLEISSMRRILDSAEFIKFTVIRPFPGLVINNQLVDQSESEGPVIQESAEPSQLEVPATEEIKETDGSSQIKQEPDPTW

SEQ ID NO: 6754 - protein, 437 aa, Homo sapiens
RSHFICDLDFFVLHYIFIDFVINMVLGKVKSLTISFDCLNDSNVPVYSSGDTVSGRVNLEVTGEIRVKSLKIHARGHAKVRWTESRNAGSNTAYTQNYTEEVEYFNHKDILIGHERDDDNSEEGFHTIHSGRHEYAFSFELPQTPLATSFEGRHGSVRYWVKAELHRPWLLPVKLKKEFTVFEHIDINTPSLLSPQAGTKEKTLCCWFCTSGPISLSAKIERKGYTPGESIQIFAEIENCSSRMVVPKAAIYQTQAFYAKGKMKEVKQLVANLRGESLSSGKTETWNGKLLKIPPVSPSILDCSIIRVEYSLMVYVDIPGAMDLFLNLPLVIGTIPLHPFGSRTSSVSSQCSMNMNWLSLSLPERPEAPPSYAEVVTEEQRRNNLAPVSACDDFERALQGPLFAYIQEFRFLPPPLYSEIDPNPDQSADDRPSCPSR

SEQ ID NO: 6755 - protein, 581 aa, Homo sapiens
MTSAVVDSGGTILELSSNGVENQEESEKVSEYPAVIVEPVPSARLEQGYAAQVLVYDDETYMMQDVAEEQEVETENVETVEASVHSSNAHCTDKTIEAAEALLHMESPTCLRDSRSPEFIHAAMRPDVITETVVEVSTEESEPMDTSPIPTSPDSHEPMKKKKVGRKPKTQQSPISNGSPELGIKKKPREGKGNTTYLWEFLLDLLQDKNTCPRYIKWTQREKGIFKLVDSKAVSKLWGKHKNKPDMNYETMGRALRYYYQRGILAKVEGQRLVYQFKDMPKNIVVIDDDKSETCNEDLAGTTDEKSLERVSLSAESLLKAASSVRSGKNSSPINCSRAEKGVARVVNITSPGHDASSRSPTTTASVSATAAPRTVRVAMQVPVVMTSLGQKISTVAVQSVNAGAPLITSTSPTTATSPKVVIQTIPTVMPASTENGDKITMQPAKIITIPATQLAQCQLQTKSNLTGSGSINIVGTPLAVRALTPVSIAHGTPVMRLSMPTQQASGQTPPRVISAVIKGPEVKSEAVAKKQEHDVKTLQLVEEKPADGNKTVTHVVVVSAPSAIALPVTMKTEGLVTCEK

SEQ ID NO: 6756 - protein, 533 aa, Homo sapiens
MATSLHEGPTNQLDLLIRAVEASVHSSNAHCTDKTIEAAEALLHMESPTCLRDSRSPVEVFVPPCVSTPEFIHAAMRPDVITETVVEVSTEESEPMDTSPIPTSPDSHEPMKKKKVGRKPKTQQSPISNGSPELGIKKKPREGKGNTTYLWEFLLDLLQDKNTCPRYIKWTQREKGIFKLVDSKAVSKLWGKHKNKPDMNYETMGRALRYYYQRGILAKVEGQRLVYQFKDMPKNIVVIDDDKSETCNEDLAGTTDEKSLERVSLSAESLLKAASSVRSGKNSSPINCSRAEKGVARVVNITSPGHDASSRSPTTTASVSATAAPRTVRVAMQVPVVMTSLGQKISTVAVQSVNAGAPLITSTSPTTATSPKVVIQTIPTVMPASTENGDKITMQPAKIITIPATQLAQCQLQTKSNLTGSGSINIVGTPLAVRALTPVSIAHGTPVMRLSMPTQQASGQTPPRVISAVIKGPEVKSEAVAKKQEHDVKTLQLVEEKPADGNKTVTHVVVVSAPSAIALPVTMKTEGLVTCEK

SEQ ID NO: 6757 - protein, 1079 aa, Homo sapiens
MDDDDDSCLLDLIGDPQALNYFLHGPSNKSSNDDLTNAGYSAANSNSIFANSSNADPKSSLKGVSNQLGEGPSDGLPLSSSLQFLEDELESSPLPDLTEDQPFDILQKSLQEANITEQTLAEEAYLDASIGSSQQFAQAQLHPSSSASFTQASNVSNYSGQTLQPIGVTHVPVGASFASNTVGVQHGFMQHVGISVPSQHLSNSSQISGSGQIQLIGSFGNHPSMMTINNLDGSQIILKGSGQQAPSNVSGGLLVHRQTPNGNSLFGNSSSSPVAQPVTVPFNSTNFQTSLPVHNIIIQRGLAPNSNKVPINIQPKPIQMGQQNTYNVNNLGIQQHHVQQGISFASASSPQGSVVGPHMSVNIVNQQNTRKPVTSQAVSSTGGSIVIHSPMGQPHAPQSQFLIPTSLSVSSNSVHHVQTINGQLLQTQPSQLISGQVASEHVMLNRNSSNMLRTNQPYTGPMLNNQNTAVHLVSGQTFAASGSPVIANHASPQLVGGQMPLQQASPTVLHLSPGQSSVSQGRPGFATMPSVTSMSGPSRFPAVSSASTAHPSLGSAVQSGSSGSNFTGDQLTQPNRTPVPVSVSHRLPVSSSKSTSTFSNTPGTGTQQQFFCQAQKKCLNQTSPISAPKTTDGLRQAQIPGLLSTTLPGQDSGSKVISASLGTAQPQQEKVVGSSPGHPAVQVESHSGGQKRPAAKQLTKGAFILQQLQRDQAHTVTPDKSHFRSLSDAVQRLLSYHVCQGSMPTEEDLRKVDNEFETVATQLLKRTQAMLNKYRCLLLEDAMRINPSAEMVMIDRMFNQEERASLSRDKRLALVDPEGFQADFCCSFKLDKAAHETQFGRSDQHGSKASSSLQPPAKAQGRDRAKTGVTEPMNHDQFHLVPNHIVVSAEGNISKKTECLGRALKFDKVGLVQYQSTSEEKASRREPLKASQCSPGPEGHRKTSSRSDHGTESKLSSILADSHLEMTCNNSFQDKSLRNSPKNEVLHTDIMKGSGEPQPDLQLTKSLETTFKNILELKKAGRQPQSDPTVSGSVELDFPNFSPMASQENCLEKFIPDHSEGVVETDSILEAAVNSILEC

SEQ ID NO: 6758 - protein, 761 aa, Homo sapiens
MRQDKLTGSLRRGGRCLKRQGGGVGTILSNVLKKRSCISRTAPRLLCTLEPGVDTKLKFTLEPSLGQNGFQQWYDALKAVARLSTGIPKEWRRKVWLTLADHYLHSIAIDWDKTMRFTFNERSNPDDDSMGIQIVKDLHRTGCSSYCGQEAEQDRVVLKRVLLAYARWNKTVGYCQGFNILAALILEVMEGNEGDALKIMIYLIDKVLPESYFVNNLRALSVDMAVFRDLLRMKLPELSQHLDTLQRTANKESGGGYEPPLTNVFTMQWFLTLFATCLPNQTVLKIWDSVFFEGSEIILRVSLAIWAKLGEQIECCETADEFYSTMGRLTQEMLENDLLQSHELMQTVYSMAPFPFPQLAELREKYTYNITPFPATVKPTSVSGRHSKARDSDEENDPDDEDAVVNAVGCLGPFSGFLAPELQKYQKQIKEPNEEQSLRSNNIAELSPGAINSCRSEYHAAFNSMMMERMTTDINALKRQYSRIKKKQQQQVHQVYIRADKGPVTSILPSQVNSSPVINHLLLGKKMKMTNRAAKNAVIHIPGHTGGKISPVPYEDLKTKLNSPWRTHIRVHKKNMPRTKSHPGCGDTVGLIDEQNEASKTNGLGAAEAFPSGCTATAGREGSSPEGSTRRTIEGQSPEPVFGDADVDVSAVQAKLGALELNQRDAAAETELRVHPPCQRHCPEPPSAPEENKATSKAPQGSNSKTPIFSPFPSVKPLRKSATARNLGLYGPTERTPTVHFPQMSRSFSKPGGGNSGTKKR

SEQ ID NO: 6759 - protein, 542 aa, Homo sapiens
MDDPRYGMCPLKGASGCPGAERSLLVQSYFEKGPLTFRDVAIEFSLEEWQCLDSAQQGLYRKVMLENYRNLVFLAGIALTKPDLITCLEQGKEPWNIKRHEMVAKPPVICSHFPQDLWAEQDIKDSFQEAILKKYGKYGHDNLQLQKGCKSVDECKVHKEHDNKLNQCLITTQSNIFQCDPSAKVFHTFSNSNRHKIRHTRKKPFKCKKCEKSFCMLLHLTQHKRFHITENSYQCKDCGKAFNWFSTLTTHRRIHTGEKPYKCEECGKAFNRSSHLTTHKIIHTGEKPYRCEECGKAFNRSSHLTTHKRIHTGVKPYKCTECGKAFNRSSHLTTHRIIHTGEKPYKCEECGKAFNQSSTLTTHKITHAGEKPYKCEECGKAFYRFSYLIKHKTSHTGEKFYKCEECGKGFNWSSALTKHKRIHTGEKPYKCEECGKAFNESSNLTTHKMIHTGEKPYKCDECGKAFNRSSQLTAHKMIHTGEKPYKCEECGKAFNRSSTLTKHKITHTGEKSYKWEECGKDFNQSLSLIKQNNSYWRETLQM

SEQ ID NO: 6760 - protein, 565 aa, Homo sapiens
EEGPLPLLTFATAPYHDQKPGTSGLRKKTYYFEEKPCYLENFIQSIFFSIDLKDRQGSSLVVGGDGRYFNKSAIETIVQMAAANGIGRLVIGQNGILSTPAVSCIIRKIKAIGGIILTASHNPGGPNGDFGIKFNISNGGPAPEAITDKIFQISKTIEEYAVCPDLKVDLGVLGKQQFDLENKFKPFTVEIVDSVEAYATMLRSIFDFSALKELLSGPNRLKIRIDAMHGVVGPYVKKILCEELGAPANSAVNCVPLEDFGGHHPDPNLTYAADLVETMKSGEHDFGAAFDGDGDRNMILGKHGFFVNPSDSVAVIAANIFSIPYFQQTGVRGFARSMPTSGALDRVASATKIALYETPTGWKFFGNLMDASKLSLCGEESFGTGSDHIREKDGLWAVLAWLSILATRKQSVEDILKDHWQKYGRNFFTRYDYEEVEAEGANKMMKDLEALMFDRSFVGKQFSANDKVYTVEKADNFEYSDPVDGSISRNQGLRLIFTDGSRIVFRLSGTGSAGATIRLYIDSYEKDVAKINQDPQVMLAPLISIALKVSQLQERTGRTAPTVIT

SEQ ID NO: 6761 - protein, 561 aa, Homo sapiens
VKIVTVKTQAYQDQKPGTSGLRKRVKVFQSSANYAENFIQSIISTVEPAQRQEATLVVGGDGRFYMKEAIQLIARIAAANGIGRLVIGQNGILSTPAVSCIIRKIKAIGGIILTASHNPGGPNGDFGIKFNISNGGPAPEAITDKIFQISKTIEEYAVCPDLKVDLGVLGKQQFDLENKFKPFTVEIVDSVEAYATMLRSIFDFSALKELLSGPNRLKIRIDAMHGVVGPYVKKILCEELGAPANSAVNCVPLEDFGGHHPDPNLTYAADLVETMKSGEHDFGAAFDGDGDRNMILGKHGFFVNPSDSVAVIAANIFSIPYFQQTGVRGFARSMPTSGALDRVASATKIALYETPTGWKFFGNLMDASKLSLCGEESFGTGSDHIREKDGLWAVLAWLSILATRKQSVEDILKDHWQKYGRNFFTRYDYEEVEAEGANKMMKDLEALMFDRSFVGKQFSANDKVYTVEKADNFEYSDPVDGSISRNQGLRLIFTDGSRIVFRLSGTGSAGATIRLYIDSYEKDVAKINQDPQVMLAPLISIALKVSQLQERTGRTAPTVIT

SEQ ID NO: 6762 - protein, 2342 aa, Homo sapiens
MITDAARHKLLVLTGQCFENTGELILQSGSFSFQNFIEIFTDQEIGELLSTTHPANKASLTLFCPEEGDWKNSNLDRHNLQDFINIKLNSASILPEMEGLSEFTEYLSESVEVPSPFDILEPPTSGGFLKLSKPCCYIFPGGRGDSALFAVNGFNMLINGGSERKSCFWKLIRHLDRVDSILLTHIGDDNLPGINSMLQRKIAELEEEQSQGSTTNSDWMKNLISPDLGVVFLNVPENLKNPEPNIKMKRSIEEACFTLQYLNKLSMKPEPLFRSVGNTIDPVILFQKMGVGKLEMYVLNPVKSSKEMQYFMQQWTGTNKDKAEFILPNGQEVDLPISYLTSVSSLIVWHPANPAEKIIRVLFPGNSTQYNILEGLEKLKHLDFLKQPLATQKDLTGQVPTPVVKQTKLKQRADSRESLKPAAKPLPSKSVRKESKEETPEVTKVNHVEKPPKVESKEKVMVKKDKPVKTETKPSVTEKEVPSKEEPSPVKAEVAEKQATDVKPKAAKEKTVKKETKVKPEDKKEEKEKPKKEVAKKEDKTPIKKEEKPKKEEVKKEVKKEIKKEEKKEPKKEVKKETPPKEVKKEVKKEEKKEVKKEEKEPKKEIKKLPKDAKKSSTPLSEAKKPAALKPKVPKKEESVKKDSVAAGKPKEKGKIKVIKKEGKAAEAVAAAVGTGATTAAVMAAAGIAAIGPAKELEAERSLMSSPEDLTKDFEELKAEEVDVTKDIKPQLELIEDEEKLKETEPVEAYVIQKEREVTKGPAESPDEGITTTEGEGECEQTPEELEPVEKQGVDDIEKFEDEGAGFEESSETGDYEEKAETEEAEEPEEDGEEHVCVSASKHSPTEDEESAKAEADAYIREKRESVASGDDRAEEDMDEAIEKGEAEQSEEEADEEDKAEDAREEEYEPEKMEAEDYVMAVVDKAAEAGGAEEQYGFLTTPTKQLGAQSPGREPASSIHDETLPGGSESEATASDEENREDQPEEFTATSGYTQSTIEISSEPTPMDEMSTPRDVMSDETNNEETESPSQEFVNITKYESSLYSQEYSKPADVTPLNGFSEGSKTDATDGKDYNASASTISPPSSMEEDKFSRSALRDAYCSEVKASTTLDIKDSISAVSSEKVSPSKSPSLSPSPPSPLEKTPLGERSVNFSLTPNEIKVSAEAEVAPVSPEVTQEVVEEHCASPEDKTLEVVSPSQSVTGSAGHTPYYQSPTDEKSSHLPTEVIEKPPAVPVSFEFSDAKDENERASVSPMDEPVPDSESPIEKVLSPLRSPPLIGSESAYESFLSADDKASGRGAESPFEEKSGKQGSPDQVSPVSEMTSTSLYQDKQEGKSTDFAPIKEDFGQEKKTDDVEAMSSQPALALDERKLGDVSPTQIDVSQFGSFKEDTKMSISEGTVSDKSATPVDEGVAEDTYSHMEGVASVSTASVATSSFPEPTTDDVSPSLHAEVGSPHSTEVDDSLSVSVVQTPTTFQETEMSPSKEECPRPMSISPPDFSPKTAKSRTPVQDHRSEQSSMSIEFGQESPEQSLAMDFSRQSPDHPTVGAGVLHITENGPTEVDYSPSDMQDSSLSHKIPPMEEPSYTQDNDLSELISVSQVEASPSTSSAHTPSQIASPLQEDTLSDVAPPRDMSLYASLTSEKVQSLEGEKLSPKSDISPLTPRESSPLYSPTFSDSTSAVKEKTATCHSSSSPPIDAASAEPYGFRASVLFDTMQHHLALNRDLSTPGLEKDSGGKTPGDFSYAYQKPEETTRSPDEEDYDYESYEKTTRTSDVGGYYYEKIERTTKSPSDSGYSYETIGKTTKTPEDGDYSYEIIEKTTRTPEEGGYSYDISEKTTSPPEVSGYSYEKTERSRRLLDDISNGYDDSEDGGHTLGDPSYSYETTEKITSFPESEGYSYETSTKTTRTPDTSTYCYETAEKITRTPQASTYSYETSDLCYTAEKKSPSEARQDVDLCLVSSCEYKHPKTELSPSFINPNPLEWFASEEPTEESEKPLTQSGGAPPPPGGKQQGRQCDETPPTSVSESAPSQTDSDVPPETEECPSITADANIDSEDESETIPTDKTVTYKHMDPPPAPVQDRSPSPRHPDVSMVDPEALAIEQNLGKALKKDLKEKTKTKKPGTKTKSSSPVKKSDGKSKPLAASPKPAGLKESSDKVSRVASPKKKESVEKAAKPTTTPEVKAARGEEKDKETKNAANASASKSAKTATAGPGTTKTTKSSAVPPGLPVYLDLCYIPNHSNSKNVDVEFFKRVRSSYYVVSGNDPAAEEPSRAVLDALLEGKAQWGSNMQVTLIPTHDSEVMREWYQETHEKQQDLNIMVLASSSTVVMQDESFPACKIEL

SEQ ID NO: 6763 - protein, 2468 aa, Homo sapiens
MATVVVEATEPEPSGSIANPAASTSPSLSHRFLDSKFYLLVVVGEIVTEEHLRRAIGNIELGIRSWDTNLIECNLDQELKLFVSRHSARFSPEVPGQKILHHRSDVLETVVLINPSDEAVSTEVRLMITDAARHKLLVLTGQCFENTGELILQSGSFSFQNFIEIFTDQEIGELLSTTHPANKASLTLFCPEEGDWKNSNLDRHNLQDFINIKLNSASILPEMEGLSEFTEYLSESVEVPSPFDILEPPTSGGFLKLSKPCCYIFPGGRGDSALFAVNGFNMLINGGSERKSCFWKLIRHLDRVDSILLTHIGDDNLPGINSMLQRKIAELEEEQSQGSTTNSDWMKNLISPDLGVVFLNVPENLKNPEPNIKMKRSIEEACFTLQYLNKLSMKPEPLFRSVGNTIDPVILFQKMGVGKLEMYVLNPVKSSKEMQYFMQQWTGTNKDKAEFILPNGQEVDLPISYLTSVSSLIVWHPANPAEKIIRVLFPGNSTQYNILEGLEKLKHLDFLKQPLATQKDLTGQVPTPVVKQTKLKQRADSRESLKPAAKPLPSKSVRKESKEETPEVTKVNHVEKPPKVESKEKVMVKKDKPVKTETKPSVTEKEVPSKEEPSPVKAEVAEKQATDVKPKAAKEKTVKKETKVKPEDKKEEKEKPKKEVAKKEDKTPIKKEEKPKKEEVKKEVKKEIKKEEKKEPKKEVKKETPPKEVKKEVKKEEKKEVKKEEKEPKKEIKKLPKDAKKSSTPLSEAKKPAALKPKVPKKEESVKKDSVAAGKPKEKGKIKVIKKEGKAAEAVAAAVGTGATTAAVMAAAGIAAIGPAKELEAERSLMSSPEDLTKDFEELKAEEVDVTKDIKPQLELIEDEEKLKETEPVEAYVIQKEREVTKGPAESPDEGITTTEGEGECEQTPEELEPVEKQGVDDIEKFEDEGAGFEESSETGDYEEKAETEEAEEPEEDGEEHVCVSASKHSPTEDEESAKAEADAYIREKRESVASGDDRAEEDMDEAIEKGEAEQSEEEADEEDKAEDAREEEYEPEKMEAEDYVMAVVDKAAEAGGAEEQYGFLTTPTKQLGAQSPGREPASSIHDETLPGGSESEATASDEENREDQPEEFTATSGYTQSTIEISSEPTPMDEMSTPRDVMSDETNNEETESPSQEFVNITKYESSLYSQEYSKPADVTPLNGFSEGSKTDATDGKDYNASASTISPPSSMEEDKFSRSALRDAYCSEVKASTTLDIKDSISAVSSEKVSPSKSPSLSPSPPSPLEKTPLGERSVNFSLTPNEIKVSAEAEVAPVSPEVTQEVVEEHCASPEDKTLEVVSPSQSVTGSAGHTPYYQSPTDEKSSHLPTEVIEKPPAVPVSFEFSDAKDENERASVSPMDEPVPDSESPIEKVLSPLRSPPLIGSESAYESFLSADDKASGRGAESPFEEKSGKQGSPDQVSPVSEMTSTSLYQDKQEGKSTDFAPIKEDFGQEKKTDDVEAMSSQPALALDERKLGDVSPTQIDVSQFGSFKEDTKMSISEGTVSDKSATPVDEGVAEDTYSHMEGVASVSTASVATSSFPEPTTDDVSPSLHAEVGSPHSTEVDDSLSVSVVQTPTTFQETEMSPSKEECPRPMSISPPDFSPKTAKSRTPVQDHRSEQSSMSIEFGQESPEQSLAMDFSRQSPDHPTVGAGVLHITENGPTEVDYSPSDMQDSSLSHKIPPMEEPSYTQDNDLSELISVSQVEASPSTSSAHTPSQIASPLQEDTLSDVAPPRDMSLYASLTSEKVQSLEGEKLSPKSDISPLTPRESSPLYSPTFSDSTSAVKEKTATCHSSSSPPIDAASAEPYGFRASVLFDTMQHHLALNRDLSTPGLEKDSGGKTPGDFSYAYQKPEETTRSPDEEDYDYESYEKTTRTSDVGGYYYEKIERTTKSPSDSGYSYETIGKTTKTPEDGDYSYEIIEKTTRTPEEGGYSYDISEKTTSPPEVSGYSYEKTERSRRLLDDISNGYDDSEDGGHTLGDPSYSYETTEKITSFPESEGYSYETSTKTTRTPDTSTYCYETAEKITRTPQASTYSYETSDLCYTAEKKSPSEARQDVDLCLVSSCEYKHPKTELSPSFINPNPLEWFASEEPTEESEKPLTQSGGAPPPPGGKQQGRQCDETPPTSVSESAPSQTDSDVPPETEECPSITADANIDSEDESETIPTDKTVTYKHMDPPPAPVQDRSPSPRHPDVSMVDPEALAIEQNLGKALKKDLKEKTKTKKPGTKTKSSSPVKKSDGKSKPLAASPKPAGLKESSDKVSRVASPKKKESVEKAAKPTTTPEVKAARGEEKDKETKNAANASASKSAKTATAGPGTTKTTKSSAVPPGLPVYLDLCYIPNHSNSKNVDVEFFKRVRSSYYVVSGNDPAAEEPSRAVLDALLEGKAQWGSNMQVTLIPTHDSEVMREWYQETHEKQQDLNIMVLASSSTVVMQDESFPACKIEL

SEQ ID NO: 6764 - protein, 172 aa, Homo sapiens
MKDYSKLGVHDMNDRKRLFQLIKIIKIMQEEDKAVSIPERHLQTSSLRIKSQELRSGPRRQLNFDSPADNKDRNASNDGFEMCSLSDFSANEQKSTYLKVLEHMLPDDSQYHTKTGILNATAGDSYVQTEISTSLFSPNYLSAILGDCDIPIIQRISHVSGYNYGIPHSCIR

SEQ ID NO: 6765 - protein, 971 aa, Homo sapiens
MSNVSEERRKRQQNIKEGLQFIQSPLSYPGTQEQYAVYLRALVRNLFNEGNDVYREHDWNNSISQYTEALNIADYAKSEEILIPKEIIEKLYINRIACYSNMGFHDKVLEDCNIVLSLNASNCKALYRKSKALSDLGRYKKAYDAVAKCSLAVPQDEHVIKLTQELAQKLGFKIRKAYVRAELSLKSVPGDGATKALNHSVEDIEPDLLTPRQEAVPVVSLPAPSFSHEVGSELASVPVMPLTSILPLQVEESALPSAVLANGGKMPFTMPEAFLDDGDMVLGDELDDLLDSAPETNETVMPSALVRGPLQTASVSPSMPFSASLLGTLPIGARYAPPPSFSEFYPPLTSSLEDFCSSLNSFSMSESKRDLSTSTSREGTPLNNSNSSLLLMNGPGSLFASENFLGISSQPRNDFGNFFGSAVTKPSSSVTPRHPLEGTHELRQACQICFVKSGPKLMDFTYHANIDHKCKKDILIGRIKNVEDKSWKKIRPRPTKTNYEGPYYICKDVAAEEECRYSGHCTFAYCQEEIDVWTLERKGAFSREAFFGGNGKINLTVFKLLQEHLGEFIFLCEKCFDHKPRMISKRNKDNSTACSHPVTKHEFEDNKCLVHILRETTVKYSKIRSFHGQCQLDLCRHEVRYGCLREDECFYAHSLVELKVWIMQNETGISHDAIAQESKRYWQNLEANVPGAQVLGNQIMPGFLNMKIKFVCAQCLRNGQVIEPDKNRKYCSAKARHSWTKDRRAMRVMSIERKKWMNIRPLPTKKQMPLQFDLCNHIASGKKCQYVGNCSFAHSPEEREVWTYMKENGIQDMEQFYELWLKSQKNEKSEDIASQSNKENGKQIHMPTDYAEVTVDFHCWMCGKNCNSEKQWQGHISSEKHKEKVFHTEDDQYCWQHRFPTGYFSICDRYMNGTCPEGNSCKFAHGNAELHEWEERRDALKMKLNKARKDHLIGPNDNDFGKYSFLFKDLN

SEQ ID NO: 6766 - protein, 673 aa, Homo sapiens [sequence omitted]

SEQ ID NO: 6767 - protein, 446 aa, Homo sapiens
MKNALIPRIKNACLQTSSLAVRVNSLVCLGKILEYLDKWFVLDDILPFLQQIPSKEPAVLMGILGIYKCTFTHKKLGITKEQLAGKVLPHLIPLSIENNLNLNQFNSFISVIKEMLNRLESEHKTKLEQLHIMQEQQKSLDIGNQMNVSEEMKVTNIGNQQIDKVFNNIGADLLTGSESENKEDGLQNKHKRASLTLEEKQKLAKEQEQAQKLKSQQPLKPQVHTPVATVKQTKDLTDTLMDNMSSLTSLSVSTPKSSASSTFASVPSMGIGMMFSTPTDNTKRNLTNGLNANMGFQTSGFNMPVNTNQNFYSSPSTVGVTKMTLGTPPTLPNFNALSVPPAGAKQTQQRPTDMSALNNLFGPQKPKVSMNQLSQQKPNQWLNQFVPPQGSPTMGSSVMGTQMNVIGQSAFGMQGNPFFNPQNFAQPPTTMTNSSSASNDLKDLFG

SEQ ID NO: 6768 - protein, 796 aa, Homo sapiens
SLMSGDIGDYKLYDVETKYGLLQVSEGLSFLHSSVKMVHGNITPENIILNKSGAWKIMGFDFCVSSTNPSEQEPKFPCKEWDPNLPSLCLPNPEYLAPEYILSVSCETASDMYSLGTVMYAVFNKGKPIFEVNKQDIYKSFSRQLDQLSRLGSSSLTNIPEEVREHVKLLLNVTPTVRPDADQMTKIPFFDDVGAVTLQYFDTLFQRDNLQKSQFFKGLPKVLPKLPKRVIVQRILPCLTSEFVNPDMVPFVLPNVLLIAEECTKEEYVKLILPELGPVFKQQEPIQASNMILLIFLQKMDLLLTKTPPDEIKNSVLPMVYRALEAPSIQIQELCLNIIPTFANLIDYPSMKNALIPRIKNACLQTSSLAVRVNSLVCLGKILEYLDKWFVLDDILPFLQQIPSKEPAVLMGILGIYKCTFTHKKLGITKEQLAGKVLPHLIPLSIENNLNLNQFNSFISVIKEMLNRLESEHKTKLEQLHIMQEQQKSLDIGNQMNVSEEMKVTNIGNQQIDKVFNNIGADLLTGSESENKEDGLQNKHKRASLTLEEKQKLAKEQEQAQKLKSQQPLKPQVHTPVATVKQTKDLTDTLMDNMSSLTSLSVSTPKSSASSTFTSVPSMGIGMMFSTPTDNTKRNLTNGLNANMGFQTSGFNMPVNTNQNFYSSPSTVGVTKMTLGTPPTLPNFNALSVPPAGAKQTQQRPTDMSALNNLFGPQKPKVSMNQLSQQKPNQWLNQFVPPQGSPTMGSSVMGTQMNVIGQSAFGMQGNPFFNPQNFAQPPTTMTNSSSASNDLKDLFG

SEQ ID NO: 6769 - protein, 1057 aa, Homo sapiens [sequence omitted]

SEQ ID NO: 6770 - protein, 1061 aa, Homo sapiens
MMKFRFRRQGADPQREKLKQELFAFNKTVEHGFPNQPSALAFDPELRIMAIGTRSGAVKIYGAPGVEFTGLHRDAATVTQMHFLTGQGRLLSLLDDSSLHLWEIVHHNGCAHLEEALSFQLPSRPGFDGASAPLSLTRVTVVLLVAASDIAALGTEGSSVFFLDVTTLTLLEGQTLAPGEVLRSVPDDYRCGKALGPVESLQGHLRDPTKILIGYSRGLLVIWNQASQCVDHIFLGNQQLESLCWGRDSSTVVSSHSDGSYAVWSVDAGSFPTLQPTVATTPYGPFPCKAINKILWRNCESGGHFIIFSGGMPRASYGDRHCVSVLRAETLVTLDFTSRIIDFFTVHSTRPEDEFDDPQALAVLLEEELVVLDLQTPGWPAVPAPYLAPLHSSAITCSAHVASVPAKLWARIVSAGEQQSPQPVSSALSWPITGGRNLAQEPSQRGLLLTGHEDGTVRFWDASGVALRPLYKLSTAGLFQTDCEHADSLAQAAEDDWPPFRKVGCFDPYSDDPRLGVQKVALCKYTAQMVVAGTAGQVLVLELSDVPVEQAVSVAIIDLLQDREGFTWKGHERLSPRTGPLPWPAGFQPRVLVQCLPPAAVTAVTLHTEWSLVAFGTSHGFGLFDYQRKSPVLARCTLHPNDSLAMEGPLSRVKSLKKSLRQSFRRIRKSRVSGKKRAANASSKLQEANAQLAEQACPHDVEMTPVQRRIEPRSADDSLSGVVRCLYFADTFLRDGAHHGPTMWAGTNSGSVFAYALEVPAAAVGGEKRPEQAVEAVLGKEVQLMHRAPVVAIAVLDGRGRPLPEPYEASRDLAQAPDMQGGHAVLIASEEQFKVFTLPKVSAKTKFKLTAHEGCRVRKVALATFASVACEDYAETCLACLTNLGDVHVFSVPGLRPQVHYSCIRKEDISGIASCVFTRHGQGFYLISPSEFERFSLSARNITEPLCSLDINWPRDATQASYRIRESPKLSQANGTPSILLAPQSLDGSPDPAHSMGPDTPEPPEAALSPMSIDSATSADTTLDTTGDVTVEDVKDFLGSSEESEKNLRNLAEDEAHACAI

SEQ ID NO: 6771 - protein, 1032 aa, Homo sapiens [sequence omitted]

SEQ ID NO: 6772 - protein, 599 aa, Homo sapiens
MENCLGESRHEVEKSEISENTDASGKIEKYNVPLNRLKMMFEKGEPTQTKILRAQSRSASGRKISENSYSLDDLEIGPGQLSSSTFDSEKNESRRNLELPRLSETSIKDRMAKYQAAVSKQSSSTNYTNELKASGGEIKIHKMEQKENVPPGPEVCITHQEGEKISANENSLAVRSTPAEDDSRDSQVKSEVQQPVHPKPLSPDSRASSLSESSPPKAMKKFQAPARETCVECQKTVYPMERLLANQQVFHISCFRCSYCNNKLSLGTYASLHGRIYCKPHFNQLFKSKGNYDEGFGHRPHKDLWASKNENEEILERPAQLANARETPHSPGVEDAPIAKVGVLAASMEAKASSQQEKEDKPAETKKLRIAWPPPTELGSSGSALEEGIKMSKPKWPPEDEISKPEVPEDVDLDLKKLRRSSSLKERSRPFTVAASFQSTSVKSPKTVSPPIRKGWSMSEQSEESVGGRVAERKQVENAKASKKNGNVGKTTWQNKESKGETGKRSKEGHSLEMENENLVENGADSDEDDNSFLKQQSPQEPKSLNWSSFVDNTFAEEFTTQNQKSQDVELWEGEVVKELSVEEQIKRNRYYDEDEDEE

SEQ ID NO: 6773 - protein, 759 aa, Homo sapiens
MESSPFNRRQWTSLSLRVTAKELSLVNKNKSSAIVEIFSKYQKAAEETNMEKKRSNTENLSQHFRKGTLTVLKKKWENPGLGAESHTDSLRNSSTEIRHRADHPPAEVTSHAASGAKADQEEQIHPRSRLRSPPEALVQGRYPHIKDGEDLKDHSTESKKMENCLGESRHEVEKSEISENTDASGKIEKYNVPLNRLKMMFEKGEPTQTKILRAQSRSASGRKISENSYSLDDLEIGPGQLSSSTFDSEKNESRRNLELPRLSETSIKDRMAKYQAAVSKQSSSTNYTNELKASGGEIKIHKMEQKENVPPGPEVCITHQEGEKISANENSLAVRSTPAEDDSRDSQVKSEVQQPVHPKPLSPDSRASSLSESSPPKAMKKFQAPARETCVECQKTVYPMERLLANQQVFHISCFRCSYCNNKLSLGTYASLHGRIYCKPHFNQLFKSKGNYDEGFGHRPHKDLWASKNENEEILERPAQLANARETPHSPGVEDAPIAKVGVLAASMEAKASSQQEKEDKPAETKKLRIAWPPPTELGSSGSALEEGIKMSKPKWPPEDEISKPEVPEDVDLDLKKLRRSSSLKERSRPFTVAASFQSTSVKSPKTVSPPIRKGWSMSEQSEESVGGRVAERKQVENAKASKKNGNVGKTTWQNKESKGETGKRSKEGHSLEMENENLVENGADSDEDDNSFLKQQSPQEPKSLNWSSFVDNTFAEEFTTQNQKSQDVELWEGEVVKELSVEEQIKRNRYYDEDEDEE

SEQ ID NO: 6774 - protein, 705 aa, Homo sapiens
MTIEDLPDFPLEGNPLFGRYPFIFSASDTPVIFSISAAPMPSDCEFSFFDPNDASCQEILFDPKTSVSELFAILRQWVPQVQQNIDIIGNEILKRGCNVNDRDGLTDMTLLHYTCKSGAHGIGDVETAVKFATQLIDLGADISLRSRWTNMNALHYAAYFDVPELIRVILKTSKPKDVDATCSDFNFGTALHIAAYNLCAGAVKCLLEQGANPAFRNDKGQIPADVVPDPVDMPLEMADAAATAKEIKQMLLDAVPLSCNISKAMLPNYDHVTGKAMLTSLGLKLGDRVVIAGQKVGTLRFCGTTEFASGQWAGIELDEPEGKNNGSVGKVQYFKCAPKYGIFAPLSKISKAKGRRKNITHTPSTKAAVPLIRSQKIDVAHVTSKVNTGLMTSKKDSASESTLSLPPGEELKTVTEKDVALLGSVSSCSSTSSLEHRQSYPKKQNAISSNKKTMSKSPSLSSRASAGLNSSATSTANNSRCEGELRLGERVLVVGQRLGTIRFFGTTNFAPGYWYGIELEKPHGKNDGSVGGVQYFSCSPRYGIFAPPSRVQRVTDSLDTLSEISSNKQNHSYPGFRRSFSTTSASSQKEINRRNAFSKSKAALRRSWSSTPTAGGIEGSVKLHEGSQVLLTSSNEMGTVRYVGPTDFASGIWLGLELRSAKGKNDGSVGDKRYFTCKPNHGVLVRPSRVTYRGINGSKLVDENC

SEQ ID NO: 6775 - protein, 158 aa, Homo sapiens
MVNHTMFFDVAVDSEPLDHVSFELFAEKFPKTAENVRALSTEEKGFGYKGPCFHRIIPAFMCQGGDFTHHNGTGGKSIYGEKFEDEKFILKRTGPGILSMANSGPNTNCSVFHLHCQDGVVGWQACSLWQGERRHEYFGGHRAIWVQEWQDQQEDHHC

SEQ ID NO: 6776 - protein, 160 aa, Homo sapiens
MMNNTDFLMLNNPWNKLCLVSMDFCFPLDFVSNLFWIFASKFIIVTGQIKADFKRTSWEAKAEGSLEPGRLKLQLASIVPLYSSLVTAGPASKIIILKRTSLPTVSPSNERAYLLPVSFTDLAHVFYLSYFSINAKSNSFSLDIIIALGIPHNTQAHFNH

SEQ ID NO: 6777 - protein, 61 aa, Homo sapiens
MDPNCSCAAGDSCTCAGSCKCKECKCTSCKKSCCSCCPMSCAKCAQGCICKGASEKCSCCA

SEQ ID NO: 6778 - protein, 61 aa, Homo sapiens
MDPNCSCAAGDSCTCAGSCKCKECKCTSCKKSCCSCCPVGCAKCAQGCICKGASDKCSCCA

SEQ ID NO: 6779 - protein, 470 aa, Homo sapiens
MGKPWLRALQLLLLLGASWARAGAPRCTYTFVLPPQKFTGAVCWSGPASTRATPEAANASELAALRMRVGRHEELLRELQRLAAADGAVAGEVRALRKESRGLSARLGQLRAQLQHEAGPGAGPGADLGAEPAAALALLGERVLNASAEAQRAAARFHQLDVKFRELAQLVTQQSSLIARLERLCPGGAGGQQQVLPPPPLVPVVPVRLVGSTSDTSRMLDPAPEPQRDQTQRQQEPMASPMPAGHPAVPTKPVGPWQDCAEARQAGHEQSGVYELRVGRHVVSVWCEQQLEGGGWTVIQRRQDGSVNFFTTWQHYKAGFGRPDGEYWLGLEPVYQLTSRGDHELLVLLEDWGGRGARAHYDGFSLEPESDHYRLRLGQYHGDAGDSLSWHNDKPFSTVDRDRDSYSGNCALYQRGGWWYHACAHSNLNGVWHHGGHYRSRYQDGVYWAEFRGGAYSLRKAAMLIRPLKL

SEQ ID NO: 6780 - protein, 470 aa, Homo sapiens
MGKPWLRALQLLLLLGASWARAGAPRCTYTFVLPPQKFTGAVCWSGPASTRATPEAANASELAALRMRVGRHEELLRELQRLAAADGAVAGKVRALRKESRGLSARLGQLRAQLQHEAGPGAGPGADLGAEPAAALALLGERVLNASAEAQRAAARFHQLDVKFRELAQLVTQQSSLIARLERLCPGGAGGQQQVLPPPPLVPVVPVRLVGSTSDTSRMLDPAPEPQRDQTQRQQEPMASPMPAGHPAVPTKPVGPWQDCAEARQAGHEQSGVYELRVGRHVVSVWCEQQLEGGGWTVIQRRQDGSVNFFTTWQHYKAGFGRPDGEYWLGLEPVYQLTSRGDHELLVLLEDWGGRGARAHYDGFSLEPESDHYRLRLGQYHGDAGDSLSWHNDKPFSTVDRDRDSYSGNCALYQRGGWWYHACAHSNLNGVWHHGGHYRSRYQDGVYWAEFRGGAYSLRKAAMLIRPLKL

SEQ ID NO: 6781 - protein, 336 aa, Homo sapiens
MKTLMRHGLAVCLALTTMCTSLLLVYSSLGGQKERPPQQQQQQQQQQQQASATGSSQPAAESSTQQRPGVPAGPRPLDGYLGVADHKPLKMHCRDCALVTSSGHLLHSRQGSQIDQTECVIRMNDAPTRGYGRDVGNRTSLRVIAHSSIQRILRNRHDLLNVSQGTVFIFWGPSSYMRRDGKGQVYNNLHLLSQVLPRLKAFMITRHKMLQFDELFKQETGKDRKISNTWLSTGWFTMTIALELCDRINVYGMVPPDFCRDPNHPSVPYHYYEPFGPDECTMYLSHERGRKGSHHRFITEKRVFKNWARTFNIHFFQPDWKPESLAINHPENKPVF

SEQ ID NO: 6782 - protein, 661 aa, Homo sapiens
MAFDVSCFFWVVLFSAGCKVITSWDQMCIEKEANKTYNCENLGLSEIPDTLPNTTEFLEFSFNFLPTIHNRTFSRLMNLTFLDLTRCQINWIHEDTFQSHHQLSTLVLTGNPLIFMAETSLNGPKSLKHLFLIQTGISNLEFIPVHNLENLESLYLGSNHISSIKFPKDFPARNLKVLDFQNNAIHYISREDMRSLEQAINLSLNFNGNNVKGIELGAFDSTVFQSLNFGGTPNLSVIFNGLQNSTTQSLWLGTFEDIDDEDISSAMLKGLCEMSVESLNLQEHRFSDISSTTFQCFTQLQELDLTATHLKGLPSGMKGLNLLKKLVLSVNHFDQLCQISAANFPSLTHLYIRGNVKKLHLGVGCLEKLGNLQTLDLSHNDIEASDCCSLQLKNLSHLQTLNLSHNEPLGLQSQAFKECPQLELLDLAFTRLHINAPQSPFQNLHFLQVLNLTYCFLDTSNQHLLAGLPVLRHLNLKGNHFQDGTITKTNLLQTVGSLEVLILSSCGLLSIDQQAFHSLGKMSHVDLSHNSLTCDSIDSLSHLKGIYLNLAANSINIISPRLLPILSQQSTINLSHNPLDCTCSNIHFLTWYKENLHKLEGSEETTCANPPSLRGVKLSDVKLSCGITAIGIFFLIVFLLLLAILLFFAVKYLLRWKYQHI

SEQ ID NO: 6783 - protein, 1848 aa, Homo sapiens
MRRQWGALLLGALLCAHVLPTCSPLDFHCDNGKCIRRSWVCDGDNDCEDDSDEQDCPPRECEEDEFPCQNGYCIRSLWHCDGDNDCGDNSDEQCDMRKCSDKEFRCSDGSCIAEHWYCDGDTDCKDGSDEENCPSAVPAPPCNLEEFQCAYGRCILDIYHCDGDDDCGDWSDESDCCEYSGQLGASHQPCRSGEFMCDSGLCINAGWRCDGDADCDDQSDERNCKQFRCHSGRCVRLSWRCDGEDDCADNSDEENCENTGSPQCALDQFLCWNGRCIGQRKLCNGVNDCGDNSDESPQQNCRPRTGEENCNVNNGGCAQKCQMVRGAVQCTCHTGYRLTEDGHTCQDVNECAEEGYCSQGCTNSEGAFQCWCETGYELRPDRRSCKALGPEPVLLFANRIDIRQVLPHRSEYTLLLNNLENAIALDFHHRRELVFWSDVTLDRILRANLNGSNVEEVVSTGLESPGGLAVDWVHDKLYWTDSGTSRIEVANLDGAHRKVLLWQNLEKPRAIALHPMEGTIYWTDWGNTPRIEASSMDGSGRRIIADTHLFWPNGLTIDYAGRRMYWVDAKHHVIERANLDGSHRKAVISQVFEDSLYWTDWHTKSINSANKFTGKNQEIIRNKLHFPMDIHTLHPQRQPAGKNRCGDNNGGCTHLCLPSGQNYTCACPTGFRKISSHACAQSLDKFLLFARRMDIRRISFDTEDLSDDVIPLADVRSAVALDWDSRDDHVYWTDVSTDTISRAKWDGTGQEVVVDTSLESPAGLAIDWVTNKLYWTDAGTDRIEVANTDGSMRTVLIWENLDRPRDIVVEPMGGYMYWTDWGASPKIERAGMDASGRQVIISSNLTWPNGLAIDYGSQRLYWADAGMKTIEFAGLDGSKRKVLIGSQLPHPFGLTLYGERIYWTDWQTKSIQSADRLTGLDRETLQENLENLMDIHVFHRRRPPVSTPCAMENGGCSHLCLRSPNPSGFSCTCPTGINLLSDGKTCSPGMNSFLIFARRIDIRMVSLDIPYFADVVVPINITMKNTIAIGVDPQEGKVYWSDSTLHRISRANLDGSQHEDIITTGLQTTDGLAVDAIGRKVYWTDTGTNRIEVGNLDGSMRKVLVWQNLDSPRAIVLYHEMGFMYWTDWGENAKLERSGMDGSDRAVLINNNLGWPNGLTVDKASSQLLWADAHTERIEAADLNGANRHTLVSPVQHPYGLTLLDSYIYWTDWQTRSIHRADKGTGSNVILVRSNLPGLMDMQAVDRAQPLGFNKCGSRNGGCSHLCLPRPSGFSCACPTGIQLKGDGKTCDPSPETYLLFSSRGSIRRISLDTSDHTDVHVPVPELNNVISLDYDSVDGKVYYTDVFLDVIRRADLNGSNMETVIGRGLKTTDGLAVDWVARNLYWTDTGRNTIEASRLDGSCRKVLINNSLDEPRAIAVFPRKGYLFWTDWGHIAKIERANLDGSERKVLINTDLGWPNGLTLDYDTRRIYWVDAHLDRIESADLNGKLRQVLVSHVSHPFALTQQDRWIYWTDWQTKSIQRVDKYSGRNKETVLANVEGLMDIIVVSPQRQTGTNACGVNNGGCTHLCFARASDFVCACPDEPDSRPCSLVPGLVPPAPRATGMSEKSPVLPNTPPTTLYSSTTRTRTSLEEVEGRCSERDARLGLCARSNDAVPAAPGEGLHISYAIGGLLSILLILVVIAALMLYRHKKSKFTDPGMGNLTYSNPSYRTSTQEVKIEAIPKPAMYNQLCYKKEGGPDHNYTKEKIKIVEGICLLSGDDAEWDDLKQLRSSRGGLLRDHVCMKTDTVSIQASSGSLDDTETEQLLQEEQSECSSVHTAATPERRGSLPDTGWKHERKLSSESQV

SEQ ID NO: 6784 - protein, 455 aa, Homo sapiens
MARKALKLASWTSMALAASGIYFYSNKYLDPNDFGAVRVGRAVATTAVISYDYLTSLKSVPYGSEEYLQLRSKIHDLFQSFDDTPLGTASLAQVHKAVLHDGRTVAVKVQHPKVRAQSSKDILLMEVLVLAVKQLFPEFEFMWLVDEAKKNLPLELDFLNEGRNAEKVSQMLRHFDFLKVPRIHWDLSTERVLLMEFVDGGQVNDRDYMERNKIDVNEISRHLGKMYSEMIFVNGFVHCDPHPGNVLVRKHPGTGKAEIVLLDHGLYQMLTEEFRLNYCHLWQSLIWTDMKRVKEYSQRLGAGDLYPLFACMLTARSWDSVNRGISQAPVTATEDLEIRNNAANYLPQISHLLNHVPRQMLLILKTNDLLRGIEAALGTRASASSFLNMSRCCIRALAEHKKKNTCSFFRRTQISFSEAFNLWQINLHELILRVKGLKLADRVLALICWLFPAPL

SEQ ID NO: 6785 - protein, 1465 aa, Homo sapiens
MLLSPSLLLLLLLGGAAGCAEGVAAALTPERLLEWQDKGIFVIQSESLKKCIQAGKSVLTLGRTGSKQANKHMLWKWVSNHGLFNIGGSGCLGLNFSAPEQPLSLYECDSTLVSLRWRCNRKMITGPLQYSVQVAHDNTVVASRKYIHKWISYGSGGGDICEYLHKDLHTIKGNTHGMPCMFPFQYNHQWHHECTREGREDDLLWCATTSRYERDEKWGFCPDPTSAEVGCDTIWEKDLNSHICYQFNLLSSLSWSEAHSSCQMQGGTLLSITDETEENFIREHMSSKTVEVWVGLNQLDEDAGWQWSDGTPLNYLNWSPEVNFEPFVEDHCGTFSSFMPSAWRSRDCESTLPYICKKYLNHIDHEIVEKDAWKYYATHCEPGWNPYNRNCYKLQKEEKTWHEALRSCQADNSALIDITSLAEVEFLVTLLGDENASETWIGLSSNKIPVSFEWSNDSSVIFTNWHTLEPHIFPNRSQLCVSAEQSEGHWKVKNCEERLFYICKKAGHVLSDAESGCQEGWEETCGFCYKIDTVLRSFDQASSGYYCPPALVTITNRFEQAFITSLISSVVKMKDSYFWIALQDQNDTGEYTWKPVGQKPEPVQYTHWNTHQPRYSGGCVAMRGRHPLGRWEVKHCRHFKAMSLCKQPVENQEKAEYEERWPFHPCYLDWESEPGLASCFKVFHSEKVLMKRTWREAEAFCEEFGAHLASFAHIEEENFVNELLHPKFNWTEERQFWIGFNKRNPLNAGSWEWSDRTPVVSSFLDNTYFGEDARNCAVYKPNKTLLPLHCGSKREWICKIPRDVKPKIPFWYQYDVPWLFYQDAEYLFHTFASEWLNFEFVCSWLHSDLLTIHSAHEQEFIHSKIKALSKYGASWWIGLQEERANDEFRWRDGTPVIYQNWDTGRERTVNNQSQRCGFISSITGLWGSEECSVSMPSICKRKKVWLIEKKKDTPKQHGTCPKGWLYFNYKCLLLNIPKDPSSWKNWTHAQHFCAEEGGTLVAIESEVEQAFITMNLFGQTTSVWIGLQNDDYETWLNGKPVVYSNWSPFDIINIPSHNTTEVQKHIPLCALLSSNPNFHFTGKWYFEDCGKEGYGFVCEKMQDTSGHGVNTSDMYPMPNTLEYGNRTYKIINANMTWYAAIKTCLMHKAQLVSITDQYHQSFLTVVLNRLGYAHWIGLFTTDNGLNFDWSDGTKSSFTFWKDEESSLLGDCVFADSNGRWHSTACDSFLQGAICHVPPETRQSEHPELCSETSIPWIKFKSNCYKFSTVLDSMSFEAAHEFCKKEGSNLLTIKDEAENAFLLEELFAFGSSVQMVWLNAQFDGNNETIKWFDGTPTDQSNWGIRKPDTDYFKPHHCVALRIPEGLWQLSPCQEKKGFICKMEADIHTAEALPEKGPSHSIIPLAVVLTLIVIVAICTLSFCIYKHNGGFFRRLAGFRNPYYPATNFSTVYLEENILISDLEKSDQ

SEQ ID NO: 6786 - protein, 3075 aa, Homo sapiens
MRGGVLLVLLLCVAAQCRQRGLFPAILNLASNAHISTNATCGEKGPEMFCKLVEHVPGRPVRNPQCRICDGNSANPRERHPISHAIDGTNNWWQSPSIQNGREYHWVTITLDLRQVFQVAYVIIKAANAPRPGNWILERSLDGTTFSPWQYYAVSDSECLSRYNITPRRGPPTYRADDEVICTSYYSRLVPLEHGEIHTSLINGRPSADDLSPKLLEFTSARYIRLRLQRIRTLNADLMTLSHREPKELDPIVTRRYYYSIKDISVGGMCICYGHASSCPWDETTKKLQCQCEHNTCGESCNRCCPGYHQQPWRPGTVSSGNTCEACNCHNKAKDCYYDESVAKQKKSLNTAGQFRGGGVCINCLQNTMGINCETCIDGYYRPHKVSPYEDEPCRPCNCDPVGSLSSVCIKDDLHSDLHNGKQPGQCPCKEGYTGEKCDRCQLGYKDYPTCVSCGCNPVGSASDEPCTGPCVCKENVEGKACDRCKPGFYNLKEKNPRGCSECFCFGVSDVCSSLSWPVGQVNSMSGWLVTDLISPRKIPSQQDALGGRHQVSINNTAVMQRLAPKYYWAAPEAYLGNKLTAFGGFLKYTVSYDIPVETVDSNLMSHADVIIKGNGLTLSTQAEGLSLQPYEEYLNVVRLVPENFQDFHSKRQIDRDQLMTVLANVTHLLIRATYNSAKMALYRLESVSLDIASSNAIDLVVAADVEHCECPQGYTGTSCESCLSGYYRVDGILFGGICQPCECHGHAAECNVHGVCIACAHNTTGVHCEQCLPGFYGEPSRGTPGDCQPCACPLTIASNNFSPTCHLNDGDEVVCDWCAPGYSGAWCERCADGYYGNPTVPGESCVPCDCSGNVDPSEAGHCDSVTGECLKCLGNTDGAHCERCADGFYGDAVTAKNCRACECHVKGSHSAVCHLETGLCDCKPNVTGQQCDQCLHGYYGLDSGHGCRPCNCSVAGSVSDGCTDEGQCHCVPGVAGKRCDRCAHGFYAYQDGSCTPCDCPHTQNTCDPETGECVCPPHTQGGKCEECEDGHWGYDAEVGCQACNCSLVGSTHHRCDVVTGHCQCKSKFGGRACDQCSLGYRDFPDCVPCDCDLRGTSGDACNLEQGLCGCVEETGACPCKENVFGPQCNECREGTFALRADNPLGCSPCFCSGLSHLCSELEDYVRTPVTLGSDQPLLRVVSQSNLRGTTEGVYYQAPDFLLDAATVRQHIRAEPFYWRLPQQFQGDQLMAYGGKLKYSVAFYSLDGVGTSNFEPQVLIKGGRIRKQVIYMDAPAPENGVRQEQEVAMRENFWKYFNSVSEKPVTREDFMSVLSDIEYILIKASYGQGLQQSRISDISVEVGRKAEKLHPEEEVASLLENCVCPPGTVGFSCQDCAPGYHRGKLPAGSDRGPRPLVAPCVPCSCNNHSDTCDPNTGKCLNCGDNTAGDHCDVCTSGYYGKVTGSASDCALCACPHSPPASFSPTCVLEGDHDFRCDACLLGYEGKHCERCSSSYYGNPQTPGGSCQKCDCNRHGSVHGDCDRTSGQCVCRLGASGLRCDECEPRHILMETDCVSCDDECVGVLLNDLDEIGDAVLSLNLTGIIPVPYGILSNLENTTKYLQESLLKENMQKDLGKIKLEGVAEETDNLQKKLTRMLASTQKVNRATERIFKESQDLAVAIERLQMSITEIMEKTTLNQTLDEDFLLPNSTLQNMQQNGTSLLEIMQIRDFTQLHQNATLELKAAEDLLSQIQENYQKPLEELEVLKEAASHVLSKHNNELKAAEALVREAEAKMQESNHLLLMVNANLREFSDKKLHVQEEQNLTSELIVQGRGLIDAAAAQTDAVQDALEHLEDHQDKLLLWSAKIRHHIDDLVMHMSQRNAVDLVYRAEDHATEFQRLADVLYSGLENIRNVSLNATSAAYVHYNIQSLIEESEELARDAHRTVTETSLLSESLVSNGKAAVQRSSRFLKEGNNLSRKLPGIALELSELRNKTNRFQENAVEITRQTNESLLILRAIPEGIRDKGAKTKELATSASQSAVSTLRDVAGLSQELLNTSASLSRVNTTLRETHQLLQDSTMATLLAGRKVKDVEIQANLLFDRLKPLKMLEENLSRNLSEIKLLISQARKQAASIKVAVSADRDCIRAYQPQISSTNYNTLTLNVKTQEPDNLLFYLGSSTASDFLAVEMRRGRVAFLWDLGSGSTRLEFPDFPIDDNRWHSIHVARFGNIGSLSVKEMSSNQKSPTKTSKSPGTANVLDVNNSTLMFVGGLGGQIKKSPAVKVTHFKGCLGEAFLNGKSIGLWNYIEREGKCRGCFGSSQNEDPSFHFDGSGYSVVEKSLPATVTQIIMLFNTFSPNGLLLYLGSYGTKDFLSIELFRGRVKVMTDLGSGPITLLTDRRYNNGTWYKIAFQRNRKQGVLAVIDAYNTSNKETKQGETPGASSDLNRLDKDPIYVGGLPRSRVVRRGVTTKSFVGCIKNLEISRSTFDLLRNSYGVRKGCLLEPIRSVSFLKGGYIELPPKSLSPESEWLVTFATTNSSGIILAALGGDVEKRGDREEAHVPFFSVMLIGGNIEVHVNPGDGTGLRKALLHAPTGTCSDGQAHSISLVRNRRIITVQLDENNPVEMKLGTLVESRTINVSNLYVGGIPEGEGTSLLTMRRSFHGCIKNLIFNLELLDFNSAVGHEQVDLDTCWLSERPKLAPDAEDSKLLREPRAFPEQCVVDAALEYVPGAHQFGLTQNSHFILPFNQSAVRKKLSVELSIRTFASSGLIYYMAHQNQADYAVLQLHGGRLHFMFDLGKGRTKVSHPALLSDGKWHTVKTDYVKRKGFITVDGRESPMVTVVGDGTMLDVEGLFYLGGLPSQYQARKIGNITHSIPACIGDVTVNSKQLDKDSPVSAFTVNRCYAVAQEGTYFDGSGYAALVKEGYKVQSDVNITLEFRTSSQNGVLLGISTAKVDAIGLELVDGKVLFHVNNGAGRITPAYEPKTATVLCDGKWHTLQANKSKHRITLIVDGNAVGAESPHTQSTSVDTNNPIYVGGYPAGVKQKCLRSQTSFRGCLRKLALIKSPQVQSFDFSRAFELHGVFLHSCPGTES

SEQ ID NO: 6787 - protein, 1192 aa, Homo sapiens
MEVDTEEKRHRTRSKGVRVPVEPAIQELFSCPTPGCDGSGHVSGKYARHRSVYGCPLAKKRKTQDKQPQEPAPKRKPFAVKADSSSVDECDDSDGTEDMDEKEEDEGEEYSEDNDEPGDEDEEDEEGDREEEEEIEEEDEDDDEDGEDVEDEEEEEEEEEEEEEEEENEDHQMNCHNTRIMQDTEKDDNNSDEYDNYDELVAKSLLNLGKIAEDAAYRARTESEMNSNTSNSLEDDSDKNENLGRKSELSLDLDSDVVRETVDSLKLLAQGHGVVLSENMNDRNYADSMSQQDSRNMNYVMLGKPMNNGLMEKMVEESDEEVCLSSLECLRNQCFDLARKLSETNPQERNPQQNMNIRQHVRPEEDFPGRTPDRNYSDMLNLMRLEEQLSPRSRVFASCAKEDGCHERDDDTTSVNSDRSEEVFDMTKGNLTLLEKAIALETERAKAMREKMAMEAGRRDNMRSYEDQSPRQLPGEDRKPKSSDSHVKKPYYGKDPSRTEKKESKCPTPGCDGTGHVTGLYPHHRSLSGCPHKDRVPPEILAMHESVLKCPTPGCTGRGHVNSNRNSHRSLSGCPIAAAEKLAKAQEKHQSCDVSKSSQASDRVLRPMCFVKQLEIPQYGYRNNVPTTTPRSNLAKELEKYSKTSFEYNSYDNHTYGKRAIAPKVQTRDISPKGYDDAKRYCKDPSPSSSSTSSYAPSSSSNLSCGGGSSASSTCSKSSFDYTHDMEAAHMAATAILNLSTRCREMPQNLSTKPQDLCATRNPDMEVDENGTLDLSMNKQRPRDSCCPILTPLEPMSPQQQAVMNNRCFQLGEGDCWDLPVDYTKMKPRRIDEDESKDITPEDLDPFQEALEERRYPGEVTIPSPKPKYPQCKESKKDLITLSGCPLADKSIRSMLATSSQELKCPTPGCDGSGHITGNYASHRSLSGCPRAKKRGIRIAQSKEDKEDQEPIRCPVPGCDGQGHITGKYASHRSASGCPLAAKRQKEGYLNGSQFSWKSVKTEGMSCPTPGCDGSGHVSGSFLTHRSLSGCPRATSAMKKAKLSGEQMLTIKQRASNGIENDEEIKQLDEEIKELNESNSQMEADMIKLRTQITTMESNLKTIEEENKVVEQQNESLLHELANLSQSLIHSLANIQLPHMDPINEQNFDAYVTTLTEMYTNQDRYQSPENKALLENIKQAVRGIQFRSEQLL

SEQ ID NO: 6788 - protein, 223 aa, Homo sapiens
DYTHDMEAAHMAATAILNLSTRCREMPQNLSTKPQDLCATRNPDMEVDENGTLDLSMNKQRPRDSCCPILTPLEPMSPQQQAVMNNRCFQLGEGDCWDLPVDYTKMKPRRIDEDESKDITVFCVPCDHPCGSEAVFCPQPEDLDPFQEALEERRYPGEVTIPSPKPKYPQCKESKKDLITCPTPGCDGSGHVTGNYASHRSLSGCPLADKSIRSMLATSSQEL

SEQ ID NO: 6789 - protein, 1154 aa, Homo sapiens
LWACVLPGVTLPPFLGEKTSCKMEVDTEEKRHRTRSKGVRVPVEPAIQELFSCPTPGCDGSGHVSGKYARHRSVYGCPLAKKRKTQDKQPQEPAPKRKPFAVKADSSSVDECDDSDGTEDMDEKEEDEGEEEEEEEENEDHQMNCHNTRIMQDTEKDDNNNDEYDNYDELVAKSLLNLGKIAEDAAYRARTESEMNSNTSNSLEDDSDKNENLGRKSELSLDLDSDVVRETVDSLKLLAQGHGVVLSENMNDRNYADSMSQQDSRNMNYVMLGKPMNNGLMEKMVEESDEEVCLSSLECLRNQCFDLARKLSETNPQERNPQQNMNIRQHVRPEEDFPGRTPDRNYSDMLNLMRLEEQLSPRSRVFASCAKEDGCHERDDDTTSVNSDRSEEVFDMTKGNLTLLEKAIALETERAKAMREKMAMEAGRRDNMRSYEDQSPRQLPGEDRKPKSSDSHVKKPYYDPSRTEKKESKCPTPGCDGTGHVTGLYPHHRSLSGCPHKDRVPPEILAMHESVLKCPTPGCTGRGHVNSNRNSHRSLSGCPIAAAEKLAKAQEKHQSCDVSKSSQASDRVLRPMCFVKQLEIPQYGYRNNVPTTTPRSNLAKELEKYSKTSFEYNSYDNHTYGKRAIAPKVQTRDISPKGYDDAKRYCKDPSPSSSSTSSYAPSSSSNLSCGGGSSASSTCSKSSFDYTHDMEAAHMAATAILNLSTRCREMPQNLSTKPQDLCATRNPDMEVDENGTLDLSMNKQRPRDSCCPILTPLEPMSPQQQAVMNNRCFQLGEGDCWDLPVDYTKMKPRRIDEDESKDITPEDLDPFQEALEERRYPGEVTIPSPKPKYPQCKESKKDLITLSGCPLADKSIRSMLATSSQELKCPTPGCDGSGHITGNYASHRSLSGCPRAKKSGIRIAQSKEDKEDQEPIRCPVPGCDGQGHITGKYASHRSASGCPLAAKRQKDGYLNGSQFSWKSVKTEGMSCPTPGCDGSGHVSGSFLTHRSLSGCPRATSAMKKAKLSGEQMLTIKQRASNGIENDEEIKQLDEEIKELNESNSQMEADMIKLRTQITTMESNLKTIEEENKVIEQQNESLLHELANLSQSLIHSLANIQLPHMDPINEQNFDAYVTTLTEMYTNQDRYQSPENKALLENIKQAVRGIQV

SEQ ID NO: 6790 - protein, 1107 aa, Homo sapiens [sequence omitted]

SEQ ID NO: 6791 - protein, 558 aa, Homo sapiens
MELRARGWWLLCAAAALVACARGDPASKSRSCGEVRQIYGAKGFSLSDVPQAEISGEHLRICPQGYTCCTSEMEENLANRSHAELETALRDSSRVLQAMLATQLRSFDDHFQHLLNDSERTLQATFPGAFGELYTQNARAFRDLYSELRLYYRGANLHLEETLAEFWARLLERLFKQLHPQLLLPDDYLDCLGKQAEALRPFGEAPRELRLRATRAFVAARSFVQGLGVASDVVRKVAQVPLGPECSRAVMKLVYCAHCLGVPGARPCPDYCRNVLKGCLANQADLDAEWRNLLDSMVLITDKFWGTSGVESVIGSVHTWLAEAINALQDNRDTLTAKVIQGCGNPKVNPQGPGPEEKRRRGKLAPRERPPSGTLEKLVSEAKAQLRDVQDFWISLPGTLCSEKMALSTASDDRCWNGMARGRYLPEVMGDGLANQINNPEVEVDITKPDMTIRQQIMQLKIMTNRLRSAYNGNDVDFQDASDDGSGSGSGDGCLDDLCGRKVSRKSSSSRTPLTHALPGLSEQEGQKTSAASCPQPPTFLLPLLLFLALTVARPRWR

SEQ ID NO: 6792 - protein, 287 aa, Homo sapiens [sequence omitted]

SEQ ID NO: 6793 - protein, 366 aa, Homo sapiens
MALPPGPAALRHTLLLLPALLSSGWGELEPQIDGQTWAERALRENERHAFTCRVAGGPGTPRLAWYLDGQLQEASTSRLLSVGGEAFSGGTSTFTVTAHRAQHELNCSLQDPRSGRSANASVILNVQFKPEIAQVGAKYQEAQGPGLLVVLFALVRANPPANVTWIDQDGPVTVNTSDFLVLDAQNYPWLTNHTVQLQLRSLAHNLSVVATNDVGVTSASLPAPGLLATRVEVPLLGIVVAAGLALGTLVGFSTLVACLVCRKEKKTKGPSRHPSLISSDSNNLKLNNVRLPRENMSLPSNLQLNDLTPDSRAVKPADRQMAQNNSRPELLDPEPGGLLTSQGFIRLPVLGYIYRVSSVSSDEIWL

SEQ ID NO: 6794 - protein, 218 aa, Homo sapiens
MALPPGPAALRHTLLLLPALLSSVKPEIAQVGAKYQEAQGPGLLVVLFALVRANPPANVTWIDQDGPVTVNTSDFLVLDAQNYPWLTNHTVQLQLRSLAHNLSVVATNDVGVTSASLPAPGPSRHPSLISSDSNNLKLNNVRLPRENMSLPSNLQLNDLTPDSRAVKPADRQMAQNNSRPELLDPEPGGLLTSQGFIRLPVLGYIYRVSSVSSDEIWL

SEQ ID NO: 6795 - protein, 322 aa, Homo sapiens [sequence omitted]

SEQ ID NO: 6796 - protein, 314 aa, Homo sapiens
MAPPQVLAFGLLLAAATATFAAAQEECVCENYKLAVNCFVNNNRQCQCTSVGAQNTVICSKLAAKCLVMKAEMNGSKLGRRAKPEGALQNNDGLYDPDCDESGLFKAKQCNGTSTCWCVNTAGVRRTDKDTEITCSERVRTYWIIIELKHKAREKPYDSKSLRTALQKEITTRYQLDPKFITSILYENNVITIDLVQNSSQKTQNDVDIADVAYYFEKDVKGESLFHSKKMDLTVNGEQLDLDPGQTLIYYVDEKAPEFSMQGLKAGVIAVIVVVVIAVVAGIVVLVISRKKRMAKYEKAEIKEMGEMHRELNA

SEQ ID NO: 6797 - protein, 314 aa, Homo sapiens [sequence omitted]

SEQ ID NO: 6798 - protein, 222 aa, Homo sapiens
MSLMVIIMACVGFFLLQGAWPQEGVHRKPSFLALPGHLVKSEETVILQCWSDVMFEHFLLHREGKFNNTLHLIGEHHDGVSKANFSIGPMMPVLAGTYRCYGSVPHSPYQLSAPSDPLDMVIIGLYEKPSLSAQPGPTVQAGENVTLSCSSIYPGRGRPMNVGSLQCAASTEHSRPTFLWALPPTEGPTDASALSVTLPTSGQTRVIHCLFPSQVTPDTYMF

SEQ ID NO: 6799 - protein, 304 aa, Homo sapiens
MSLMVIIMACVGFFLLQGAWPQEGVHRKPSFLALPGHLVKSEETVILQCWSDVMFEHFLLHREGKFNNTLHLIGEHHDGVSKANFSIGPMMPVLAGTYRCYGSVPHSPYQLSAPSDPLDMVIIGLYEKPSLSAQPGPTVQAGENVTLSCSSRSSYDMYHLSREGEAHERRLPAVRSINGTFQADFPLGPATHGGTYRCFGSFRDAPYEWSNSSDPLLVSVTGNPSNSWPSPTEPSSKTGNPRHLHVLIGTSVVKIPFTILLFFLLHRWCSDKKNAAVMDQEPAGNRTVNSEDSDEQDHQEVSYA

SEQ ID NO: 6800 - protein, 105 aa, Homo sapiens
HEGVHRKPSFLALPGHLVKSEETVILQCWSDVRFEHFLLHREGKFNNTLHLIGEHHDGVSKANFSIGPMMPVLAGTYRCFGSFRDAPYEWSNSSDPLLVSVTGNP

SEQ ID NO: 6801 - protein, 203 aa, Homo sapiens
HEGVHRKPSFLALPGHLVKSEETVILQCWSDVMFEHFLLHREGKFNNTLHLIGEHHDGVSKANFSIGPMMPVLAGTYRCYGSVPHSPYQLSAPSDPLDMVIIGLYEKPSLSAQPGPTVLAGESVTLSCSSRSSYDMYHLSREGEAHERRFSAGPKVNGTFQADFPLGPATHGGTYRCFGSFHDSPYEWSKSSDPLLVSVTGNP

SEQ ID NO: 6802 - protein, 504 aa, Homo sapiens
MLRLVAACPESCVVCTKDVTLCHQLTYIVAAPMTTRVLIITDGYLSSIESTNLSLLFNLALLSLSRNGIEDVQEDALHGLTMLRTLLLEHNQISSSSLTDHTFSKLHSLQVLVLSNNALRTLRGSWFRNTSGLTRLQLDGNQITNLTDSSFGGTNLHSLRYLDLSNNFISYIGKDAFRPLPQLQEVDLSRNRLAHMPDVFTPLKQLILLSLDKNQWSCTCDLHPLARFLRNYIKSSAHTLRNAKDLNCQPSTAAVAAAQSVLRLSETNCDSKAPNFTLVLKDRSPLLPGPDVALLTVLGFAGAVGLTCLGLVVFNWKLHQGKANEHTSENLCCRTFDEPLCAHEARNYHTKGYCNCHLTQENEIKVMSTVGSRKEMPLLQENSHQATSASESATLDGSFRNLKKKDRGVGSTLFCQDGRLLHSECSEPPGNMRAFNEAGLLTTYNPRKVQKLWNLEPGEVQPQTLQHHIIRTEDISSDIFRRRYATPASALAGESLEKRLTNES

SEQ ID NO: 6803 - protein, 691 aa, Homo sapiens [sequence omitted]

SEQ ID NO: 6804 - protein, 731 aa, Homo sapiens
MSWFVDLAGKAEDLLNRVDQGAATALSRKDNASNIYSKNTDYTELHQQNTDLIYQTGPKSTYISSAADNIRNQKATILAGTANVKVGSRTPVEASHPVENASVPRPSSHFVRRKKSEPDDELLFDFLNSSQKEPTGRVEIRKEKGKTPVFQSSQTSSVSSVNPSVTTIKTIEENSFGSQTHEAASNSDSSHEGQEESSKENVSSNAACPDHTPTPNDDGKSHELSNLRLENQLLRNEVQSLNQEMASLLQRSKETQEELNKARARVEKWNADHSKSDRMTRGLRAQVDDLTEAVAAKDSQLAVLKVRLQEADQLLSTRTEALEALQSEKSRIMQDQSEGNSLQNQALQTLQERLHEADATLKREQESYKQMQSEFAARLNKVEMERQNLAEAITLAERKYSDEKKRVDELQQQVKLYKLNLESSKQELIDYKQKATRILQSKEKLINSLKEGSGFEGLDSSTASSMELEELRHEKEMQREEIQKLMGQIHQLRSELQDMEAQQVNEAESAREQLQDLHDQIAGQKASKQELETELERLKQEFHYIEEDLYRTKNTLQSRIKDRDEEIQKLRNQLTNKTLSNSSQSELENRLHQLTETLIQKQTMLESLSTEKNSLVFQLERLEQQMNSASGSSSNGSSINMSGIDNGEGTRLRNVPVLFNDTETNLAGMYGKVRKAASSIDQFSIRLGIFLRRYPIARVFVIIYMALLHLWVMIVLLTYTPEMHHDQPYGK

SEQ ID NO: 6805 - protein, 1099 aa, Homo sapiens
MSLNNSSNVFLDSVPSNTNRFQVSVINENHESSAAADDNTDPPHYEETSFGDEAQKRLRISFRPGNQECYDNFLHSGETAKTDASFHAYDSHTNTYYLQTFGHNTMDAVPKIEYYRNTGSISGPKVNRPSLLEIHEQLAKNVAVTPSSADRVANGDGIPGDEQAENKEDDQAGVVKFGWVKGVLVRCMLNIWGVMLFIRLSWIVGEAGIGLGVIIIGLSTIVTTITGMSTSAIATNGVVRGGGAYYLISRSLGPEFGGSIGLIFAFANAVAVAMYVVGFAETVVDLLKESDSMMVDPTNDIRIIGSITVVILLGISVAGMEWEAKAQVILLVILLIAIANFFIGTVIPSNNEKKSRGFFNYQASIFAENFGPRFTKGEGFFSVFAIFFPAATGILAGANISGDLEDPQDAIPRGTMLAIFITTVAYLGVAICVGACVVRDATGNMNDTIISGMNCNGSAACGLGYDFSRCRHEPCQYGLMNNFQVMSMVSGFGPLITAGIFSATLSSALASLVSAPKVFQALCKDNIYKALQFFAKGYGKNNEPLRGYILTFLIAMAFILIAELNTIAPIISNFFLASYALINFSCFHASYAKSPGWRPAYGIYNMWVSLFGAVLCCAVMFVINWWAAVITYVIEFFLYVYVTCKKPDVNWGSSTQALSYVSALDNALELTTVEDHVKNFRPQCIVLTGGPMTRPALLDITHAFTKNSGLCICCEVFVGPRKLCVKEMNSGMAKKQAWLIKNKIKAFYAAVAADCFRDGVRSLLQASGLGRMKPNTLVIGYKKNWRKAPLTEIENYVGIIHDAFDFEIGVVIVRISQGFDISQVLQVQEELERLEQERLALEATIKDNECEEESGGIRGLFKKAGKLNITKTTPKKDGSINTSQSMHVGEFNQKLVEASTQFKKKQEKGTIDVWWLFDDGGLTLLIPYILTLRKKWKDCKLRIYVGGKINRIEEEKIAMASLLSKFRIKFADIHIIGDINIRPNKESWKVFEEMIEPYRLHESCKDLTTAEKLKRETPWKITDAELEAVKEKSYRQVRLNELLQEHSRAANLIVLSLPVARKGSISDLLYMAWLEILTKNLPPVLLVRGNHKNVLTFYS

SEQ ID NO: 6806 - protein, 1112 aa, Homo sapiens
MRRDERDAKAMRSLQPPDGAGSPPESLRNGYVKSCVSPLRQDPPRGFFFHLCRFCNVELRPPPASPQQPRRCSPFCRARLSLGDLAAFVLALLLGAEPESWAAGAAWLRTLLSVCSHSLSPLFSIACAFFFLTCFLTRTKRGPGPGRSCGSWWLLALPACCYLGDFLVWQWWSWPWGDGDAGSAAPHTPPEAAAGRLLLVLSCVGLLLTLAHPLRLRHCVLVLLLASFVWWVSFTSLGSLPSALRPLLSGLVGGAGCLLALGLDHFFQIREAPLHPRLSSAAEEKVPVIRPRRRSSCVSLGETAASYYGSCKIFRRPSLPCISREQMILWDWDLKQWYKPHYQNSGGGNGVDLSVLNEARNMVSDLLTDPSLPPQVISSLRSISSLMGAFSGSCRPKINPLTPFPGFYPCSEIEDPAEKGDRKLNKGLNRNSLPTPQLRRSSGTSGLLPVEQSSRWDRNNGKRPHQEFGISSQGCYLNGPFNSNLLTIPKQRSSSVSLTHHVGLRRAGVLSSLSPVNSSNHGPVSTGSLTNRSPIEFPDTADFLNKPSVILQRSLGNAPNTPDFYQQLRNSDSNLCNSCGHQMLKYVSTSESDGTDCCSGKSGEEENIFSKESFKLMETQQEEETEKKDSRKLFQEGDKWLTEEAQSEQQTNIEQEVSLDLILVEEYDSLIEKMSNWNFPIFELVEKMGEKSGRILSQVMYTLFQDTGLLEIFKIPTQQFMNYFRALENGYRDIPYHNRIHATDVLHAVWYLTTRPVPGLQQIHNGCGTGNETDSDGRINHGRIAYISSKSCSNPDESYGCLSSNIPALELMALYVAAAMHDYDHPGRTNAFLVATNAPQAVLYNDRSVLENHHAASAWNLYLSRPEYNFLLHLDHVEFKRFRFLVIEAILATDLKKHFDFLAEFNAKANDVNSNGIEWSNENDRLLVCQVCIKLADINGPAKVRDLHLKWTEGIVNEFYEQGDEEANLGLPISPFMDRSSPQLAKLQESFITHIVGPLCNSYDAAGLLPGQWLEAEEDNDTESGDDEDGEELDTEDEEMENNLNPKPPRRKSRRRIFCQLMHHLTENHKIWKEIVEEEEKCKADGNKLQVENSSLPQADEIQVIEEADEEE

SEQ ID NO: 6807 - protein, 3312 aa, Homo sapiens
MMARRPPWRGLGERSTPILLLLLLSLFPLSQEELGGGGHQGWDPGLAATTGPRAHIGGGALALCPESSGVREDGGPGLGVREPIFVGLRGRRQSARNSRGPPEQPNEELGIEHGVQPLGSRERETGQGPGSVLYWRPEVSSCGRTGPLQRGSLSPGALSSGVPGSGNSSPLPSDFLIRHHGPKPVSSQRNAGTGSRKRVGTARCCGELWATGSKGQGERATTSGAERTAPRRNCLPGASGSGPELDSAPRTARTAPASGSAPRESRTAPEPAPKRMRSRGLFRCRFLPQRPGPRPPGLPARPEARKVTSANRARFRRAANRHPQFPQYNYQTLVPENEAAGTAVLRVVAQDPDAGEAGRLVYSLAALMNSRSLELFSIDPQSGLIRTAAALDRESMERHYLRVTAQDHGSPRLSATTMVAVTVADRNDHSPVFEQAQYRETLRENVEEGYPILQLRATDGDAPPNANLRYRFVGPPAARAAAAAAFEIDPRSGLISTSGRVDREHMESYELVVEASDQGQEPGPRSATVRVHITVLDENDNAPQFSEKRYVAQVREDVRPHTVVLRVTATDRDKDANGLVHYNIISGNSRGHFAIDSLTGEIQVVAPLDFEAEREYALRIRAQDAGRPPLSNNTGLASIQVVDINDHIPIFVSTPFQVSVLENAPLGHSVIHIQAVDADHGENARLEYSLTGVAPDTPFVINSATGWVSVSGPLDRESVEHYFFGVEARDHGSPPLSASASVTVTVLDVNDNRPEFTMKEYHLRLNEDAAVGTSVVSVTAVDRDANSAISYQITGGNTRNRFAISTQGGVGLVTLALPLDYKQERYFKLVLTASDRALHDHCYVHINITDANTHRPVFQSAHYSVSVNEDRPMGSTIVVISASDDDVGENARITYLLEDNLPQFRIDADSGAITLQAPLDYEDQVTYTLAITARDNGIPQKADTTYVEVMVNDVNDNAPQFVASHYTGLVSEDAPPFTSVLQISATDRDAHANGRVQYTFQNGEDGDGDFTIEPTSGIVRTVRRLDREAVSVYELTAYAVDRGVPPLRTPVSIQVMVQDVNDNAPVFPAEEFEVRVKENSIVGSVVAQITAVDPDEGPNAHIMYQIVEGNIPELFQMDIFSGELTALIDLDYEARQEYVIVVQATSAPLVSRATVHVRLVDQNDNSPVLNNFQILFNNYVSNRSDTFPSGIIGRIPAYDPDVSDHLFYSFERGNELQLLVVNQTSGELRLSRKLDNNRPLVASMLVTVTDGLHSVTAQCVLRVVIITEELLANSLTVRLENMWQERFLSPLLGRFLEGVAAVLATPAEDVFIFNIQNDTDVGGTVLNVSFSALAPRGAGAGAAGPWFSSEELQEQLYVRRAALAARSLLDVLPFDDNVCLREPCENYMKCVSVLRFDSSAPFLASASTLFRPIQPIAGLRCRCPPGFTGDFCETELDLCYSNPCRNGGACARREGGYTCVCRPRFTGEDCELDTEAGRCVPGVCRNGGTCTDAPNGGFRCQCPAGGAFEGPRCEVAARSFPPSSFVMFRGLRQRFHLTLSLSFATVQQSGLLFYNGRLNEKHDFLALELVAGQVRLTYSTGESNTVVSPTVPGGLSDGQWHTVHLRYYNKPRTDALGGAQGPSKDKVAVLSVDDCDVAVALQFGAEIGNYSCAAAGVQTSSKKSLDLTGPLLLGGVPNLPENFPVSHKDFIGCMRDLHIDGRRVDMAAFVANNGTMAGCQAKLHFCDSGPCKNSGFCSERWGSFSCDCPVGFGGKDCQLTMAHPHHFRGNGTLSWNFGSDMAVSVPWYLGLAFRTRATQGVLMQVQAGPHSTLLCQLDRGLLSVTVTRGSGRASHLLLDQVTVSDGRWHDLRLELQEEPGGRRGHHVLMVSLDFSLFQDTMAVGSELQGLKVKQLHVGGLPPGSAEEAPQGLVGCIQGVWLGSTPSGSPALLPPSHRVNAEPGCVVTNACASGPCPPHADCRDLWQTFSCTCQPGYYGPGCVDACLLNPCQNQGSCRHLPGAPHGYTCDCVGGYFGHHCEHRMDQQCPRGWWGSPTCGPCNCDVHKGFDPNCNKTNGQCHCKEFHYRPRGSDSCLPCDCYPVGSTSRSCAPHSGQCPCRPGALGRQCNSCDSPFAEVTASGCRVLYDACPKSLRSGVWWPQTKFGVLATVPCPRGALGAAVRLCDEAQGWLEPDLFNCTSPAFRELSLLLDGLELNKTALDTMEAKKLAQRLREVTGHTDHYFSQDVRVTARLLAHLLAFESHQQGFGLTATQDAHFNENLLWAGSALLAPETGDLWAALGQRAPGGSPGSAGLVRHLEEYAATLARNMELTYLNPMGLVTPNIMLSIDRMEHPSSPRGARRYPRYHSNLFRGQDAWDPHTHVLLPSQSPRPSPSEVLPTSSSIENSTTSSVVPPPAPPEPEPGISIIILLVYRTLGGLLPAQFQAERRGARLPQNPVMNSPVVSVAVFHGRNFLRGILESPISLEFRLLQTANRSKAICVQWDPPGLAEQHGVWTARDCELVHRNGSHARCRCSRTGTFGVLMDASPRERLEGDLELLAVFTHVVVAVSVAALVLTAAILLSLRSLKSNVRGIHANVAAALGVAELLFLLGIHRTHNQLVCTAVAILLHYFFLSTFAWLFVQGLHLYRMQVEPRNVDRGAMRFYHALGWGVPAVLLGLAVGLDPEGYGNPDFCWISVHEPLIWSFAGPVVLVIVMNGTMFLLAARTSCSTGQREAKKTSALTLRSSFLLLLLVSASWLFGLLAVNHSILAFHYLHAGLCGLQGLAVLLLFCVLNADARAAWMPACLGRKAAPEEARPAPGLGPGAYNNTALFEESGLIRITLGASTVSSVSSARSGRTQDQDSQRGRSYLRDNVLVRHGSAADHTDHSLQAHAGPTDLDVAMFHRDAGADSDSDSDLSLEEERSLSIPSSESEDNGRTRGRFQRPLCRAAQSERLLTHPKDVDGNDLLSYWPALGECEAAPCALQTWGSERRLGLDTSKDAANNNQPDPALTSGDETSLGRAQRQRKGILKNRLQYPLVPQTRGAPELSWCRAATLGHRAVPAASYGRIYAGGGTGSLSQPASRYSSREQLDLLLRRQLSRERLEEAPAPVLRPLSRPGSQECMDAAPGRLEPKDRGSTLPRRQPPRDYPGAMAGRFGSRDALDLGAPREWLSTLPPPRRTRDLDPQPPPLPLSPQRQLSRDPLLPSRPLDSLSRSSNSREQLDQVPSRHPSREALGPLPQLLRAREDSVSGPSHGPSTEQLDILSSILASFNSSALSSVQSSSTPLGPHTTATPSATASVLGPSTPRSATSHSISELSPDSEVPRSEGHS

SEQ ID NO: 6808 - protein, 278 aa, Homo sapiens
AKQSMAGIPGRESNAPSVPTVSLLPGAPGGNASSRTEAQVPNGQGTPRGLCLFKSGFPGPSRQSAPRAARGPTPRTEEAAWAAMALTFLLVLLTLATLCTRLHRNFRRGESIYWGPTADSQDTVAGEEFPPYPTRGPRPTSRRPAAPRSFPALPPLTARRPAHSCAEAEAAAASRRVKRSPETLLPPTRTAARKARARSDGLDLPLWRAAPPAPRPRPLPRGPRAGAPWWRWRGTGRALRGLSSLLVAEWAAKGRKGAASASLAKTPFLIKLFLVKKK

SEQ ID NO: 6809 - protein, 393 aa, Homo sapiens
MAPPPPSPQLLLLAALARLLGPSEVMAGPAEEAGAHCPESLWPLPPQVSPRVTYTRVSPGQAEDVTFLYHPCAHPWLKLQLALLAYACMANPSLTPDFSLTQDRPLVLTAWGLALEMAWVEPAWAAHWLMRRRRRKQRKKKAWIYCESLSGPAPSEPTPGRGRLCRRGCVQALALAFALRSWRPPGTEVTSQGPRQPSSSGAKRRRLRAALGPQPTRSALRFPSASPGSLKAKQSMAGIPGRESNAPSVPTVSLLPGAPGGNASSRTEAQVPNGQGSPGGCVCSSQASPAPRAAAPPRAARGPTPRTEEAAWAAMALTFLLVLLTLATLCTRLHRNFRRGESIYWGPTADSQDTVAAVLKRRLLQPSRRVKRSRRRPLLPPTPDSGPEGESSE

SEQ ID NO: 6810 - protein, 356 aa, Homo sapiens [sequence omitted]

SEQ ID NO: 6811 - protein, 360 aa, Homo sapiens
MAELQEVQITEEKPLLPGQTPEAAKEAELAARILLDQGQTHSVETPYGSVTFTVYGTPKPKRPAILTYHDVGLNYKSCFQPLFQFEDMQEIIQNFVRVHVDAPGMEEGAPVFPLGYQYPSLDQLADMIPCVLQYLNFSTIIGVGVGAGAYILARYALNHPDTVEGLVLINIDPNAKGWMDWAAHKLTGLTSSIPEMILGHLFSQEELSGNSELIQKYRNIITHAPNLDNIELYWNSYNNRRDLNFERGGDITLRCPVMLVVECNSKLDPTQTSFLKMADSGGQPQLTQPGKLTEAFKYFLQGMGYMASSCMTRLSRSRTASLTSAASVDGNRSRSRTLSQSSESGTLSSGPPGHTMEVSC

SEQ ID NO: 6812 - protein, 362 aa, Homo sapiens
CRRCRSQRRSHCCQDRRLRRPSSWCPVFLQTHSVETPYGSVTFTVYGTPKPKRPAILTYHDVGLNYKSCFQPLFQFEDMQEIIQNFVRVHVDAPGMEEGAPVFPLGYQYPSLDQLADMIPCVLQYLNFSTIIGVGVGAGAYILARYALNHPDTVEGLVLINIDPNAKGWMDWAAHKLTGLTSSIPEMILGHLFSQEELSGNSELIQKYRNIITHAPNLDNIELYWNSYNNRRDLNFERGGDITLRCPVMLVVGDQAPHEDAVVECNSKLDPTQTSFLKMADSGGQPQLTQPGKLTEAFKYFLQGMGYMASSCMTRLSRSRTASLTSAASVDGNRSRSRTLSQSSESGTLSSGPPGHTMEVSC

SEQ ID NO: 6813 - protein, 332 aa, Homo sapiens
CQATMAELQEVQITEEKPLLPGQTPEAAKTHSVETPYGSVTFTVYGTPKPKRPAILTYHDVGLNYKSCFQPLFQFEDMQEIIQNFVRVHVDAPGMEEGAPVFPLGYQYPSLDQLADMIPCVLQYLNFSTIIGVGVGAGAYILARYALTGLTSSIPEMILGHLFSQEELSGNSELIQKYRNIITHAPNLDNIELYWNSYNNRRDLNFERGGDITLRCPVMLVVGDQAPHEDAVVECNSKLDPTQTSFLKMADSGGQPQLTQPGKLTEAFKYFLQGMGYMASSCMTRLSRSRTASLTSAASVDGNRSRSRTLSQSSESGTLSSGPPGHTMEVSC

SEQ ID NO: 6814 - protein, 357 aa, Homo sapiens
MAELQEVQITEEKPLLPGQTPEAAKTHSVETPYGSVTFTVYGTPKPKRPAILTYHDVGLNYKSCFQPLFQFEDMQEIIQNFVRVHVDAPGMEEGAPVFPLGYQYPSLDQLADMIPCVLQYLNFSTIIGVGVGAGAYILARYALNHPDTVEGLVLINIDPNAKGWMDWAAHKLTGLTSSIPEMILGHLFSQEELSGNSELIQKYRNIITHAPNLDNIELYWNSYNNRRDLNFERGGDITLRCPVMLVVGDQAPHEDAVVECNSKLDPTQTSFLKMADSGGQPQLTQPGKLTEAFKYFLQGMGYMASSCMTRLSRSRTASLTSAASVDGNRSRSRTLSQSSESGTLSSGPPGHTMEVSC

SEQ ID NO: 6815 - protein, 371 aa, Homo sapiens
MAELQEVQITEEKPLLPGQTPEAAKEAELAARILLDQGQTHSVETPYGSVTFTVYGTPKPKRPAILTYHDVGLNYKSCFQPLFQFEDMQEIIQNFVRVHVDAPGMEEGAPVFPLGYQYPSLDQLADMIPCVLQYLNFSTIIGVGVGAGAYILARYALNHPDTVEGLVLINIDPNAKGWMDWAAHKLTGLTSSIPEMILGHLFSQEELSGNSELIQKYRNIITHAPNLDNIELYWNSYNNRRDLNFERGGDITLRCPVMLVVGDQAPHEDAVVECNSKLDPTQTSFLKMADSGGQPQLTQPGKLTEAFKYFLQGMGYMASSCMTRLSRSRTASLTSAASVDGNRSRSRTLSQSSESGTLSSGPPGHTMEVSC

SEQ ID NO: 6816 - protein, 968 aa, Homo sapiens [sequence omitted]

SEQ ID NO: 6817 - protein, 321 aa, Homo sapiens [sequence omitted]

SEQ ID NO: 6818 - protein, 321 aa, Homo sapiens
MATGGQQKENTLLHLFAGGCGGTVGAIFTCPLEVIKTRLQSSRLALRTVYYPQVHLGTISGAGMVRPTSVTPGLFQVLKSILEKEGPKSLFRGLGPNLVGVAPSRAVYFACYSKAKEQFNGIFVPNSNIVHIFSAGSAAFITNSLMNPIWMVKTRMQLEQKVRGSKQMNTLQCARYVYQTEGIRGFYRGLTASYAGISETIICFAIYESLKKYLKEAPLASSANGTEKNSTSFFGLMAAAALSKGCASCIAYPHEVIRTRLREEGTKYKSFVQTARLVFREEGYLAFYRGLFAQLIRQIPNTAIVLSTYELIVYLLEDRTQ

SEQ ID NO: 6819 - protein, 1617 aa, Homo sapiens [sequence omitted]

SEQ ID NO: 6820 - protein, 392 aa, Homo sapiens
MLKVLNYIFKGPFSMYSNIFNGSGDMDLEPLFYLQQLVLDFIIFYHSCNRERTISLGVASHNVCVGICVGVYLHSLNNCMIRKFLSLFQMFHVVIIVLQNPKGYVLLMKMSSLGGGEQVIMCRFFLAEVCFLWEQPSRINLFCFLFWELRPILRCPKSPSILFDLLIHIDLIAKYDHIDVVKLNTFVQIESLHLLSVKQWKTVMEKQTCFDRFICVKKVSILWNAADQIMSCRLCSKQHSSTTVLLSIPSLAVTEMKNISIDLCFALVQETICREPNIATEDLISCQKIQNLFPFKHDTLSFLVDLAKRKNIALNSPIPSVESLRIFSNELCMVLWYFMFPKENGYMKNLSSVIIFLTKILLVMVVLINLIVIMITQCLPISNHHIVYLKYI

SEQ ID NO: 6821 - protein, 93 aa, Homo sapiens
RPTTLFETMGKADIWLMRNSWNFQFPHPFLPNVDFVGGFHCKPAKPLPKEMEEFVQSSGENGVVVFSLGSMVSNMTAERANVIATALAKIPQK

SEQ ID NO: 6822 - protein, 482 aa, Homo sapiens
GKVLVWTGEYSHWMNMKTILKELVQRGHEVTVLASSASILFDPNDAFTLKLEVYPTSLTKTEFENIIMQQVKRWSDIQKDSFWLYFSQEQEILWEFHDIFRNFCKDVVSNKKVMKKLQESRFDIIFADAFFPCGELLAALLNIPFVYSLCFTPGYTIERHSGGLIFPPSYIPVVMSKLSDQMTFMERVKNMIYVLYFDFWFQMCDMKKWDQFYSEVLGRPTTLFETMGKADIWLMRNSWSFQFPHPFLPNIDFVGGLHCKPAKPLPKEMEEFVQSSGENGVVVFSLGSMVSNMTAERANVIATALAKIPQAFHCASHFIPMNNFAKIHPILGHPKTRAFITHGGASGIYEAIYHGIPMVGIPLFWDQPDNIAHMKAKGAAVRLDFHTMSSTDLLNALKTVINDPLYKENVMKLSRIQRDQPVKPLDRAVFWIEFVMRHKGAKHLRVAARDLTWFQYHSLDVIGFLLACVATVTFIITKCCLF

SEQ ID NO: 6823 - protein, 830 aa, Homo sapiens
MANCQIAILYQRFQRVVFGISQLLCFSALISELTNQKEVAAWTYHYSTKAYSWNISRKYCQNRYTDLVAIQNKNEIDYLNKVLPYYSSYYWIGIRKNNKTWTWVGTKKALTNEAENWADNEPNNKRNNEDCVEIYIKSPSAPGKWNDEHCLKKKHALCYTASCQDMSCSKQGECLETIGNYTCSCYPGFYGPECEYVRECGELELPQHVLMNCSHPLGNFSFNSQCSFHCTDGYQVNGPSKLECLASGIWTNKPPQCLAAQCPPLKIPERGNMICLHSAKAFQHQSSCSFSCEEGFALVGPEVVQCTASGVWTAPAPVCKAVQCQHLEAPSEGTMDCVHPLTAFAYGSSCKFECQPGYRVRGLDMLRCIDSGHWSAPLPTCEAISCEPLESPVHGSMDCSPSLRAFQYDTNCSFRCAEGFMLRGADIVRCDNLGQWTAPAPVCQALQCQDLPVPNEARVNCSHPFGAFRYQSVCSFTCNEGLLLVGASVLQCLATGNWNSVPPECQAIPCTPLLSPQNGTMTCVQPLGSSSYKSTCQFICDEGYSLSGPERLDCTRSGRWTDSPPMCEAIKCPELFAPEQGSLDCSDTRGEFNVGSTCHFSCNNGFKLEGPNNVECTTSGRWSATPPTCKGIASLPTPGLQCPALTTPGQGTMYCRHHPGTFGFNTTCYFGCNAGFTLIGDSTLSCRPSGQWTAVTPACRAVKCSELHVNKPIAMNCSNLWGNFSYGSICSFHCLEGQLLNGSAQTACQENGHWSTTVPTCQAGPLTIQEALTYFGGAVASTIGLIMGGTLLALLRKRFRQKDDGKCPLNPHSHLGTYGVFTNAAFDPSP

SEQ ID NO: 6824 - protein, 261 aa, Homo sapiens
IYYAISKSIGFGVDTWVYPNITDPEYGYLAREYIYCLYWSTLTLTTIGETPPPVKDEEYLFVIFDFLIGVLIFATIVGNVGSMISNMNATRAEFQAKIDAVKHYMQFRKVSKGMEAKVIRWFDYLWTNKKTVDEREILKNLPAKLRAEIAINVHLSTLKKVRIFHDCEAGLLVELVLKLRPQVFSPGDYICRKGDIGKEMYIIKEGKLAVVADDGVTQYALLSAGSCFGEISILNIKGSKMGNRRTANIRSLGYSDLFCLS

SEQ ID NO: 6825 - protein, 309 aa, Homo sapiens
MENRNNMTEFVLLGLTENPKMQKIIFVVFFVIYIITVVGYVLIVVTITASPSLGSPMYLSLAYLSFIDACYSSVNTPNLITHSLYGKKAILFNGCMTQVFGEHFFGGAEGILLTVMAYDHYVAICKPLHYMTIMNQCVCALLMGVVWMGGFLHATIQILFIFQLPFCGPNVIDHFMCDLNPLLNLACTDTHMLELFIAANSGFICLLNFALLLVSYVVILCSLRTHSLEARHKALSTCVSHITVVILFFVPCIFVYMRPAATLPIDKAVAIFYTMITPMLNPLIYTLKNAQMKNAIRKLCSRKDISGDK

SEQ ID NO: 6826 - protein, 691 aa, Homo sapiens
MDQNQHLNKTAEAQPSENKKTRYCNGLKMFLAALSLSFIAKTLGAIIMKSSIIHIERRFEISSSLVGFIDGSFEIGNLLVIVFVSYFGSKLHRPKLIGIGCFIMGIGGVLTALPHFFMGYYRYSKETNINSSENSTSTLSTCLINQILSLNRASPEIVGKGCLKESGSYMWIYVFMGNMLRGIGETPIVPLGLSYIDDFAKEGHSSLYLGILNAIAMIGPIIGFTLGSLFSKMYVDIGYVDLSTIRITPTDSRWVGAWWLNFLVSGLFSIISSIPFFFLPQTPNKPQKERKASLSLHVLETNDEKDQTANLTNQGKNITKNVTGFFQSFKSILTNPLYVMFVLLTLLQVSSYIGAFTYVFKYVEQQYGQPSSKANILLGVITIPIFASGMFLGGYIIKKFKLNTVGIAKFSCFTAVMSLSFYLLYFFILCENKSVAGLTMTYDGNNPVTSHRDVPLSYCNSDCNCDESQWEPVCGNNGITYISPCLAGCKSSSGNKKPIVFYNCSCLEVTGLQNRNYSAHLGECPRDDACTRKFYFFVAIQVLNLFFSALGGTSHVMLIVKIVQPELKSLALGFHSMVIRALGGILAPIYFGALIDTTCIKWSTNNCGTRGSCRTYNSTSFSRVYLGLSSMLRVSSLVLYIILIYAMKKKYQEKDINASENGSVMDEANLESLNKNKHFVPSAGADSETHC

SEQ ID NO: 6827 - protein, 332 aa, Homo sapiens
MLWLFQSLLFVFCFGPGNVVSQSSLTPLMVNGILGESVTLPLEFPAGEKVNFITWLFNETSLAFIVPHETKSPEIHVTNPKQGKRLNFTQSYSLQLSNLKMEDTGSYRAQISTKTSAKLSSYTLRILRQLRNIQVTNHSQLFQNMTCELHLTCSVEDADDNVSFRWEALGNTLSSQPNLTVSWDPRISSEQDYTCIAENAVSNLSFSVSAQKLCEDVKIQYTDTKMILFMVSGICIVFGFIILLLLVLRKRRDSLSLSTQRTQGPAESARNLEYVSVSPTNNTVYASVTHSNRETEIWTPRENDTITIYSTINHSKESKPTFSRATALDNVV

SEQ ID NO: 6828 - protein, 547 aa, Homo sapiens
MATMVPSVLWPRACWTLLVCCLLTPGVQGQEFLLRVEPQNPVLSAGGSLFVNCSTDCPSSEKIALETSLSKELVASGMGWAAFNLSNVTGNSRILCSVYCNGSQITGSSNITVYGLPERVELAPLPPWQPVGQNFTLRCQVEGGSPRTSLTVVLLRWEEELSRQPAVEEPAEVTATVLASRDDHGAPFSCRTELDMQPQGLGLFVNTSAPRQLRTFVLPVTPPRLVAPRFLEVETSWPVDCTLDGLFPASEAQVYLALGDQMLNATVMNHGDTLTATATATARADQEGAREIVCNVTLGGERREARENLTVFSFLGPIVNLSEPTAHEGSTVTVSCMAGARVQVTLDGVPAAAPGQPAQLQLNATESDDGRSFFCSATLEVDGEFLHRNSSVQLRVLYGPKIDRATCPQHLKWKDKTRHVLQCQARGNPYPELRCLKEGSSREVPVGIPFFVNVTHNGTYQCQASSSRGKYTLVVVMDIEAGSSHFVPVFVAVLLTLGVVTIVLALMYVFREHQRSGSYHVREESTYLPLTSMQPTEAMGEEPSRAE

SEQ ID NO: 6829 - protein, 331 aa, Homo sapiens
MLLSQNAFIFRSLNLVLMVYISLVFGISYDSPDYTDESCTFKISLRNFRSILSWELKNHSIVPTHYTLLYTIMSKPEDLKVVKNCANTTRSFCDLTDEWRSTHEAYVTVLEGFSGNTTLFSCSHNFWLAIDMSFEPPEFEIVGFTNHINVMVKFPSIVEEELQFDLSLVIEEQSEGIVKKHKPEIKGNMSGNFTYIIDKLIPNTNYCVSVYLEHSDEQAVIKSPLKCTLLPPGQESESAESAKIGGIITVFLIALVLTSTIVTLKWIGYICLRNSLPKVLRQGLAKGWNAVAIHRCSHNALQSETPELKQSSCLSFPSSWDYKRASLCPSD

SEQ ID NO: 6830 - protein, 515 aa, Homo sapiens [sequence omitted]

SEQ ID NO: 6831 - protein, 423 aa, Homo sapiens
MLLSQNAFIFRSLNLVLMVYISLVFGISYDSPDYTDESCTFKISLRNFRSILSWELKNHSIVPTHYTLLYTIMSKPEDLKVVKNCANTTRSFCDLTDEWRSTHEAYVTVLEGFSGNTTLFSCSHNFWLAIDMSFEPPEFEIVGFTNHINVMVKFPSIVEEELQFDLSLVIEEQSEGIVKKHKPEIKGNMSGNFTYIIDKLIPNTNYCVSVYLEHSDEQAVIKSPLKCTLLPPGQESEFSTSGGGYTMHGLTVRPLGQASATSTESQLIDPESEEEPDLPEVDVELPTMPKDSPQQLELLSGPCERRKSPLQDPFPEEDYSSTEGSGGRITFNVDLNSVFLRVLDDEDSDDLEAPLMLSSHLEEMVDPEDPDNVQSNHLLASGEGTQPTFPSPSSEGLWSEDAPSDQSDTSESDVDLGDGYIMR

SEQ ID NO: 6832 - protein, 267 aa, Homo sapiens
MGSACIKVTKYFLFLFNLIFFILGAVILGFGVWILADKSSFISVLQTSSSSLRMGAYVFIGVGAVTMLMGFLGCIGAVNEVRCLLGLYFAFLLLILIAQVTAGALFYFNMGKLKQEMGGIVTELIRDYNSSREDSLQDAWDYVQAQVKCCGWVSFYNWTDNAELMNRPEVTYPCSCEVKGEEDNSLSVRKGFCEAPGNRTQSGNHPEDWPVYQEGCMEKVQAWLQENLGIILGVGVGVAIIELLGMVLSICLCRHVHSEDYSKVPKY

SEQ ID NO: 6833 - protein, 242 aa, Homo sapiens [sequence omitted]

SEQ ID NO: 6834 - protein, 157 aa, Homo sapiens
MRAVPLPAPLLPLLLLALLAAPTARASRAESVSAPRPEPERESRPPPGPGPGNTTRFGSGAAGGSGSSNSSGDALVTRISILLRDLPTLKAAVIVAFAFTTLLIACLLLRVFRSGKRLKKTRKYDIITTPAERVEMAPLNEEDDEDEDSTVFDIKYR

SEQ ID NO: 6835 - protein, 575 aa, Homo sapiens [sequence omitted]

SEQ ID NO: 6836 - protein, 217 aa, Homo sapiens
VSLSSQRRAMGISRDNWHKRRKTGGKRKPYHKKRKYELGRPAANTKIGPRRIHTVRVRGGNKKYRALRLDVGNFSWGSECCTRKTRIIDVVYNASNNELVRTKTLVKNCIVLIDSTPYRQWYESHYALPLGRKKGAKLTPEEEEILNKKRSKKIQKKYDERKKNAKISSLLEEQFQQGKLLACIASRPGQCGRADGYVLEGKELEFYLRKIKARKGK

SEQ ID NO: 6837 - protein, 221 aa, Homo sapiens
MSETAPLAPTIPAPAEKTPVKKKAKKAGATAGKRKASGPPVSELITKAVAASKERSGVSLAALKKALAAAGYDVEKNNSRIKLGLKSLVSKGTLVQTKGTGASGSFKLNKKAASGEGKPKAKKAGAAKPRKPAGAAKKPKKVAGAATPKKSIKKTPKKVKKPATAAGTKKVAKSAKKVKTPQPKKAAKSPAKAKAPKPKAAKPKSGKPKVTKAKKAAPKKK

SEQ ID NO: 6838 - protein, 213 aa, Homo sapiens [sequence omitted]

SEQ ID NO: 6839 - protein, 219 aa, Homo sapiens
MSETAPAAPAAPAPAEKTPVKKKARKSAGAAKRKASGPPVSELITKAVAASKERSGVSLAALKKALAAAGYDVEKNNSRIKLGLKSLVSKGTLVQTKGTGASGSFKLNKKAASGEAKPKAKKAGAAKAKKPAGAAKKPKKATGAATPKKSAKKTPKKAKKPAAAAGAKKAKSPKKAKAAKPKKAPKSPAKAKAVKPKAAKPKTAKPKAAKPKKAAAKKK

SEQ ID NO: 6840 - protein, 215 aa, Homo sapiens
MSETVPPAPAASAAPEKPLAGKKAKKPAKAAAASKKKPAGPSVSELIVQAASSSKERGGVSLAALKKALAAAGYDVEKNNSRIKLGIKSLVSKGTLVQTKGTGASGSFKLNKKASSVETKPGASKVATKTKATGASKKLKKATGASKKSVKTPKKAKKPAATRKSSKNPKKPKTVKPKKVAKSPAKAKAVKPKAAKARVTKPKTAKPKKAAPKKK

SEQ ID NO: 6841 - protein, 207 aa, Homo sapiens
MSETVPAASASAGVAAMEKLPTKKRGRKPAGLISASRKVPNLSVSKLITEALSVSQERVGMSLVALKKALAAAGYDVEKNNSRIKLSLKSLVNKGILVQTRGTGASGSFKLSKKVIPKSTRSKAKKSVSAKTKKLVLSRDSKSPKTAKTNKRAKKPRATTPKTVRSGRKAKGAKGKQQQKSPVKARASKSKLTQHHEVNVRKATSKK

SEQ ID NO: 6842 - protein, 238 aa, Homo sapiens
MLTTLLPILLLSGWAFCSQDASDGLQRLHMLQISYFRDPYHVWYQGNASLGGHLTHVLEGPDTNTTIIQLQPLQEPESWARTQSGLQSYLLQFHGLVRLVHQERTLAFPLTIRCFLGCELPPEGSRAHVFFEVAVNGSSFVSFRPERALWQADTQVTSGVVTFTLQQLNAYNRTRYELREFLEDTCVQYVQKHISAENTKGSQTSRSYTSLVLGVLVGSFIIAGVAVGIFLCTGGRRC

SEQ ID NO: 6843 - protein, 825 aa, Homo sapiens
MGWLCSGLLFPVSCLVLLQVASSGNMKVLQEPTCVSDYMSISTCEWKMNGPTNCSTELRLLYQLVFLLSEAHTCIPENNGGAGCVCHLLMDDVVSADNYTLDLWAGQQLLWKGSFKPSEHVKPRAPGNLTVHTNVSDTLLLTWSNPYPPDNYLYNHLTYAVNIWSENDPADFRIYNVTYLEPSLRIAASTLKSGISYRARVRAWAQCYNTTWSEWSPSTKWHNSYREPFEQHLLLGVSVSCIVILAVCLLCYVSITKIKKEWWDQIPNPARSRLVAIIIQDAQGSQWEKRSRGQEPAKCPHWKNCLTKLLPCFLEHNMKRDEDPHKAAKEMPFQGSGKSAWCPVEISKTVLWPESISVVRCVELFEAPVECEEEEEVEEEKGSFCASPESSRDDFQEGREGIVARLTESLFLDLLGEENGGFCQQDMGESCLLPPSGSTSAHMPWDEFPSAGPKEAPPWGKEQPLHLEPSPPASPTQSPDNLTCTETPLVIAGNPAYRSFSNSLSQSPCPRELGPDPLLARHLEEVEPEMPCVPQLSEPTTVPQPEPETWEQILRRNVLQHGAAAAPVSAPTSGYQEFVHAVEQGGTQASAVVGLGPPGEAGYKAFSSLLASSAVSPEKCGFGASSGEEGYKPFQDLIPGCPGDPAPVPVPLFTFGLDREPPRSPQSSHLPSSSPEHLGLEPGEKVEDMPKPPLPQEQATDPLVDSLGSGIVYSALTCHLCGHLKQCHGQEDGGQTPVMASPCCGCCCGDRSSPPTTPLRAPDPSPGGVPLEASLCPASLAPSGISEKSKSSSSFHPAPGNAQSSSQTPKIVNFVSVGPTYMRVS

SEQ ID NO: 6844 - protein, 1038 aa, Homo sapiens
MFPTESAWLGKRGANPGPEAAVRETVMLLLCLGVPTGRPYNVDTESALLYQGPHNTLFGYSVVLHSHGANRWLLVGAPTANWLANASVINPGAIYRCRIGKNPGQTCEQLQLGSPNGEPCGKTCLEERDNQWLGVTLSRQPGENGSIVTCGHRWKNIFYIKNENKLPTGGCYGVPPDLRTELSKRIAPCYQDYVKKFGENFASCQAGISSFYTKDLIVMGAPGSSYWTGSLFVYNITTNKYKAFLDKQNQVKFGSYLGYSVGAGHFRSQHTTEVVGGAPQHEQIGKAYIFSIDEKELNILHEMKGKKLGSYFGASVCAVDLNADGFSDLLVGAPMQSTIREEGRVFVYINSGSGAVMNAMETNLVGSDKYAARFGESIVNLGDIDNDGFEDVAIGAPQEDDLQGAIYIYNGRADGISSTFSQRIEGLQISKSLSMFGQSISGQIDADNNGYVDVAVGAFRSDSAVLLRTRPVVIVDASLSHPESVNRTKFDCVENGWPSVCIDLTLCFSYKGKEVPGYIVLFYNMSLDVNRKAESPPRFYFSSNGTSDVITGSIQVSSREANCRTHQAFMRKDVRDILTPIQIEAAYHLGPHVISKRSTEEFPPLQPILQQKKEKDIMKKTINFARFCAHENCSADLQVSAKIGFLKPHENKTYLAVGSMKTLMLNVSLFNAGDDAYETTLHVKLPVGLYFIKILELEEKQINCEVTDNSGVVQLDCSIGYIYVDHLSRIDISFLLDVSSLSRAEEDLSITVHATCENEEEMDNLKHSRVTVAIPLKYEVKLTVHGFVNPTSFVYGSNDENEPETCMVEKMNLTFHVINTGNSMAPNVSVEIMVPNSFSPQTDKLFNILDVQTTTGECHFENYQRVCALEQQKSAMQTLKGIVRFLSKTDKRLLYCIKADPHCLNFLCNFGKMESGKEASVHIQLEGRPSILEMDETSALKFEIRATGFPEPNPRVIELNKDENVAHVLLEGLHHQRPKRYFTIVIISSSLLLGLIVLLLISYVMWKAGFFKRQYKSILQEENRRDSWSYINSKSNDD

SEQ ID NO: 6845 - protein, 1709 aa, Homo sapiens
MSTLGYDSLECVFVFWVTNSNLESSRMYDVLEPQQGRGCGSSGSGPGNSITACKKVLRSNSLLESTDYWLQNQRMPCQIGFVEDKSENCASVCFVNLDVNKDECSTEHLQQKLVNVSPDLPKLISSMNVQQPKENEIVVLSGLASGNLQADFEVSQCPWLPDICLVQCARGNRPNSTNCIIFEINKFLIGLELVQERQLHLETNILKLEDDTNCSLSSIEEDFLTASEHLEEESEVDESRNDYENINVSANVLESKQLKGATQVEWNCNKEKWLYALEDKYINKYPTPLIKTERSPENLTKNTALQSLDPSAKPSQWKREAVGNGRQATHYYHSEAFKGQMEKSQALYIPKDAYFSMMDKDVPSACAVAEQRSNLNPGDHEDTRNALPPRQDGEVTTGKYATNLAESVLQDAFIRLSQSQSTLPQESAVSVSVGSSLLPSCYSTKDTVVSRSWNELPKIVVVQSPDGSDAAPQPGISSWPEMEVSVETSSILSGENSSRQPQSALEVALACAATVIGTISSPQATERLKMEQVVSNFPPGSSGALQTQAPQGLKEPSINEYSFPSALCGMTQVASAVAVCGLGEREEVTCSVAPSGSLPPAAEASEAMPPLCGLASMELGKEAIAKGLLKEAALVLTRPNTYSSIGDFLDSMNRRIMETASKSQTLCSENVVRNELAHTLSNVILRHSIDEVHHKNMIIDPNDNRHSSEILDTLMESTNQLLLDVICFTFKKMSHIVRLGECPAVLSKETIRRRETEPSCQPSDPGASQAWTKATESSSSSPLSNSHNTSLVINNLVDGMYSKQDKGGVRPGLFKNPTLQSQLSRSHRVPDSSTATTSSKEIYLKGIAGEDTKSPHHSENECRASSEGQRSPTVSQSRSGSQEAEESIHPNTQEKYNCATSRINEVQVNLSLLGDDLLLPAQSTLQTKHPDIYCITDFAEELADTVVSMATEIAAICLDNSSGKQPWFCAWKRGSEFLMTPNVPCRSLKRKKESQGSGTAVRKHKPPRLSEIKRKTDEHPELKEKLMNRVVDESMNLEDVPDSVNLFANEVAAKIMNLTEFSMVDGMWQAQGYPRNRLLSGDRWSRLKASSCESIPEEDSEARAYVNSLGLMSTLSQPVSRASSVSKQSSCESITDEFSRFMVNQMENEGRGFELLLDYYAGKNASSILNSAMQQACRKSDHLSVRPSCPSKQSSTESITEEFYRYMLRDIERDSRESASSRRSSQDWTAGLLSPSLRSPVCHRQSSMPDSRSPCSRLTVNVPIKANSLDGFAQNCPQDFLSVQPVSSASSSGLCKSDSCLYRRGGTDHITNMLIHETWASSIEALMRKNKIIVDDAEEADTEPVSGGSPSQAEKCANRLAASRMCSGPTLLVQESLDCPRKDSVTECKQPPVSSLSKTASLTNHSPLDSKKETSSCQDPVPINHKRRSLCSREVPLIQIETDQREACAGEPEPFLSKSSLLEEAEGHSNDKNIPDVVRGGDTAVSACQIHSDSLDTRDVPEAEASTEARAPDEAPNPPSSSEESTGSWTQLANEEDNPDDTSSFLQLSERSMSNGNSSATSSLGIMDLDIYQESMPSSPMINELVEEKKILKGQSESTEAPASGPPTGTASPQRSLLVINFDLEPECPDAELRATLQWIAASELGIPTIYFKKSQENRIEKFLDVVQLVHRKSWKVGDIFHAVVQYCKMHEEQKDGRLSLFDWLLELG

SEQ ID NO: 6846 - protein, 376 aa, Homo sapiens
MESYDVIANQPVVIDNGSGVIKAGFAGDQIPKYCFPNYVGRPKHVRVMAGALEGDIFIGPKAEEHRGLLSIRYPMEHGIVKDWNDMERIWQYVYSKDQLQTFSEEHPVLLTEAPLNPRKNRERAAEVFFETFNVPALFISMQAVLSLYATGRTTGVVLDSGDGVTHAVPIYEGFAMPHSIMRIDIAGRDVSRFLRLYLRKEGYDFHSSSEFEIVKAIKERACYLSINPQKDETLETEKAQYYLPDGSTIEIGPSRFRAPELLFRPDLIGEESEGIHEVLVFAIQKSDMDLRRTLFSNIVLSGGSTLFKGFGDRLLSEVKKLAPKDVKIRISAPQERLYSTWIGGSILASLDTFKKMWVSKKEYEEDGARSIHRKTF

SEQ ID NO: 6847 - protein, 1298 aa, Homo sapiens
MKPATGLWVWVSLLVAAGTVQPSDSQSVCAGTENKLSSLSDLEQQYRALRKYYENCEVVMGNLEITSIEHNRDLSFLRSVREVTGYVLVALNQFRYLPLENLRIIRGTKLYEDRYALAIFLNYRKDGNFGLQELGLKNLTEILNGGVYVDQNKFLCYADTIHWQDIVRNPWPSNLTLVSTNGSSGCGRCHKSCTGRCWGPTENHCQTLTRTVCAEQCDGRCYGPYVSDCCHRECAGGCSGPKDTDCFACMNFNDSGACVTQCPQTFVYNPTTFQLEHNFNAKYTYGAFCVKKCPHNFVVDSSSCVRACPSSKMEVEENGIKMCKPCTDICPKACDGIGTGSLMSAQTVDSSNIDKFINCTKINGNLIFLVTGIHGDPYNAIEAIDPEKLNVFRTVREITGFLNIQSWPPNMTDFSVFSNLVTIGGRVLYSGLSLLILKQQGITSLQFQSLKEISAGNIYITDNSNLCYYHTINWTTLFSTINQRIVIRDNRKAENCTAEGMVCNHLCSSDGCWGPGPDQCLSCRRFSRGRICIESCNLYDGEFREFENGSICVECDPQCEKMEDGLLTCHGPGPDNCTKCSHFKDGPNCVEKCPDGLQGANSFIFKYADPDRECHPCHPNCTQGCIGSSIEDCIGLMDRTPLIAAGVIGGLFILVIVGLTFAVYVRRKSIKKKRALRRFLETELVEPLTPSGTAPNQAQLRILKETELKRVKVLGSGAFGTVYKGIWVPEGETVKIPVAIKILNETTGPKANVEFMDEALIMASMDHPHLVRLLGVCLSPTIQLVTQLMPHGCLLEYVHEHKDNIGSQLLLNWCVQIAKGMMYLEERRLVHRDLAARNVLVKSPNHVKITDFGLARLLEGDEKEYNADGGKMPIKWMALECIHYRKFTHQSDVWSYGVTIWELMTFGGKPYDGIPTREIPDLLEKGERLPQPPICTIDVYMVMVKCWMIDADSRPKFKELAAEFSRMARDPQRYLVIQGDDRMKLPSPNDSKFFQNLLDEEDLEDMMDAEEYLVPQAFNIPPPIYTSRARIDSNRSEIGHSPPPAYTPMSGNQFVYRDGGFAAEQGVSVPYRAPTSTIPEAPVAQGATAEIFDDSCCNGTLRKPVAPHVQEDSSTQRYSADPTVFAPERSPRGELDEEGYMTPMRDKPKQEYLNPVEENPFVSRRKNGDLQALDNPEYHNASNGPPKAEDEYVNEPLYLNTFANTLGKAEYLKNNILSMPEKAKKAFDNPDYWNHSLPPRSTLQHPDYLQEYSTKYFYKQNGRIRPIVAENPEYLSEFSLKPGTVLPPPPYRHRNTVV

SEQ ID NO: 6848 - protein, 1308 aa, Homo sapiens
MKPATGLWVWVSLLVAAGTVQPSDSQSVCAGTENKLSSLSDLEQQYRALRKYYENCEVVMGNLEITSIEHNRDLSFLRSVREVTGYVLVALNQFRYLPLENLRIIRGTKLYEDRYALAIFLNYRKDGNFGLQELGLKNLTEILNGGVYVDQNKFLCYADTIHWQDIVRNPWPSNLTLVSTNGSSGCGRCHKSCTGRCWGPTENHCQTLTRTVCAEQCDGRCYGPYVSDCCHRECAGGCSGPKDTDCFACMNFNDSGACVTQCPQTFVYNPTTFQLEHNFNAKYTYGAFCVKKCPHNFVVDSSSCVRACPSSKMEVEENGIKMCKPCTDICPKACDGIGTGSLMSAQTVDSSNIDKFINCTKINGNLIFLVTGIHGDPYNAIEAIDPEKLNVFRTVREITGFLNIQSWPPNMTDFSVFSNLVTIGGRVLYSGLSLLILKQQGITSLQFQSLKEISAGNIYITDNSNLCYYHTINWTTLFSTINQRIVIRDNRKAENCTAEGMVCNHLCSSDGCWGPGPDQCLSCRRFSRGRICIESCNLYDGEFREFENGSICVECDPQCEKMEDGLLTCHGPGPDNCTKCSHFKDGPNCVEKCPDGLQGANSFIFKYADPDRECHPCHPNCTQGCNGPTSHDCIYYPWTGHSTLPQHARTPLIAAGVIGGLFILVIVGLTFAVYVRRKSIKKKRALRRFLETELVEPLTPSGTAPNQAQLRILKETELKRVKVLGSGAFGTVYKGIWVPEGETVKIPVAIKILNETTGPKANVEFMDEALIMASMDHPHLVRLLGVCLSPTIQLVTQLMPHGCLLEYVHEHKDNIGSQLLLNWCVQIAKGMMYLEERRLVHRDLAARNVLVKSPNHVKITDFGLARLLEGDEKEYNADGGKMPIKWMALECIHYRKFTHQSDVWSYGVTIWELMTFGGKPYDGIPTREIPDLLEKGERLPQPPICTIDVYMVMVKCWMIDADSRPKFKELAAEFSRMARDPQRYLVIQGDDRMKLPSPNDSKFFQNLLDEEDLEDMMDAEEYLVPQAFNIPPPIYTSRARIDSNRSEIGHSPPPAYTPMSGNQFVYRDGGFAAEQGVSVPYRAPTSTIPEAPVAQGATAEIFDDSCCNGTLRKPVAPHVQEDSSTQRYSADPTVFAPERSPRGELDEEGYMTPMRDKPKQEYLNPVEENPFVSRRKNGDLQALDNPEYHNASNGPPKAEDEYVNEPLYLNTFANTLGKAEYLKNNILSMPEKAKKAFDNPDYWNHSLPPRSTLQHPDYLQEYSTKYFYKQNGRIRPIVAENPEYLSEFSLKPGTVLPPPPYRHRNTVV

SEQ ID NO: 6849 - protein, 3859 aa, Homo sapiens
MAEGGEGGEDEIQFLRTEDEVVLQCIATIHKEQRKFCLAAEGLGNRLCFLEPTSEAKYIPPDLCVCNFVLEQSLSVRALQEMLANTGENGGEGAAQGGGHRTLLYGHAVLLRHSFSGMYLTCLTTSRSQTDKLAFDVGLREHATGEACWWTIHPASKQRSEGEKVRIGDDLILVSVSSERYLHLSVSNGNIQVDASFMQTLWNVHPTCSGSSIEEGYLLGGHVVRLFHGHDECLTIPSTDQNDSQHRRIFYEAGGAGTRASSLWRVEPLRISWSGSNIRWGQAFRLRHLTTGHYLALTEDQGLILQDRAKSDTKSTAFSFRASKELKEKLDSSHKRDIEGMGVPEIKYGDSVCFVQHIASGLWVTYKAQDAKTSRLGPLKRKVILHQEGHMDDGLTLQRCQREESQAARIIRNTTALFSQFVSGNNRTAAPITLPIEEVLQTLQDLIAYFQPPEEEMRHEDKQNKLRSLKNRQNLFKEEGMLALVLNCIDRLNIYNSVAHFAGIAREESGMAWKEILNLLYKLLAALIRGNRNNCAQFSNNLDWLISKLDRLESSSGILEVLHCILTESPEALNLIAEGHIKSIISLLDKHGRNHKVLDILCSLCLCNGVAVRANQNLICDNLLPRRNLLLQTRLINDVTSIRPNIFLGVAEGSAQYKKWYFELIIDQVDPFLTAEPTHLRVGWASSSGYAPCPGGGEGWGGNGVGDDLYSYGFDGLHLWSGRIPRAVASVNQHLLRSDDVVSCCLDLGVPSISFRINGQPVQGMFENFNTDGLFFPVMSFSAGVKVRFLMGGRHGEFKFLPPSGYAPCYEALLPKEKMRLEPVKEYKRDADGIRDLLGTTQFLSQASFIPCPVDTSQVILPPHLEKIRDRLAENIHELWGMNKIELGWTFGKIRDDNKRQHPCLVEFSKLPETEKNYNLQMSTETLKTLLALGCHIAHVNPAAEEDLKKVKLPKNYMMSNGYKPAPLDLSDVKLLPPQEILVDKLAENAHNVWAKDRIKQGWTYGIQQDLKNKRNPRLVPYALLDERTKKSNRDSLREAVRTFVGYGYNIEPSDQELADSAVEKVSIDKIRFFRVERSYAVRSGKWYFEFEVVTGGDMRVGWARPGCRPDVELGADDQAFVFEGNRGQRWHQGSGYFGRTWQPGDVVGCMINLDDASMIFTLNGELLITNKGSELAFADYEIENGFVPICCLGLSQIGRMNLGTDASTFKFYTMCGLQEGFEPFAVNMNRDVAMWFSKRLPTFVNVPKDHPHIEVMRIDGTMDSPPCLKVTHKTFGTQNSNADMIYCRLSMPVECHSSFSHSPCLDSEAFQKRKQMQEILSHTTTQCYYAIRIFAGQDPSCVWVGWVTPDYHLYSEKFDLNKNCTVTVTLGDERGRVHESVKRSNCYMVWGGDIVASSQRSNRSNVDLEIGCLVDLAMGMLSFSANGKELGTCYQVEPNTKVFPAVFLQPTSTSLFQFELGKLKNAMPLSAAIFRSEEKNPVPQCPPRLDVQTIQPVLWSRMPNSFLKVETERVSERHGWVVQCLEPLQMMALHIPEENRCVDILELCEQEDLMRFHYHTLRLYSAVCALGNSRVAYALCSHVDLSQLFYAIDNKYLPGLLRSGFYDLLISIHLASAKERKLMMKNEYIIPITSTTRNICLFPDESKRHGLPGVGLRTCLKPGFRFSTPCFVVTGEDHQKQSPEIPLESLRTKALSMLTEAVQCSGAHIRDPVGGSVEFQFVPVLKLIGTLLVMGVFDDDDVRQILLLIDPSVFGEHSAGTEEGAEKEEVTQVEEKAVEAGEKAGKEAPVKGLLQTRLPESVKLQMCELLSYLCDCELQHRVEAIVAFGDIYVSKLQANQKFRYNELMQALNMSAALTARKTKEFRSPPQEQINMLLNFQLGENCPCPEEIREELYDFHEDLLLHCGVPLEEEEEEEEDTSWTGKLCALVYKIKGPPKPEKEQPTEEEERCPTTLKELISQTMICWAQEDQIQDSELVRMMFNLLRRQYDSIGELLQALRKTYTISHTSVSDTINLLAALGQIRSLLSVRMGKEEELLMINGLGDIMNNKVFYQHPNLMRVLGMHETVMEVMVNVLGTEKSQIAFPKMVASCCRFLCYFCRISRQNQKAMFEHLSYLLENSSVGLASPSMRGSTPLDVAASSVMDNNELALSLEEPDLEKVVTYLAGCGLQSCPMLLAKGYPDVGWNPIEGERYLSFLRFAVFVNSESVEENASVVVKLLIRRPECFGPALRGEGGNGLLAAMQGAIKISENPALDLPSQGYKREVSTEDDEEEEEIVHMGNAIMSFYSALIDLLGRCAPEMHLIQTGKGEAIRIRSILRSLVPTEDLVGIISIPLKLPSLNKDGSVSEPDMAANFCPDHKAPMVLFLDRVYGIKDQTFLLHLLEVGFLPDLRASASLDTVSLSTTEAALALNRYICSAVLPLLTRCAPLFAGTEHCTSLIDSTLQTIYRLSKGRSLTKAQRDTIEECLLAICNHLRPSMLQQLLRRLVFDVPQLNEYCKMPLKLLTNHYEQCWKYYCLPSGWGSYGLAVEEELHLTEKLFWGIFDSLSHKKYDPDLFRMALPCLSAIAGALPPDYLDTRITATLEKQISVDADGNFDPKPINTMNFSLPEKLEYIVTKYAEHSHDKWACDKSQSGWKYGISLDENVKTHPLIRPFKTLTEKEKEIYRWPARESLKTMLAVGWTVERTKEGEALVQQRENEKLRSVSQANQGNSYSPAPLDLSNVVLSRELQGMVEVVAENYHNIWAKKKKLELESKGGGSHPLLVPYDTLTAKEKFKDREKAQDLFKFLQVNGIIVSRGMKDMELDASSMEKRFAYKFLKKILKYVDSAQEFIAHLEAIVSSGKTEKSPRDQEIKFFAKVLLPLVDQYFTSHCLYFLSSPLKPLSSSGYASHKEKEMVAGLFCKLAALVRHRISLFGSDSTTMVSCLHILAQTLDTRTVMKSGSELVKAGLRAFFENAAEDLEKTSENLKLGKFTHSRTQIKGVSQNINYTTVALLPILTSIFEHVTQHQFGMDLLLGDVQISCYHILCSLYSLGTGKNIYVERQRPALGECLASLAAAIPVAFLEPTLNRYNPLSVFNTKTPRERSILGMPDTVEDMCPDIPQLEGLMKEINDLAESGARYTEMPHVIEVILPMLCNYLSYWWERGPENLPPSTGPCCTKVTSEHLSLILGNILKIINNNLGIDEASWMKRIAVYAQPIISKARPDLLRSHFIPTLEKLKKKAVKTVQEEEQLKADGKGDTQEAELLILDEFAVLCRDLYAFYPMLIRYVDNNRSNWLKSPDADSDQLFRMVAEVFILWCKSHNFKREEQNFVIQNEINNLAFLTGDSKSKMSKAMQVKSGGQDQERKKTKRRGDLYSIQTSLIVAALKKMLPIGLNMCTPGDQELISLAKSRYSHRDTDEEVREHLRNNLHLQEKSDDPAVKWQLNLYKDVLKSEEPFNPEKTVERVQRISAAVFHLEQVEQPLRSKKAVWHKLLSKQRKRAVVACFRMAPLYNLPRHRSINLFLHGYQRFWIETEEYSFEEKLVQDLAKSPKVEEEEEEETEKQPDPLHQIILYFSRNALTERSKLEDDPLYTSYSSMMAKSCQSGEDEEEDEDKEKTFEEKEMEKQKTLYQQARLHERGAAEMVLQMISASKGEMSPMVVETLKLGIAILNGGNAGVQQKMLDYLKEKKDAGFFQSLSGLMQSCSVLDLNAFERQNKAEGLGMVTEEGTLIVRERGEKVLQNDEFTRDLFRFLQLLCEGHNSDFQNFLRTQMGNTTTVNVIISTVDYLLRLQESISDFYWYYSGKDIIDESGQHNFSKALAVTKQIFNSLTEYIQGPCIGNQQSLAHSRLWDAVVGFLHVFANMQMKLSQGMW

SEQ ID NO: 6850 - protein, 4870 aa, Homo sapiens [sequence omitted]

SEQ ID NO: 6851 - protein, 4865 aa, Homo sapiens
MAEGGEGGEDEIQFLRTEDEVVLQCIATIHKEQRKFCLAAEGLGNRLCFLEPTSEAKYIPPDLCVCNFVLEQSLSVRALQEMLANTGENGGEGAAQGGGHRTLLYGHAVLLRHSFSGMYLTCLTTSRSQTDKLAFDVGLREHATGEACWWTIHPASKQRSEGEKVRIGDDLILVSVSSERYLHLSVSNGNIQVDASFMQTLWNVHPTCSGSSIEEGYLLGGHVVRLFHGHDECLTIPSTDQNDSQHRRIFYEAGGAGTRASSLWRVEPLRISWSGSNIRWGQAFRLRHLTTGHYLALTEDQGLILQDRAKSDTKSTAFSFRASKELKEKLDSSHKRDIEGMGVPEIKYGDSVCFVQHIASGLWVTYKAQDAKTSRLGPLKRKVILHQEGHMDDGLTLQRCQREESQAARIIRNTTALFSQFVSGNNRTAAPITLPIEEVLQTLQDLIAYFQPPEEEMRHEDKQNKLRSLKNRQNLFKEEGMLALVLNCIDRLNIYNSVAHFAGIAREESGMAWKEILNLLYKLLAALIRGNRNNCAQFSNNLDWLISKLDRLESSSGILEVLHCILTESPEALNLIAEGHIKSIISLLDKHGRNHKVLDILCSLCLCNGVAVRANQNLICDNLLPRRNLLLQTRLINDVTSIRPNIFLGVAEGSAQYKKWYFELIIDQVDPFLTAEPTHLRVGWASSSGYAPCPGGGEGWGGNGVGDDLYSYGFDGLHLWSGRIPRAVASVNQHLLRSDDVVSCCLDLGVPSISFRINGQPVQGMFENFNTDGLFFPVMSFSAGVKVRFLMGGRHGEFKFLPPSGYAPCYEALLPKEKMRLEPVKEYKRDADGIRDLLGTTQFLSQASFIPCPVDTSQVILPPHLEKIRDRLAENIHELWGMNKIELGWTFGKIRDDNKRQHPCLVEFSKLPETEKNYNLQMSTETLKTLLALGCHIAHVNPAAEEDLKKVKLPKNYMMSNGYKPAPLDLSDVKLLPPQEILVDKLAENAHNVWAKDRIKQGWTYGIQQDLKNKRNPRLVPYALLDERTKKSNRDSLREAVRTFVGYGYNIEPSDQELADSAVEKVSIDKIRFFRVERSYAVRSGKWYFEFEVVTGGDMRVGWARPGCRPDVELGADDQAFVFEGNRGQRWHQGSGYFGRTWQPGDVVGCMINLDDASMIFTLNGELLITNKGSELAFADYEIENGFVPICCLGLSQIGRMNLGTDASTFKFYTMCGLQEGFEPFAVNMNRDVAMWFSKRLPTFVNVPKDHPHIEVMRIDGTMDSPPCLKVTHKTFGTQNSNADMIYCRLSMPVECHSSFSHSPCLDSEAFQKRKQMQEILSHTTTQCYYAIRIFAGQDPSCVWVGWVTPDYHLYSEKFDLNKNCTVTVTLGDERGRVHESVKRSNCYMVWGGDIVASSQRSNRSNVDLEIGCLVDLAMGMLSFSANGKELGTCYQVEPNTKVFPAVFLQPTSTSLFQFELGKLKNAMPLSAAIFRSEEKNPVPQCPPRLDVQTIQPVLWSRMPNSFLKVETERVSERHGWVVQCLEPLQMMALHIPEENRCVDILELCEQEDLMRFHYHTLRLYSAVCALGNSRVAYALCSHVDLSQLFYAIDNKYLPGLLRSGFYDLLISIHLASAKERKLMMKNEYIIPITSTTRNICLFPDESKRHGLPGVGLRTCLKPGFRFSTPCFVVTGEDHQKQSPEIPLESLRTKALSMLTEAVQCSGAHIRDPVGGSVEFQFVPVLKLIGTLLVMGVFDDDDVRQILLLIDPSVFGEHSAGTEEGAEKEEVTQVEEKAVEAGEKAGKEAPVKGLLQTRLPESVKLQMCELLSYLCDCELQHRVEAIVAFGDIYVSKLQANQKFRYNELMQALNMSAALTARKTKEFRSPPQEQINMLLNFQLGENCPCPEEIREELYDFHEDLLLHCGVPLEEEEEEEEDTSWTGKLCALVYKIKGPPKPEKEQPTEEEERCPTTLKELISQTMICWAQEDQIQDSELVRMMFNLLRRQYDSIGELLQALRKTYTISHTSVSDTINLLAALGQIRSLLSVRMGKEEELLMINGLGDIMNNKVFYQHPNLMRVLGMHETVMEVMVNVLGTEKSQIAFPKMVASCCRFLCYFCRISRQNQKAMFEHLSYLLENSSVGLASPSMRGSTPLDVAASSVMDNNELALSLEEPDLEKVVTYLAGCGLQSCPMLLAKGYPDVGWNPIEGERYLSFLRFAVFVNSESVEENASVVVKLLIRRPECFGPALRGEGGNGLLAAMQGAIKISENPALDLPSQGYKREVSTEDDEEEEEIVHMGNAIMSFYSALIDLLGRCAPEMHLIQTGKGEAIRIRSILRSLVPTEDLVGIISIPLKLPSLNKDGSVSEPDMAANFCPDHKAPMVLFLDRVYGIKDQTFLLHLLEVGFLPDLRASASLDTVSLSTTEAALALNRYICSAVLPLLTRCAPLFAGTEHCTSLIDSTLQTIYRLSKGRSLTKAQRDTIEECLLAICNHLRPSMLQQLLRRLVFDVPQLNEYCKMPLKLLTNHYEQCWKYYCLPSGWGSYGLAVEEELHLTEKLFWGIFDSLSHKKYDPDLFRMALPCLSAIAGALPPDYLDTRITATLEKQISVDADGNFDPKPINTMNFSLPEKLEYIVTKYAEHSHDKWACDKSQSGWKYGISLDENVKTHPLIRPFKTLTEKEKEIYRWPARESLKTMLAVGWTVERTKEGEALVQQRENEKLRSVSQANQGNSYSPAPLDLSNVVLSRELQGMVEVVAENYHNIWAKKKKLELESKGGGSHPLLVPYDTLTAKEKFKDREKAQDLFKFLQVNGIIVSRGMKDMELDASSMEKRFAYKFLKKILKYVDSAQEFIAHLEAIVSSGKTEKSPRDQEIKFFAKVLLPLVDQYFTSHCLYFLSSPLKPLSSSGYASHKEKEMVAGLFCKLAALVRHRISLFGSDSTTMVSCLHILAQTLDTRTVMKSGSELVKAGLRAFFENAAEDLEKTSENLKLGKFTHSRTQIKGVSQNINYTTVALLPILTSIFEHVTQHQFGMDLLLGDVQISCYHILCSLYSLGTGKNIYVERQRPALGECLASLAAAIPVAFLEPTLNRYNPLSVFNTKTPRERSILGMPDTVEDMCPDIPQLEGLMKEINDLAESGARYTEMPHVIEVILPMLCNYLSYWWERGPENLPPSTGPCCTKVTSEHLSLILGNILKIINNNLGIDEASWMKRIAVYAQPIISKARPDLLRSHFIPTLEKLKKKAVKTVQEEEQLKADGKGDTQEAELLILDEFAVLCRDLYAFYPMLIRYVDNNRSNWLKSPDADSDQLFRMVAEVFILWCKSHNFKREEQNFVIQNEINNLAFLTGDSKSKMSKSGGQDQERKKTKRRGDLYSIQTSLIVAALKKMLPIGLNMCTPGDQELISLAKSRYSHRDTDEEVREHLRNNLHLQEKSDDPAVKWQLNLYKDVLKSEEPFNPEKTVERVQRISAAVFHLEQVEQPLRSKKAVWHKLLSKQRKRAVVACFRMAPLYNLPRHRSINLFLHGYQRFWIETEEYSFEEKLVQDLAKSPKVEEEEEEETEKQPDPLHQIILYFSRNALTERSKLEDDPLYTSYSSMMAKSCQSGEDEEEDEDKEKTFEEKEMEKQKTLYQQARLHERGAAEMVLQMISASKGEMSPMVVETLKLGIAILNGGNAGVQQKMLDYLKEKKDAGFFQSLSGLMQSCSVLDLNAFERQNKAEGLGMVTEEGTLIVRERGEKVLQNDEFTRDLFRFLQLLCEGHNSDFQNFLRTQMGNTTTVNVIISTVDYLLRLQESISDFYWYYSGKDIIDESGQHNFSKALAVTKQIFNSLTEYIQGPCIGNQQSLAHSRLWDAVVGFLHVFANMQMKLSQDSSQIELLKELLDLLQDMVVMLLSLLEGNVVNGTIGKQMVDTLVESSTNVEMILKFFDMFLKLKDLTSSDTFKEYDPDGKGIISKKEFQKAMEGQKQYTQSEIDFLLSCAEADENDMFNYVDFVDRFHEPAKDIGFNVAVLLTNLSEHMPNDSRLKCLLDPAESVLNYFEPYLGRIEIMGGAKKIERVYFEISESSRTQWEKPQVKESKRQFIFDVVNEGGEQEKMELFVNFCEDTIFEMQLASQISESDSADRPEEEEEDEDSSYVLEIAGEEEEDGSLEPASAFAMACASVKRNVTDFLKRATLKNLRKQYRNVKKMTAKELVKVLFSFFWMLFVGLFQLLFTILGGIFQILWSTVFGGGLVEGAKNIRVTKILGDMPDPTQFGIHDDTMEAERAEVMEPGITTELVHFIKGEKGDTDIMSDLFGLHPKKEGSLKHGPEVGLGDLSEIIGKDEPPTLESTVQKKRKAQAAEMKAANEAEGKVESEKADMEDGEKEDKDKEEEQAEYLWTEVTKKKKRRCGQKVEKPEAFTANFFKGLEIYQTKLLHYLARNFYNLRFLALFVAFAINFILLFYKVTEEPLEEETEDVANLWNSFNDEEEEEAMVFFVLQESTGYMAPTLRALAIIHTIISLVCVVGYYCLKVPLVVFKREKEIARKLEFDGLYITEQPSEDDIKGQWDRLVINTPSFPNNYWDKFVKRKVINKYGDLYGAERIAELLGLDKNALDFSPVEETKAEAASLVSWLSSIDMKYHIWKLGVVFTDNSFLYLAWYTTMSVLGHYNNFFFAAHLLDIAMGFKTLRTILSSVTHNGKQLVLTVGLLAVVVYLYTVVAFNFFRKFYNKSEDDDEPDMKCDDMMTCYLFHMYVGVRAGGGIGDEIEDPAGDPYEMYRIVFDITFFFFVIVILLAIIQGLIIDAFGELRDQQEQVREDMETKCFICGIGNDYFDTTPHGFETHTLQEHNLANYLFFLMYLINKDETEHTGQESYVWKMYQERCWDFFPAGDCFRKQYEDQLG

SEQ ID NO: 6852 - protein, 368 aa, Homo sapiens
MWPLWRLVSLLALSQALPFEQRGFWDFTLDDGPFMMNDEEASGADTSGVLDPDSVTPTYSAMCPFGCHCHLRVVQCSDLGLKSVPKEISPDTTLLDLQNNDISELRKDDFKGLQHLYALVLVNNKISKIHEKAFSPLRKLQKLYISKNHLVEIPPNLPSSLVELRIHDNRIRKVPKGVFSGLRNMNCIEMGGNPLENSGFEPGAFDGLKLNYLRISEAKLTGIPKDLPETLNELHLDHNKIQAIELEDLLRYSKLYRLGLGHNQIRMIENGSLSFLPTLRELHLDNNKLARVPSGLPDLKLLQVVYLHSNNITKVGVNDFCPMGFGVKRAYYNGISLFNNPVPYWEVQPATFRCVTDRLAIQFGNYKK

SEQ ID NO: 6853 - protein, 325 aa, Homo sapiens
MWPLWRLVSLLALSQALPFEQRGFWDFTLDDGPFMMNDEEASGADTSGVLDPDSVTPTYSAMCPFGCHCHLRVVQCSDLGLKSVPKEISPDTTLLDLQKLYISKNHLVEIPPNLPSSLVELRIHDNRIRKVPKGVFSGLRNMNCIEMGGNPLENSGFEPGAFDGLKLNYLRISEAKLTGIPKDLPETLNELHLDHNKIQAIELEDLLRYSKLYRLGLGHNQIRMIENGSLSFLPTLRELHLDNNKLARVPSGLPDLKLLQVVYLHSNNITKVGVNDFCPMGFGVKRAYYNGISLFNNPVPYWEVQPATFRCVTDRLAIQFGNYKK

SEQ ID NO: 6854 - protein, 450 aa, Homo sapiens [sequence omitted]

SEQ ID NO: 6855 - protein, 637 aa, Homo sapiens
MESEYVLCDWKDQLWPAKVLSRSETSSNSKRKKAFSLEVQILSLDEKIKLDSTETKILNKSQIEAIAASLGLQSEDSAPPTEETAYGRSLKVALGILNERTNLSQASTSDEEEITMLSQNVPQKQSDSPPHKKYRKDEGDLPGCLEERENSACLLASSESDDSLYDDKSQAPTMVDTIPSEVETKSLQNSSWCETFPSLSEDNDEKENKNKIDISAVMSVHSAVKEESACVKDEKFAPPLSPLSSDMLIMPKALKEESEDTCLETLAVPSECSAFSENIEDPGEGPSNPCLDTSQNQPSMESEMGAAACPGSCSRECEVSFSASNPVWDYSHLMSSERNFQRLDFEELEEEGQASDKSLLPSRINLSLLDDDEEDEELPRFILHYETHPFETGMIVWFKYQKYPFWPAVIKSIRRKERKASVLFVEANMNSEKKGIRVNFRRLKKFDCKEKQMLVDKAREDYSESIDWCISLICDYRVRIGCGSFTGSLLEYYAADISYPVRKETKQDTFRNKFPKLHNEDAREPMAVTSQTKKMSFQKILPDRMKAARDRANKNLVDFIVNAKGTENHLLAIVNGTKGSRWLKSFLNANRFTPCIETYFEDEDQLDEVVKYLQEVCNQIDQIMPTWIKDDKIKFIL

SEQ ID NO: 6856 - protein, 593 aa, Homo sapiens
METPPLPPACTKQGHQKPLDSKDDNTEKHCPVTVNPWHMKKAFKVMNELRSQNLLCDVTIVAEDMEISAHRVVLAACSPYFHAMFTGEMSESRAKRVRIKEVDGWTLRMLIDYVYTAEIQVTEENVQVLLPAAGLLQLQDVKKTCCEFLESQLHPVNCLGIRAFADMHACTDLLNKANTYAEQHFADVVLSEEFLNLGIEQVCSLISSDKLTISSEEKVFEAVIAWVNHDKDVRQEFMARLMEHVRLPLLPREYLVQRVEEEALVKNSSACKNYLIEAMKYHLLPTEQRILMKSVRTRLRTPMNLPKLMVVVGGQAPKAIRSVECYDFKEERWHQVAELPSRRCRAGMVYMAGLVFAVGGFNGSLRVRTVDSYDPVKDQWTSVANMRDRRSTLGAAVLNGLLYAVGGFDGSTGLSSVEAYNIKSNEWFHVAPMNTRRSSVGVGVVGGLLYAVGGYDGASRQYLSTVECYNATTNEWTYIAEMSTRRSGAGVGVLNNLLYAVGGHDGPLVRKSVEVYDPTTNAWRQVADMNMCRRNAGVCAVNGLLYVVGGDDGSCNLASVEYYNPTTDKWTVVSSCMSTGRSYAGVTVIDKPL

SEQ ID NO: 6857 - protein, 593 aa, Homo sapiens
METPPLPPACTKQGHQKPLDSKDDNTEKHCPVTVNPWHMKKAFKVMNELRSQNLLCDVTIVAEDMEISAHRVVLAACSPYFHAMFTGEMSESRAKRVRIKEVDGWTLRMLIDYVYTAEIQVTEENVQVLLPAAGLLQLQDVKKTCCEFLESQLHPVNCLGIRAFADMHACTDLLNKANTYAEQHFADVVLSEEFLNLGIEQVCSLISSDKLTISSEEKVFEAVIAWVNHDKDVRQEFMARLMEHVRLPLLPREYLVQRVEEEALVKNSSACKDYLIEAMKYHLLPTEQRILMKSVRTRLRTPMNLPKLMVVVGGQAPKAIRSVECYDFKEERWHQVAELPSGRCRAGMVYMAGLVFAVGGFNGSLRVRTVDSYDPVKDQWTSVANMRDRRSTLGAAVLNGLLYAVGGFDGSTGLSSVEAYNIKSNEWFHVAPMNTRRSSVGVGVVGGLLYAVGGYDGASRQCLSTVECYNATTNEWTYIAEMSTRRSGAGVGVLNNLLYAVGGHDGPLVRKSVEVYDPTTNAWRQVADMNMCRRNAGVCAVNGLLYVVGGDDGSCNLASVEYYNPTTDKWTVVSSCMSTGRSYAGVTVIDKPL

SEQ ID NO: 6858 - protein, 873 aa, Homo sapiens
MTDSDEDALKVDQGPSRDIPKPWVIPAPKGILQHIFGTSHVFQSICDVKPKVTGLTVPLKVREYYSRGQQCLEQADWETAVLLFSRALHLDPQLVDFYALRAEAYLQLCDFSSAAQNLRRAYSLQQDNCKHLERLTFVLYLQGQCLFEQCAFLDALNVFSHAAELQPEKPCFRYRCMACLLALKQHQACLTLITNELKQDTTNADVYIFRARLYNFLQKPHLCYRDLHSALLLNPKHPQARMLLQKMVAQAQQARQDAGILAVQGKLQHALQRINRAIENNPLDPSLFLFRGTMYRRLQEFDGAVEDFLKVLDMVTEDQEDMVRQAQRQLLLTYNDFAVHCYRQGAYQEGVLLLNKALRDEQQEKGLYINRGDCFFQLGNLAFAEADYQQALALSPQDEGANTRTGLLQEKMGFCEQRRKQFQKAENHFSTAIRHNPQKAQYYLYRAKSRQLLQNIFGARQDVATVLLLNPKQPKLSLLMTNLFPGMSVEEVLSTQIAHLARLQLEQMVEGSLQAGSPQGIVGMLKRHELERQKALALQHSWKQGEPLIATSEELKATPEIPQVKPGSSEGEAEAPEEEEEKEKEKKGEKKSELIPSKVASLSDSYLDQTSSASSMSFRTTGTSETEMSAICQEYRSTSATAVTFSDSSLLKTQSSDSGNNREALSHGPRKIKATQGQRQSLSKTEPTQSQRRNSSKTKATIHKRNSSKTKATQSQRRNSSKTRATQGQGQSSSKTEATQGQRQSSSEIEATQGPRQEPSKTKTTRSPRQRPRKVKAARGRSWRPSKVDATQGRSRGLLRSSTKTEAFYDSNWSLSKTEYAQGQGQRSSKAEGAQGKSQGMSSTSSKAESTWGPSPSLSKTEVDQDLTYYESV

SEQ ID NO: 6859 - protein, 873 aa, Homo sapiens
MTDSDEDALKVDQGPSRDIPKPWVIPAPKGILQHIFGTSHVFQSICDVKPKVTGLTVPLKVREYYSRGQQCLEQADWETAVLLFSRALHLDPQLVDFYALRAEAYLQLCDFSSAAQNLRRAYSLQQDNCKHLERLTFVLYLQGQCLFEQCAFLDALNVFSHAAELQPEKPCFRYRCMACLLALKQHQACLTLITNELKQDTTNADVYIFRARLYNFLQKPHLCYRDLHSALLLNPKHPQARMLLQKMVAQAQQARQDAGILAVQGKLQHALQRINRAIENNPLDPSLFLFRGTMYRRLQEFDGAVEDFLKVLDMVTEDQEDMVRQAQRQLLLTYNDFAVHCYRQGAYQEGVLLLNKALRDEQQEKGLYINRGDCFFQLGNLAFAEADYQQALALSPQDEGANTRMGLLQEKMGFCEQRRKQFQKAENHFSTAIRHNPQKAQYYLYRAKSRQLLQNIFGARQDVATVLLLNPKQPKLSLLMTNLFPGMSVEEVLSTQIAHLARLQLEQMVEGSLQAGSPQGIVGMLKRHELERQKALALQHSWKQGEPLIATSEELKATPEIPQVKPGSSEGEAEAPEEEEEKEKEKKEEKKSELIPSKVASLSDSYLDQTSSASSMSFRTTGTSETEMSAICQEYRSTSATAVTFSDSSLLKTQSSDSGNNREALSHGPRKIKATQGQRQSLSKTEPTQSQRRNSSKTKATIHKRNSSKTKATQSQRRNSSKTRATQGQGQSSSKTEATQGQRQSSSEIEATQGPRQEPSKTKTTRSPRQRPRKVKAARGRSWRPSKVDATQGRSRGLLRSSTKTEAFYDSNWSLSKTEYAQGQGQRSSKAEGAQGKSQGMSSTSSKAESTWGPSPSLSKTEVDQDLTYYEAV

SEQ ID NO: 6860 - protein, 814 aa, Homo sapiens
MSVVGLDVGSQSCYIAVARAGGIETIANEFSDRCTPSVISFGSKNRTIGVAAKNQQITHANNTVSNFKRFHGRAFNDPFIQKEKENLSYDLVPLKNGGVGIKVMYMGEEHLFSVEQITAMLLTKLKETAENSLKKPVTDCVISVPSFFTDAERRSVLDAAQIVGLNCLRLMNDMTAVALNYGIYKQDLPSLDEKPRIVVFVDMGHSAFQVSACAFNKGKLKVLGTAFDPFLGGKNFDEKLVEHFCAEFKTKYKLDAKSKIRALLRLYQECEKLKKLMSSNSTDLPLNIECFMNDKDVSGKMNRSQFEELCAELLQKIEVPLYSLLEQTHLKVEDVSAVEIVGGATRIPAVKERIAKFFGKDISTTLNADEAVARGCALQCAILSPAFKVREFSVTDAVPFPISLIWNHDSEDTEGVHEVFSRNHAAPFSKVLTFLRRGPFELEAFYSDPQGVPYPEAKIGRFVVQNVSAQKDGEKSRVKVKVRVNTHGIFTISTASMVEKVPTEENEMSSEADMECLNQRPPENPDTDANEKKVDQPPEAKKPKIKVVNVELPIEANLVWQLGKDLLNMYIETEGKMIMQDKLEKERNDAKNAVEEYVYEFRDKLCGPYEKFICEQDHQNFLRLLTETEDWLYEEGEDQAKQAYVDKLEELMKIGTPVKVRFQEAEERPKMFEELGQRLQHYAKIAADFRNKDEKYNHIDESEMKKVEKSVNEVMEWMNNVMNAQAKKSLDQDPVVRAQEIKTKIKELNNTCEPVVTQPKPKIESPKLERTPNGPNIDKKEEDLEDKNNFGAEPPHQNGECYPNEKNSVNMDLD

SEQ ID NO: 6861 - protein, 858 aa, Homo sapiens
MSVVGLDVGSQSCYIAVARAGGIETIANEFSDRCTPSVISFGSKNRTIGVAAKNQQITHANNTVSNFKRFHGRAFNDPFIQKEKENLSYDLVPLKNGGVGIKVMYMGEEHLFSVEQITAMLLTKLKETAENSLKKPVTDCVISVPSFFTDAERRSVLDAAQIVGLNCLRLMNDMTAVALNYGIYKQDLPSLDEKPRIVVFVDMGHSAFQVSACAFNKGKLKVLGTAFDPFLGGKNFDEKLVEHFCAEFKTKYKLDAKSKIRALLRLYQECEKLKKLMSSNSTDLPLNIECFMNDKDVSGKMNRSQFEELCAELLQKIEVPLYSLLEQTHLKVEDVSAVEIVGGATRIPAVKERIAKFFGKDISTTLNADEAVARGCALQCAILSPAFKVREFSVTDAVPFPISLIWNHDSEDTEGVHEVFSRNHAAPFSKVLTFLRRGPFELEAFYSDPQGVPYPEAKIGRFVVQNVSAQKDGEKSRVKVKVRVNTHGIFTISTASMVEKVPTEENEMSSEADMECLNQRPPENPDTDKNVQQDNSEAGTQPQVQTDAQQTSQSPPSPELTSEENKIPDADKANEKKVDQPPEAKKPKIKVVNVELPIEANLVWQLGKDLLNMYIETEGKMIMQDKLEKERNDAKNAVEEYVYEFRDKLCGPYEKFICEQDHQNFLRLLTETEDWLYEEGEDQAKQAYVDKLEELMKIGTPVKVRFQEAEERPKMFEELGQRLQHYAKIAADFRNKDEKYNHIDESEMKKVEKSVNEVMEWMNNVMNAQAKKSLDQDPVVRAQEIKTKIKELNNTCEPVVTQPKPKIESPKLERTPNGPNIDKKEEDLEDKNNFGAEPPHQNGECYPNEKNSVNMDLD

SEQ ID NO: 6862 - protein, 1684 aa, Homo sapiens
QLRKLVLEIIHRIPTNEHLRPHTKNVLSVMFRFLETENEENVLICLRIIIELHKQFRPPITQEHSIIPRGSLSLKVLAELPIIVVLMYQLYKLNIHNVVAEFVPLIMNTIAIQVSAQARQHKLYNKELYADFIAAQIKTLSFLAYIIRIYQELVTKYSQQMVKGMLQLLSNCPAETAHLRKELLIAAKHILTTELRNQFIPCMDKLFDESILIGSGYTARETLRPLAYSTLADLVHHVRQHLPLSDLSLAVQLFAKNIDDESLPSSIQTMSCKLLLNLVDCIRSKSEQESGNGRDVLMRMLEVFVLKFHTIARYQLSAIFKKCKPQSELGAVEAALPGVPTAPAAPGPAPSPAPVPAPPPPPPPPPPATPVTPAPVPPFEKQGEKDKEDKQTFQVTDCRSLVKTLVCGVKTITWGITSCKAPGEAQFIPNKQLQPKETQIYIKLVKYAMQALDIYQVQIAGNGQTYIRVANCQTVRMKEEKEVLEHFAGVFTMMNPLTFKEIFQTTVPYMVERISKNYALQIVANSFLANPTTSALFATILVEYLLDRLPEMGSNVELSNLYLKLFKLVFGSVSLFAAENEQMLKPHLHKIVNSSMELAQTAKEPYNYFLLLRALFRSIGGGLNMLQSGLHKQHMKDLFVELCLTVPVRLSSLLPYLPMLMDPLVSALNGSQTLVSQGLRTLELCVDNLQPDFLYDHIQPVRAELMQALWRTLRNPADSISHVAYRVLGKFGGSNRKMLKESQKLHYVVTEVQGPSITVEFSDCKASLQLPMEKAIETALDCLKSANTEPYYRRQAWEVIKCFLVAMMSLEDNKHALYQLLAHPNFTEKTIPNVIISHRYKAQDTPARKTFEQALTGAFMSAVIKDLRPSALPFVASLIRHYTMVAVAQQCGPFLLPCYQVGSQPSTAMFHSEENGSKGMDPLVLIDAIAICMAYEEKELCKIGEVALAVIFDVASIILGSKERACQLPLFSYIVERLCACCYEQAWYAKLGGVVSIKFLMERLPLTWVLQNQQTFLKALLFVMMDLTGEVSNGAVAMAKTTLEQLLMRCATPLKDEERAEEIVAAQEKSFHHVTHDLVREVTSPNSTVRKQAMHSLQVLAQVTGKSVTVIMEPHKEFLEGATIEVDQIHTHMRPLLMMLGDYRSLTLNVVNRLTSVTRLFPNSFNDKFCDQMMEMKICSAIINLFHLIPAAPQTLVKPLLEVVMKTERAMLIEAGSPFREPLIKFLTRHPSQTVELFMMEATLNDPQWSRMFMSFLKHKDARPLRDVLAANPNRFITLLLPGGAQTAVRPGSPSTSTMRLDLQFQAIKIISIIVKNDDSWLASQHSLVSQLRRVWVSENFQERHRKENMAATNWKEPKLLAYCLLNYCKRNYGDIELLFQLLRAFTGRFLCNMTFLKEYMEEEIPKNYSIAQKRALFFRFVDFNDPNFGDELKAKVLDPEKQADMLDSLRIYLLQYATLLVEHAPHHIHDNNKNRNSKLRRLMTFAWPCLLSKACVDPACKYSGHLLLAHIIAKFAIHKKIVLQVFHSLLKAHAMEARAIVRQAMAILTPAVPARMEDGHQMLTHWTRKIIVEEGHTVPQLVHILHLIVQHFKVYYPVRHHLVQHMVSAMQRLGFTPSVTIEQRRLAVDLSEVVIKWELQRIKDQQVFGRSQSLPGADSLLAKPIDKQHTDTVVNFLIRVACQ

SEQ ID NO: 6863 - protein, 1683 aa, Homo sapiens [sequence omitted]

SEQ ID NO: 6864 - protein, 1719 aa, Homo sapiens [sequence omitted]

SEQ ID NO: 6865 - protein, 537 aa, Homo sapiens
MAAQCVTKVALNVSCANLLDKDIGSKSDPLCVLFLNTSGQQWYEVERTERIKNCLNPQFSKTFIIDYYFEVVQKLKFGVYDIDNKTIELSDDDFLGECECTLGQIVSSKKLTRPLVMKTGRPAGKGSITISAEEIKDNRVVLFEMEARKLDNKDLFGKSDPYLEFHKQTSDGNWLMVHRTEVVKNNLNPVWRPFKISLNSLCYGDMDKTIKVECYDYDNDGSHDLIGTFQTTMTKLKEASRSSPVEFECINEKKRQKKKSYKNSGVISVKQCEITVECTFLDYIMGGCQLNFTVGVDFTGSNGDPRSPDSLHYISPNGVNEYLTALWSVGLVIQDYDADKMFPAFGFGAQIPPQWQVSHEFPMNFNPSNPYCNGIQGIVEAYRSCLPQIKLYGPTNFSPIINHVARFAAAATQQQTASQYFVLLIITDGVITDLDETRQAIVNASRLPMSIIIVGVGGADFSAMEFLDGDGGSLRSPLGEVAIRDIVQFVPFRQFQNAPKEALAQCVLAEIPQQVVGYFNTYKLLPPKNPATKQQKQ

SEQ ID NO: 6866 - protein, 344 aa, Homo sapiens
MGPPSAPPCRLHVPWKEVLLTASLLTFWNPPTTAKLTIESTPFNVAEGKEVLLLAHNLPQNRIGYSWYKGERVDGNSLIVGYVIGTQQATPGPAYSGRETIYPNASLLIQNVTQNDTGFYTLQVIKSDLVNEEATGQFHVYPELPKPSISSNNSNPVEDKDAVAFTCEPEVQNTTYLWWVNGQSLPVSPRLQLSNGNMTLTLLSVKRNDAGSYECEIQNPASANRSDPVTLNVLYGPDGPTISPSKANYRPGENLNLSCHAASNPPAQYSWFINGTFQQSTQELFIPNITVNNSGSYMCQAHNSATGLNRTTVTMITVSGSAPVLSAVATVGITIGVLARVALI

SEQ ID NO: 6867 - protein, 344 aa, Homo sapiens
MGPPSAPPCRLHVPWKEVLLTASLLTFWNPPTTAKLTIESTPFNVAEGKEVLLLAHNLPQNRIGYSWYKGERVDGNSLIVGYVIGTQQATPGPAYSGRETIYPNASLLIQNVTQNDTGFYTLQVIKSDLVNEEATGQFHVYPELPKPSISSNNSNPVEDKDAVAFTCEPEVQNTTYLWWVNGQSLPVSPRLQLSNGNMTLTLLSVKRNDAGSYECEIQNPASANRSDPVTLNVLYGPDVPTISPSKANYRPGENLNLSCHAASNPPAQYSWFINGTFQQSTQELFIPNITVNNSGSYMCQAHNSATGLNRTTVTMITVSGSAPVLSAVATVGITIGVLARVALI

SEQ ID NO: 6868 - protein, 488 aa, Homo sapiens
MFSALKYHAIDYLYENVVRKKFYRDALLLRIPSCLYQDESYHVAVTDNKFRRPWTRVSAVSVPGMTDTSVLDQWKASFFVEDFLEKKTITRMVTQINCEFEEVVPSSNPDSQIEVEEVSLYTHMDYNEVFTPVSCLEKCSALQNQNQDLFIDDKGILFVSSRKHLPTLPTLLSRLKLFLVKDPLLDFKGQIFTEANFSRECFSLQETLEAFVKEDFCMDKVNFCQEKLEDTICLNEPSSFLIEYEFLIPPSLKPEIDIPSLSELKELLNPVPEIINYVDEKEKLFERDLTNKHGIEDIGDIKFSSTEILTIQSQSEPEECSKPGELEMPLTPLFLTCQHSSVNSLRTELQTFPLSPVCKINLLTAEESANEYYMMWQLERCRSPLNPFLLTVPRIQEPHSQYSVTDLKKIFSVKEESLVINLEKAEWWKQAGLNLKMMETLEHLNTYLCHDNLSSNDTKIEIFLPTKVLQLECKYITVNISYVNIFRM

SEQ ID NO: 6869 - protein, 6907 aa, Homo sapiens
MASSPELPTEDEQGSWGIDDLHISLQAEQEDTQKKAFTCWINSQLARHTSPSVISDLFTDIKKGHVLLDLLEVLSGQQLPRDKGSNTFQCRINIEHALTFLRNRSIKLINIHVTDIIDGNPSIILGLIWTIILHFHIEKLAQTLSCNYNQPSLDDVSVVDSSPASSPPAKKCSKVQARWQMSARKALLLWAQEQCATYESVNVTDFKSSWRNGMAFLAIIHALRPDLIDMKSVKHRSNKDNLREAFRIAEQELKIPRLLEPEDVDVVDPDEKSIMTYVAQFLQYSKDAPGTGEEAQGKVKDAMGWLTLQKEKLQKLLKDSENDTYFKKYNSLLSFMESFNEEKKSFLDVLSIKRDLDELDKDHLQLREAWDGLDHQINAWKIKLNYALPPPLHQTEAWLQEVEELMDEDLSASQDHSQAVTLIQEKMTLFKSLMDRFEHHSNILLTFENKDENHLPLVPPNKLEEMKRRINNILEKKFILLLEFHYYKCLVLGLVDEVKSKLDIWNIKYGSRESVELLLEDWHKFIEEKEFLARLDTSFQKCGEIYKNLAGECQNINKQYMMVKSDVCMYRKNIYNVKSTLQKVLACWATYVENLRLLRACFEETKKEEIKEVPFETLAQWNLEHATLNEAGNFLVEVSNDVVGSSISKELRRLNKRWRKLVSKTQLEMNLPLMIKKQDQPTFDNSGNILSKEEKATVEFSTDMSVELPENYNQNIKAGEKHEKENEEFTGQLKVAKDVEKLIGQVEIWEAEAKSVLDQDDVDTSMEESLKHLIAKGSMFDELMARSEDMLQMDIQNISSQESFQHVLTTGLQAKIQEAKEKVQINVVKLIAALKNLTDVSPDLDIRLKMEESQKELESYMMRAQQLLGQRESPGELISKHKEALIISNTKSLAKYLKAVEELKNNVTEDIKMSLEEKSRDVCAKWESLHHELSLYVQQLKIDIEKGKLSDNILKLEKQINKEKKLIRRGRTKGLIKEHEACFSEEGCLYQLNHHMEVLRELCEELPSQKSQQEVKRLLKDYEQKIERLLKCASEIHMTLQPTAGGTSKNEGTITTSENRGGDPHSEAPFAKSDNQPSTEKAMEPTMKFSLASVLRPLQEESIMEKDYSASINSLLERYDTYRDILEHHLQNNKFRITSDFSSEEDRSSSCLQAKLTDLQVIKNETDARWKEFEIISLKLENHVNDIKKPFVIKERDTLKERERELQMTLNTRMESLETALRLVLPVEKASLLLCGSDLPLHKMAIQGFHLIDADRIYQHLRNIQDSIAKQIEICNRLEEPGNFVLKELHPFDLHAMQNIILKYKTQFEGMNHRVQRSEDTLKALEDFLASLRTAKLSAEPVTDLSASDTQVAQENTLTVKNKEGEIHLMKDKAKHLDKCLKMLDMSFKDAERGDDTSCENLLDAFSIKLSETHGYGVQEEFTEENKLLEACIFKNNELLKNIQDVQSQISKIGLKDPTVPAVKHRKKSLIRLDKVLDEYEEEKRHLQEMANSLPHFKDGREKTVNQQCQNTVVLWENTKALVTECLEQCGRVLELLKQYQNFKSILTTLIQKEESVISLQASYMGKENLKKRIAEIEIVKEEFNEHLEVVDKINQVCKNLQFYLNKMKTFEEPPFEKEANIIVDRWLDINEKTEDYYENLGRALALWDKLFNLKNVIDEWTEKALQKMELHQLTEEDRERLKEELQVHEQKTSEFSRRVAEIQFLLQSSEIPLELQVMESSILNKMEHVQKCLTGESNCHALSGSTAELREDLDQAKTQIGMTESLLKALSPSDSLEIFTKLEEIQQQILQQKHSMILLENQIGCLTPELSELKKQYESVSDLFNTKKSVLQDHFSKLLNDQCKNFNDWFSNIKVNLKECFESSETKKSVEQKLQKLSDFLTLEGRNSKIKQVDSVLKHVKKHLPKAHVKELISWLVGQEFELEKMESICQARAKELEDSLQQLLRLQDDHRNLRKWLTNQEEKWKGMEEPGEKTELFCQALARKREQFESVAQLNNSLKEYGFTEEEEIIMEATCLMDRYQTLLRQLSEIEEEDKLLPTEDQSFNDLAHDVIHWIKEIKESLMVLNSSEGKMPLEERIQKIKEIILLKPEGDARIETIMKQAESSEAPLVQKTLTDISNQWDNTLHLASTYLSHQEKLLLEGEKYLQSKEDLRLMLIELKKKQEAGFALQHGLQEKKAQLKIYKKFLKKAQDLTSLLKELKSQGNYLLECTKNPSFSEEPWLEIKHLHESLLQQLQDSVQNLDGHVREHDSYQVCVTDLNTTLDNFSKEFVSFSDKPVDQIAVEEKLQKLQELENRLSLQDGTLKKILALAKSVKQNTSSVGQKIIKDDIKSLQCKQKDLENRLASAKQEMECCLNSILKSKRSTEKKGKFTLPGREKQATSDVQESTQESAAVEKLEEDWEINKDSAVEMAMSKQLSLNAQESMKNTEDERKVNELQNQPLELDTMLRNEQLEEIEKLYTQLEAKKAAIKPLEQTECLNKTETGALVLHNIGYSAQHLDNLLQALITLKKNKESQYCVLRDFQEYLAAVESSMKALLTDKESLKVGPLDSVTYLDKIKKFIASIEKEKDSLGNLKIKWENLSNHVTDMDKKLLESQIKQLEHGWEQVEQQIQKKYSQQVVEYDEFTTLMNKVQDTEISLQQQQQHLQLRLKSPEERAGNQSMIALTTDLQATKHGFSVLKGQAELQMKRIWGEKEKKNLEDGINNLKKQWETLEPLHLEAENQIKKCDIRNKMKETILWAKNLLGELNPSIPLLPDDILSQIRKCKVTHDGILARQQSVESLAEEVKDKVPSLTTYEGSDLNNTLEDLRNQYQMLVLKSTQRSQQLEFKLEERSNFFAIIRKFQLMVQESETLIIPRVETAATEAELKHHHVTLEASQKELQEIDSGISTHLQELTNIYEELNVFERLFLEDQLKNLKIRTNRIQRFIQNTCNEVEHKIKFCRQFHEKTSALQEEADSIQRNELLLNQEVNKGVKEEIYNLKDRLTAIKCCILQVLKLKKVFDYIGLNWDFSQLDQLQTQVFEKEKELEEKIKQLDTFEEEHGKYQALLSKMRAIDLQIKKMTEVVLKAPDSSPESRRLNAQILSQRIEKAKCLCDEIIKKLNENKTFDDSFKEKEILQIKLNAEENDKLYKVLQNMVLELSPKELDEKNCQDKLETSLHVLNQIKSQLQQPLLINLEIKHIQNEKDNCEAFQEQVWAEMCSIKAVTAIEKQREENSSEASDVETKLREFEDLQMQLNTSIDLRTNVLNDAYENLTRYKEAVTRAVESITSLEAIIIPYRVDVGNPEESLEMPLRKQEELESTVAHIQDLTEKLGMISSPEAKLQLQYTLQELVSKNSAMKEAFKAQETEAERYLENYKCYRKMEEDIYTNLSKMETVLGQSMSSLPLSYREALERLEQSKALVSNLISTKEELMKLRQILRLLRLRCTENDGICLLKIVSALWEKWLSLLEAAKEWEMWCEELKQEWKFVSEEIEREAIILDNLQEELPEISKTKEAATTEELSELLDCLCQYGENVEKQQLLLTLLLQRIRSIQNVPESSGAVETVPAFQEITSMKERCNKLLQKVQKNKELVQTEIQERHSFTKEIIALKNFFQQTTTSFQNMAFQDHPEKSEQFEELQSILKKGKLTFENIMEKLRIKYSEMYTIVPAEIESQVEECRKALEDIDEKISNEVLKSSPSYAMRRKIEEINNGLHNVEKMLQQKSKNIEKAQEIQKKMWDELDLWHSKLNELDSEVQDIVEQDPGQAQEWMDNLMIPFQQYQQVSQRAECRTSQLNKATVKMEEYSDLLKSTEAWIENTSHLLANPADYDSLRTLSHHASTVQMALEDSEQKHNLLHSIFMDLEDLSIIFETDELTQSIQELSNQVTALQQKIMESLPQIQRMADDVVAIESEVKSMEKRVSKIKTILLSKEIFDFSPEEHLKHGEVILENIRPMKKTIAEIVSYQVELRLPQTGMKPLPVFQRTNQLLQDIKLLENVTQEQNELLKVVIKQTNEQDEEIENLKQILNNYSAQFSLEHMSPDQADKLPQLQGEIERMEKQILSLNQRKEDLLVDLKATVLNLHQHLKQEQEGVERDRLPAVTSEEGGVAERDASERKLNRRGSMSYLAAVEEEVEESSVKSDNGDEKAEPSPQSWSSLWKHDKDMEEDRASSSSGTIVQEAYGKISTSDNSMAQILTPDSLNTEQGPECSLRPNQTEEGTTPPIEADTLDSSDAQGGLEPRVEKTRPEPTEVLHACKTQVAELELWLQQANVAVEPETLNADMQQVLEQQLVGCQAMLTEIEHKVAFLLETCKDQGLGDNGATQHEAEALSLKLKTVKCNLEKVQMMLQEKHSEDQHPTILKKSSEPEHQEALQPVNLSELESIVTERPQFSRQKDFQQQQVLELKPMEQKDFIKFIEFNAKKMWPQYCQHDNDTTQESSASNQASSPENDVPDSILSPQGQNGDKWQYLHHELSSKIKLPLPQLVEPQVSTNMGILPSVTMYNFRYPTTEELKTYTTQLEDLRQEASNLQTQENMTEEAYINLDKKLFELFLTLSQCLSSVEEMLEMPRLYREDGSGQQVHYETLALELKKLYLALSDKKGDLLKAMTWPGENTNLLLECFDNLQVCLEHTQAAAVCRSKSLKAGLDYNRSYQNEIKRLYHQLIKSKTSLQQSLNEISGQSVAEQLQKADAYTVELENAESRVAKLRDEGERLHLPYALLQEVYKLEDVLDSMWGMLRARYTELSSPFVTESQQDALLQGMVELVKIGKEKLAHGHLKQTKSKVALQAQIENHKVFFQKLVADMLLIQAYSAKILPSLLQNRETFWAEQVTEVKILEEKSRQCGMKLQSLLQKWEEFDENYASLEKDLEILISTLPSVSLVEETEERLVERISFYQQIKRNIGGKHARLYQTLNEGKQLVASVSCPELEGQIAKLEEQWLSLNKKIDHELHRLQALLKHLLSYNRDSDQLTKWLESSQHTLNYWKEQSLNVSQDLDTIRSNINNFFEFSKEVDEKSSLKTAVISIGNQLLHLKETDTATLRASLAQFEQKWTMLITQLPDIQEKLHQLQMEKLPSRKAITEMISWMNNVEHQTSDEDSVHSPSSASQVKHLLQKHKEFRMEMDYKQWIVDFVNQSLLQLSTCDVESKRYERTEFAEHLGEMNRQWHRVHGMLNRKIQHLEQLLESITESENKIQILNNWLEAQEERLKTLQKPESVISVQKLLLDCQDIENQLAIKSKALDELKQSYLTLESGAVPLLEDTASRIDELFQKRSSVLTQVNQLKTSMQSVLQEWKIYDQLYDEVNMMTIRFWYCMEHSKPVVLSLETLRCQVENLQSLQDEAESSEGSWEKLQEVIGKLKGLCPSVAEIIEEKCQNTHKRWTQVNQAIADQLQKAQSLLQLWKAYSNAHGEAAARLKQQEAKFQQLANISMSGNNLAEILPPALQDIKELQHDVQKTKEAFLQNSSVLDRLPQPAESSTHMLLPGPLHSLQRAAYLEKMLLVKANEFEFVLSQFKDFGVRLESLKGLIMHEEENLDRLHQQEKENPDSFLNHVLALTAQSPDIEHLNEVSLKLPLSDVAVKTLQNMNRQWIRATATALERCSELQGIGLNEKFLYCCEKWIQLLEKIEEALKVDVANSLPELLEQQKTYKMLEAEVSINQTIADSYVTQSLQLLDTTEIENRPEFITEFSKLTDRWQNAVQGVRQRKGDVDGLVRQWQDFTTSVENLFRFLTDTSHLLSAVKGQERFSLYQTRSLIHELKNKEIHFQRRRTTCALTLEAGEKLLLTTDLKTKESVGRRISQLQDSWKDMEPQLAEMIKQFQSTVETWDQCEKKIKELKSRLQVLKAQSEDPLPELHEDLHNEKELIKELEQSLASWTQNLKELQTMKADLTRHVLVEDVMVLKEQIEHLHRQWEDLCLRVAIRKQEIEDRLNTWVVFNEKNKELCAWLVQMENKVLQTADISIEEMIEKLQKDCMEEINLFSENKLQLKQMGDQLIKASNKSRAAEIDDKLNKINDRWQHLFDVIGSRVKKLKETFAFIQQLDKNMSNLRTWLARIESELSKPVVYDVCDDQEIQKRLAEQQDLQRDIEQHSAGVESVFNICDVLLHDSDACANETECDSIQQTTRSLDRRWRNICAMSMERRMKIEETWRLWQKFLDDYSRFEDWLKSAERTAACPNSSEVLYTSAKEELKRFEAFQRQIHERLTQLELINKQYRRLARENRTDTASRLKQMVHEGNQRWDNLQRRVTAVLRRLRHFTNQREEFEGTRESILVWLTEMDLQLTNVEHFSESDADDKMRQLNGFQQEITLNTNKIDQLIVFGEQLIQKSEPLDAVLIEDELEELHRYCQEVFGRVSRFHRRLTSCTPGLEDEKEASENETDMEDPREIQTDSWRKRGESEEPSSPQSLCHLVAPGHERSGCETPVSVDSIPLEWDHTGDVGGSSSHEEDEEGPYYSALSDVEIPENPEAYLKMTTKTLKASSGKSISDGHSWHVPDSPSCPEHHYKQMEGDRNVPPVPPASSTPYKPPYGKLLLPPGTDGGKEGPRVLNGNPQQEDGGLAGITEQQSGAFDRWEMIQAQELHNKLKIKQNLQQLNSDISAITTWLKKTEAELEMLKMAKPPSDIQEIELRVKRLQEILKAFDTYKALVVSVNVSSKEFLQTESPESTELQSRLRQLSLLWEAAQGAVDSWRGGLRQSLMQCQDFHQLSQNLLLWLASAKNRRQKAHVTDPKADPRALLECRRELMQLEKELVERQPQVDMLQEISNSLLIKGHGEDCIEAEEKVHVIEKKLKQLREQVSQDLMALQGTQNPASPLPSFDEVDSGDQPPATSVPAPRAKFRAVRTTEGEEETESRVPGSTRPQRSFLSRVVRAALPLQLLLLLLLLLACLLPSSEEDYSCTQANNFARSFYPMLRYTNGPPPT

SEQ ID NO: 6870 - protein, 6885 aa, Homo sapiens
MASSPELPTEDEQGSWGIDDLHISLQAEQEDTQKKAFTCWINSQLARHTSPSVISDLFTDIKKGHVLLDLLEVLSGQQLPRDKGSNTFQCRINIEHALTFLRNRSIKLINIHVTDIIDGNPSIILGLIWTIILHFHIEKLAQTLSCNYNQPSLDDVSVVDSSPASSPPAKKCSKVQARWQMSARKALLLWAQEQCATYESVNVTDFKSSWRNGMAFLAIIHALRPDLIDMKSVKHRSNKDNLREAFRIAEQELKIPRLLEPEDVDVVDPDEKSIMTYVAQFLQYSKDAPGTGEEAQGKVKDAMGWLTLQKEKLQKLLKDSENDTYFKKYNSLLSFMESFNEEKKSFLDVLSIKRDLDELDKDHLQLREAWDGLDHQINAWKIKLNYALPPPLHQTEAWLQEVEELMDEDLSASQDHSQAVTLIQEKMTLFKSLMDRFEHHSNILLTFENKDENHLPLVPPNKLEEMKRRINNILEKKFILLLEFHYYKCLVLGLVDEVKSKLDIWNIKYGSRESVELLLEDWHKFIEEKEFLARLDTSFQKCGEIYKNLAGECQNINKQYMMVKSDVCMYRKNIYNVKSTLQKVLACWATYVENLRLLRACFEETKKEEIKEVPFETLAQWNLEHATLNEAGNFLVEVSNDVVGSSISKELRRLNKRWRKLVSKTQLEMNLPLMIKKQDQPTFDNSGNILSKEEKATVEFSTDMSVELPENYNQNIKAGEKHEKENEEFTGQLKVAKDVEKLIGQVEIWEAEAKSVLDQDDVDTSMEESLKHLIAKGSMFDELMARSEDMLQMDIQNISSQESFQHVLTTGLQAKIQEAKEKVQINVVKLIAALKNLTDVSPDLDIRLKMEESQKELESYMMRAQQLLGQRESPGELISKHKEALIISNTKSLAKYLKAVEELKNNVTEDIKMSLEEKSRDVCAKWESLHHELSLYVQQLKIDIEKGKLSDNILKLEKQINKEKKLIRRGRTKGLIKEHEACFSEEGCLYQLNHHMEVLRELCEELPSQKSQQEVKRLLKDYEQKIERLLKCASEIHMTLQPTAGGTSKNEGTITTSENRGGDPHSEAPFAKSDNQPSTEKAMEPTMKFSLASVLRPLQEESIMEKDYSASINSLLERYDTYRDILEHHLQNNKFRITSDFSSEEDRSSSCLQAKLTDLQVIKNETDARWKEFEIISLKLENHVNDIKKPFVIKERDTLKERERELQMTLNTRMESLETALRLVLPVEKASLLLCGSDLPLHKMAIQGFHLIDADRIYQHLRNIQDSIAKQIEICNRLEEPGNFVLKELHPFDLHAMQNIILKYKTQFEGMNHRVQRSEDTLKALEDFLASLRTAKLSAEPVTDLSASDTQVAQENTLTVKNKEGEIHLMKDKAKHLDKCLKMLDMSFKDAERGDDTSCENLLDAFSIKLSETHGYGVQEEFTEENKLLEACIFKNNELLKNIQDVQSQISKIGLKDPTVPAVKHRKKSLIRLDKVLDEYEEEKRHLQEMANSLPHFKDGREKTVNQQCQNTVVLWENTKALVTECLEQCGRVLELLKQYQNFKSILTTLIQKEESVISLQASYMGKENLKKRIAEIEIVKEEFNEHLEVVDKINQVCKNLQFYLNKMKTFEEPPFEKEANIIVDRWLDINEKTEDYYENLGRALALWDKLFNLKNVIDEWTEKALQKMELHQLTEEDRERLKEELQVHEQKTSEFSRRVAEIQFLLQSSEIPLELQVMESSILNKMEHVQKCLTGESNCHALSGSTAELREDLDQAKTQIGMTESLLKALSPSDSLEIFTKLEEIQQQILQQKHSMILLENQIGCLTPELSELKKQYESVSDLFNTKKSVLQDHFSKLLNDQCKNFNDWFSNIKVNLKECFESSETKKSVEQKLQKLSDFLTLEGRNSKIKQVDSVLKHVKKHLPKAHVKELISWLVGQEFELEKMESICQARAKELEDSLQQLLRLQDDHRNLRKWLTNQEEKWKGMEEPGEKTELFCQALARKREQFESVAQLNNSLKEYGFTEEEEIIMEATCLMDRYQTLLRQLSEIEEEDKLLPTEDQSFNDLAHDVIHWIKEIKESLMVLNSSEGKMPLEERIQKIKEIILLKPEGDARIETIMKQAESSEAPLVQKTLTDISNQWDNTLHLASTYLSHQEKLLLEGEKYLQSKEDLRLMLIELKKKQEAGFALQHGLQEKKAQLKIYKKFLKKAQDLTSLLKELKSQGNYLLECTKNPSFSEEPWLEIKHLHESLLQQLQDSVQNLDGHVREHDSYQVCVTDLNTTLDNFSKEFVSFSDKPVDQIAVEEKLQKLQELENRLSLQDGTLKKILALAKSVKQNTSSVGQKIIKDDIKSLQCKQKDLENRLASAKQEMECCLNSILKSKRSTEKKGKFTLPGREKQATSDVQESTQESAAVEKLEEDWEINKDSAVEMAMSKQLSLNAQESMKNTEDERKVNELQNQPLELDTMLRNEQLEEIEKLYTQLEAKKAAIKPLEQTECLNKTETGALVLHNIGYSAQHLDNLLQALITLKKNKESQYCVLRDFQEYLAAVESSMKALLTDKESLKVGPLDSVTYLDKIKKFIASIEKEKDSLGNLKIKWENLSNHVTDMDKKLLESQIKQLEHGWEQVEQQIQKKYSQQVVEYDEFTTLMNKVQDTEISLQQQQQHLQLRLKSPEERAGNQSMIALTTDLQATKHGFSVLKGQAELQMKRIWGEKEKKNLEDGINNLKKQWETLEPLHLEAENQIKKCDIRNKMKETILWAKNLLGELNPSIPLLPDDILSQIRKCKVTHDGILARQQSVESLAEEVKDKVPSLTTYEGSDLNNTLEDLRNQYQMLVLKSTQRSQQLEFKLEERSNFFAIIRKFQLMVQESETLIIPRVETAATEAELKHHHVTLEASQKELQEIDSGISTHLQELTNIYEELNVFERLFLEDQLKNLKIRTNRIQRFIQNTCNEVEHKIKFCRQFHEKTSALQEEADSIQRNELLLNQEVNKGVKEEIYNLKDRLTAIKCCILQVLKLKKVFDYIGLNWDFSQLDQLQTQVFEKEKELEEKIKQLDTFEEEHGKYQALLSKMRAIDLQIKKMTEVVLKAPDSSPESRRLNAQILSQRIEKAKCLCDEIIKKLNENKTFDDSFKEKEILQIKLNAEENDKLYKVLQNMVLELSPKELDEKNCQDKLETSLHVLNQIKSQLQQPLLINLEIKHIQNEKDNCEAFQEQVWAEMCSIKAVTAIEKQREENSSEASDVETKLREFEDLQMQLNTSIDLRTNVLNDAYENLTRYKEAVTRAVESITSLEAIIIPYRVDVGNPEESLEMPLRKQEELESTVAHIQDLTEKLGMISSPEAKLQLQYTLQELVSKNSAMKEAFKAQETEAERYLENYKCYRKMEEDIYTNLSKMETVLGQSMSSLPLSYREALERLEQSKALVSNLISTKEELMKLRQILRLLRLRCTENDGICLLKIVSALWEKWLSLLEAAKEWEMWCEELKQEWKFVSEEIEREAIILDNLQEELPEISKTKEAATTEELSELLDCLCQYGENVEKQQLLLTLLLQRIRSIQNVPESSGAVETVPAFQEITSMKERCNKLLQKVQKNKELVQTEIQERHSFTKEIIALKNFFQQTTTSFQNMAFQDHPEKSEQFEELQSILKKGKLTFENIMEKLRIKYSEMYTIVPAEIESQVEECRKALEDIDEKISNEVLKSSPSYAMRRKIEEINNGLHNVEKMLQQKSKNIEKAQEIQKKMWDELDLWHSKLNELDSEVQDIVEQDPGQAQEWMDNLMIPFQQYQQVSQRAECRTSQLNKATVKMEEYSDLLKSTEAWIENTSHLLANPADYDSLRTLSHHASTVQMALEDSEQKHNLLHSIFMDLEDLSIIFETDELTQSIQELSNQVTALQQKIMESLPQIQRMADDVVAIESEVKSMEKRVSKIKTILLSKEIFDFSPEEHLKHGEVILENIRPMKKTIAEIVSYQVELRLPQTGMKPLPVFQRTNQLLQDIKLLENVTQEQNELLKVVIKQTNEQDEEIENLKQILNNYSAQFSLEHMSPDQADKLPQLQGEIERMEKQILSLNQRKEDLLVDLKATVLNLHQHLKQEQEGVERDRLPAVTSEEGGVAERDASERKLNRRGSMSYLAAVEEEVEESSVKSDNGDEKAEPSPQSWSSLWKHDKDMEEDRASSSSGTIVQEAYGKISTSDNSMAQILTPDSLNTEQGPECSLRPNQTEEGTTPPIEADTLDSSDAQGGLEPRVEKTRPEPTEVLHACKTQVAELELWLQQANVAVEPETLNADMQQVLEQQLVGCQAMLTEIEHKVAFLLETCKDQGLGDNGATQHEAEALSLKLKTVKCNLEKVQMMLQEKHSEDQHPTILKKSSEPEHQEALQPVNLSELESIVTERPQFSRQKDFQQQQVLELKPMEQKDFIKFIEFNAKKMWPQYCQHDNDTTQESSASNQASSPENDVPDSILSPQGQNGDKWQYLHHELSSKIKLPLPQLVEPQVSTNMGILPSVTMYNFRYPTTEELKTYTTQLEDLRQEASNLQTQENMTEEAYINLDKKLFELFLTLSQCLSSVEEMLEMPRLYREDGSGQQVHYETLALELKKLYLALSDKKGDLLKAMTWPGENTNLLLECFDNLQVCLEHTQAAAVCRSKSLKAGLDYNRSYQNEIKRLYHQLIKSKTSLQQSLNEISGQSVAEQLQKADAYTVELENAESRVAKLRDEGERLHLPYALLQEVYKLEDVLDSMWGMLRARYTELSSPFVTESQQDALLQGMVELVKIGKEKLAHGHLKQTKSKVALQAQIENHKVFFQKLVADMLLIQAYSAKILPSLLQNRETFWAEQVTEVKILEEKSRQCGMKLQSLLQKWEEFDENYASLEKDLEILISTLPSVSLVEETEERLVERISFYQQIKRNIGGKHARLYQTLNEGKQLVASVSCPELEGQIAKLEEQWLSLNKKIDHELHRLQALLKHLLSYNRDSDQLTKWLESSQHTLNYWKEQSLNVSQDLDTIRSNINNFFEFSKEVDEKSSLKTAVISIGNQLLHLKETDTATLRASLAQFEQKWTMLITQLPDIQEKLHQLQMEKLPSRKAITEMISWMNNVEHQTSDEDSVHSPSSASQVKHLLQKHKEFRMEMDYKQWIVDFVNQSLLQLSTCDVESKRYERTEFAEHLGEMNRQWHRVHGMLNRKIQHLEQLLESITESENKIQILNNWLEAQEERLKTLQKPESVISVQKLLLDCQDIENQLAIKSKALDELKQSYLTLESGAVPLLEDTASRIDELFQKRSSVLTQVNQLKTSMQSVLQEWKIYDQLYDEVNMMTIRFWYCMEHSKPVVLSLETLRCQVENLQSLQDEAESSEGSWEKLQEVIGKLKGLCPSVAEIIEEKCQNTHKRWTQVNQAIADQLQKAQSLLQLWKAYSNAHGEAAARLKQQEAKFQQLANISMSGNNLAEILPPALQDIKELQHDVQKTKEAFLQNSSVLDRLPQPAESSTHMLLPGPLHSLQRAAYLEKMLLVKANEFEFVLSQFKDFGVRLESLKGLIMHEEENLDRLHQQEKENPDSFLNHVLALTAQSPDIEHLNEVSLKLPLSDVAVKTLQNMNRQWIRATATALERCSELQGIGLNEKFLYCCEKWIQLLEKIEEALKVDVANSLPELLEQQKTYKMLEAEVSINQTIADSYVTQSLQLLDTTEIENRPEFITEFSKLTDRWQNAVQGVRQRKGDVDGLVRQWQDFTTSVENLFRFLTDTSHLLSAVKGQERFSLYQTRSLIHELKNKEIHFQRRRTTCALTLEAGEKLLLTTDLKTKESVGRRISQLQDSWKDMEPQLAEMIKQFQSTVETWDQCEKKIKELKSRLQVLKAQSEDPLPELHEDLHNEKELIKELEQSLASWTQNLKELQTMKADLTRHVLVEDVMVLKEQIEHLHRQWEDLCLRVAIRKQEIEDRLNTWVVFNEKNKELCAWLVQMENKVLQTADISIEEMIEKLQKDCMEEINLFSENKLQLKQMGDQLIKASNKSRAAEIDDKLNKINDRWQHLFDVIGSRVKKLKETFAFIQQLDKNMSNLRTWLARIESELSKPVVYDVCDDQEIQKRLAEQQDLQRDIEQHSAGVESVFNICDVLLHDSDACANETECDSIQQTTRSLDRRWRNICAMSMERRMKIEETWRLWQKFLDDYSRFEDWLKSAERTAACPNSSEVLYTSAKEELKRFEAFQRQIHERLTQLELINKQYRRLARENRTDTASRLKQMVHEGNQRWDNLQRRVTAVLRRLRHFTNQREEFEGTRESILVWLTEMDLQLTNVEHFSESDADDKMRQLNGFQQEITLNTNKIDQLIVFGEQLIQKSEPLDAVLIEDELEELHRYCQEVFGRVSRFHRRLTSCTPGLEDEKEASENETDMEDPREIQTDSWRKRGESEEPSSPQSLCHLVAPGHERSGCETPVSVDSIPLEWDHTGDVGGSSSHEEDEEGPYYSALSGKSISDGHSWHVPDSPSCPEHHYKQMEGDRNVPPVPPASSTPYKPPYGKLLLPPGTDGGKEGPRVLNGNPQQEDGGLAGITEQQSGAFDRWEMIQAQELHNKLKIKQNLQQLNSDISAITTWLKKTEAELEMLKMAKPPSDIQEIELRVKRLQEILKAFDTYKALVVSVNVSSKEFLQTESPESTELQSRLRQLSLLWEAAQGAVDSWRGGLRQSLMQCQDFHQLSQNLLLWLASAKNRRQKAHVTDPKADPRALLECRRELMQLEKELVERQPQVDMLQEISNSLLIKGHGEDCIEAEEKVHVIEKKLKQLREQVSQDLMALQGTQNPASPLPSFDEVDSGDQPPATSVPAPRAKQFRAVRTTEGEEETESRVPGSTRPQRSFLSRVVRAALPLQLLLLLLLLLACLLPSSEEDYSCTQANNFARSFYPMLRYTNGPPPT

SEQ ID NO: 6871 - protein, 284 aa, Homo sapiens
MPRYAQLVMGPAGSGKSTYCATMVQHCEALNRSVQVVNLDPAAEHFNYSVMVDIRELIEVDDVMEDDSLRFGPNGGLVFCMEYFANNFDWLENCLGHVEDDYILFDCPGQIELYTHLPVMKQLVQQLEQWEFRVCGVFLVDSQFMVESFKFISGILAALSAMISLEIPQVNIMTKMDLLSKKAKKEIEKFLDPDMYSLLEDSTSDLRSKKFKKLTKAICGLIDDYSMVRFLPYDQSDEESMNIVLQHIDFAIQYGEDLEFKEPKEREDESSSMFDEYFQECQDE

SEQ ID NO: 6872 - protein, 514 aa, Homo sapiens
MSRESDVEAQQSHGSSACSQPHGSVTQSQGSSSQSQGISSSSTSTMPNSSQSSHSSSGTLSSLETVSTQELYSIPEDQEPEDQEPEEPTPAPWARLWALQDGFANLECVNDNYWFGRDKSCEYCFDEPLLKRTDKYRTYSKKHFRIFREVGPKNSYIAYIEDHSGNGTFVNTELVGKGKRRPLNNNSEIALSLSRNKVFVFFDLTVDDQSVYPKALRDEYIMSKTLGSGACGEVKLAFERKTCKKVAIKIISKRKFAIGSAREADPALNVETEIEILKKLNHPCIIKIKNFFDAEDYYIVLELMEGGELFDKVVGNKRLKEATCKLYFYQMLLAVQITDFGHSKILGETSLMRTLCGTPTYLAPEVLVSVGTAGYNRAVDCWSLGVILFICLSGYPPFSEHRTQVSLKDQITSGKYNFIPEVWAEVSEKALDLVKKLLVVDPKARFTTEEALRHPWLQDEDMKRKFQDLLSEENESTALPQVLAQPSTSRKRPREGEAEGAETTKRPAVCAAVL

SEQ ID NO: 6873 - protein, 543 aa, Homo sapiens
MSRESDVEAQQSHGSSACSQPHGSVTQSQGSSSQSQGISSSSTSTMPNSSQSSHSSSGTLSSLETVSTQELYSIPEDQEPEDQEPEEPTPAPWARLWALQDGFANLECVNDNYWFGRDKSCEYCFDEPLLKRTDKYRTYSKKHFRIFREVGPKNSYIAYIEDHSGNGTFVNTELVGKGKRRPLNNNSEIALSLSRNKVFVFFDLTVDDQSVYPKALRDEYIMSKTLGSGACGEVKLAFERKTCKKVAIKIISKRKFAIGSAREADPALNVETEIEILKKLNHPCIIKIKNFFDAEDYYIVLELMEGGELFDKVVGNKRLKEATCKLYFYQMLLAVQYLHENGIIHRDLKPENVLLSSQEEDCLIKITDFGHSKILGETSLMRTLCGTPTYLAPEVLVSVGTAGYNRAVDCWSLGVILFICLSGYPPFSEHRTQVSLKDQITSGKYNFIPEVWAEVSEKALDLVKKLLVVDPKARFTTEEALRHPWLQDEDMKRKFQDLLSEENESTALPQVLAQPSTSRKRPREGEAEGAETTKRPAVCAAVL

SEQ ID NO: 6874 - protein, 873 aa, Homo sapiens
MASRRKSTTPCMVLASEQDPDLELISDLDEGPPVLTPVENTRAESISSDEEVHESVDSDNQQNKKVEGGYECKYCTFQTPDLNMFTFHVDSEHPNVVLNSSYVCVECNFLTKRYDALSEHNLKYHPGEENFKLTMVKRNNQTIFEQTINDLTFDGSFVKEENAEQAESTEVSSSGISISKTPIMKMMKNKVENKRIAVHHNSVEDVPEEKENEIKPDREEIVENPSSSASESNTSTSIVNRIHPSTASTVVTPAAVLPGLAQMITAVSAQQNSNLIPKVLIPVNSIPTYNAALDNNPLLLNTYNKFPYPTMSEITVLSAQAKYTEEQIKIWFSAQRLKHGVSWTPEEVEEARRKQFNGTVHTVPQTITVIPTHISTGSNGLPSILQTCQIVGQPGLVLTQVAGTNTLPVTAPIALTVAGVPSQNNIQKSQVPAAQPTAETKPATAAVPTSQSVKHETALVNPDSFGIRAKKTKEQLAELKVSYLKNQFPHDSEIIRLMKITGLTKGEIKKWFSDTRYNQRNSKSNQCLHLNNDSSTTIIIDSSDETTESPTVGTAQPKQSWNPFPDFTPQKFKEKTAEQLRVLQASFLNSSVLTDEELNRLRAQTKLTRREIDAWFTEKKKSKALKEEKMEIDESNAGSSKEEAGETSPADESGAPKSGSTGKICKKTPEQLHMLKSAFVRTQWPSPEEYDKLAKESGLARTDIVSWFGDTRYAWKNGNLKWYYYYQSANSSSMNGLSSLRKRGRGRPKGRGRGRPRGRPRGSKRINNWDRGPSLIKFKTGTAILKDYYLKRKFLNEQDLDELVNKSHMGYEQVREWFAERQRRSELGIELFEENEEEDEVIDDQEEDEEETDDSDTWEPPRHVKRKLSKSDD

SEQ ID NO: 6875 - protein, 3122 aa, Homo sapiens
MSTDGSAEPQSPPPVPPSIREDGRKANVSGMAGQSLTLECDANGFPVPEIVWLKDAQLIPKVGGHRLLDEGQSLHFPRIQEGDSGLYSCRAENQAGTAQRDFHLLVLTPPSVLGAGAAQEVLGLAGADVELQCWTSGVPTPQVEWTKDRQPVLPGGPHLQVQEDGQVLRITGSHVGDEGRYQCVAFSPAGQQARDFQLRVHAPPTIWGSNETGEVAVMEDHLVQLLCEARGVPTPNITWFKDGALLPTSTKVVYTRGGRQLQLGRAQSSDAGVYTCKASNAVGAAEKATRLDVYVPPTIEGAGGRPYVVKAVAGRPVALECVARGHPSPTLSWHHEGLPVAESNESRLETDGSVLRLESPGEASSGLYSCVASSPAGEAVLQYSVEVQVPPQLLVAEGLGQVTTIVGQPLELPCQASGSPVPTIQWLQNGRPAEELAGVQVASQGTTLHIDHVELDHSGLFACQATNEAGTAGAEVEVSVHEFPSVSIIGGENITAPFLQPVTLQCIGDGVPTPSLRWWKDGVALAAFGGNLQIEKVDLRDEGIYTCAATNLAGESKREVALKVLVPPNIEPGPVNKAVLENASVTLECLASGVPPPDVSWFKGHQPVSSWMGVTVSVDGRVLRIEQAQLSDAGSYRCVASNVAGSTELRYGLRVNVPPRITLPPSLPGPVLVNTPVRLTCNATGAPSPTLMWLKDGNPVSPAGTPGLQVFPGGRVLTLASARASDSGRYSCVAVSAVGEDRQDVVLQVHMPPSILGEELNVSVVANESVALECQSHAMPPPVLSWWKDGRPLEPRPGVHLSADKALLQVDRADVWDAGHYTCEALNQAGHSEKHYNLNVWGQPLPGEGAGLQHVSAVGRLLYLGQAQLAQEGTYTCECSNVVGNSSQDLQLEVHVPPQIAGPREPPTQVSVVQDGVATLECNATGKPPPTVTWERDGQPVGAELGLQLQNQGQSLHVERAQAAHTGRYSCVAENLAGRAERKFELSVLVPPELIGDLDPLTNITAALHSPLTLLCEAMGIPPPAIRWFRGEEPVSPGEDTYLLAGGWMLKMTQTQEQDSGLYSCLASNEAGEARRNFSVEVLVPPSIENEDLEEVIKVLDGQTAHLMCNVTGHPQPKLTWFKDGRPLARGDAHHISPDGVLLQVLQANLSSAGHYSCIAANAVGEKTKHFQLSVLLAPTILGGAEDSADEEVTVTVNNPISLICEALAFPSPNITWMKDGAPFEASRNIQLLPGTHGLQILNAQKEDAGQYTCVVTNELGEAVKNYHVEVLIPPSISKDDPLAEVGVKEVKTKVNSTLTLECESWAVPPPTIRWYKDGQPVTPSSRLQVLGEGRLLQIQPTQVSDSGRYLCVATNVAGEDDQDFNVLIQVPPMFQKVGDFSAAFEILSREEEARGGVTEYREIVENNPAYLYCDTNAIPPPDLTWYREDQPLSAGDEVSVLQGGRVLQIPLVRAENAGRYSCKASNEVGEDWLHYELLVLKELVEEVTVNASSTVSLQCPALGNPVPTISWLQNGLPFSPSPRLQVLEDGQVLQVSTAEVADAASYMCVAENQAGSAEKLFTLRVQGLDLEQVTAILNSSVSLPCDVHAHPNPEVTWYKDSQALSLGEEVFLLPGTHTLQLGRARLSDSGMYTCEALNAAGRDQKLVQLSVLVPPAFRQAPRGPQDAVLVRVGDKAVLSCETDALPEPTVTWYKDGQPLVLAQRTQALRGGQRLEIQEAQVSDKGLYSCKVSNVAGEAVRTFTLTVQVPPTFENPKTETVSQVAGSPLVLTCDVSGVPAPTVTWLKDRMPVESSAVHGVVSRGGRLQLSRLQPAQAGTYTCVAENTQAEARKDFVVAVLVAPRIRSSGVAREHHVLEGQEVRLDCEADGQPPPDVAWLKDGSPLGQDMGPHLRFYLDGGSLVLKGLRASDAGAYTCVAHNPAGEDARLHTVNVLEDNSASPGYSGDSGVPPTIKQGADGSGTLVSRPGELVTMVCPVRGSPPIHVSWLKDGLPLPLSQRTLLHGSGHTLRISKVQLADAGIFTCVAASPAGVADRNFTLQVQVPPVLEPVEFQNDVVVVRGSLVELPCEARGVPLPLVSWMKDGEPLLSQSLEQGPSLQLEAVGAGDSGTYSCVAVSEAGEARRHFQLTVMEPPHIEDSGQPTELSLTPGAPMELLCDAQGTPQPNITWHKDGQALTRLENNSRATRVLRVENVQVRDAGLYTCLAESPAGAIEKSFRVRVQAPPNIVGPRGPRFVVGLAPGQLVLECSVEAEPAPKITWHRDGIVLQEDAHTQFPERGRFLQLQALSTADSGDYSCTARNAAGSTSVAFRVEIHTVPTIRSGPPAVNVSVNQTALLPCQADGVPAPLVSWRKDRVPLDPRSPRFEILPEGSLRIQPVLAQDAGHYLCLASNSAGSDRQGRDLRVLEPPAIAPSPSNLTLTAHTPALLPCEASGSPKPLVVWWKDGQKLDFRLQQGAYRLLPSNALLLTAPGPQDSAQFECVVSNEVGEAHRLYQVTVHALPPGPVAVSALCPPAGPQALSWVLVPPTIADDQTDFTVTMMAPVVLTCHSTGIPAPTVSWSKAGAQLGARGSGYRVSPSGALEIGQALPIHAGRYTCSARNSAGVAHKHVFLTVQASPVVKPLPSVVRAVAEEEVLLPCEASGIPRPTITWQKEGLNVATGVSTQVLPGGQLRIAHASPEDAGNYLCIAKNSAGSAMGKTRLVVQVPPVIENGLPDLSTTEGSHAFLPCKARGSPEPNITWDKDGQPVSGAEGKFTIQPSGELLVKNLEGQDAGTYTCTAENAVGRARRRVHLTILVLPVFTTLPGDRSLRLGDRLWLRCAARGSPTPRIGWTVNDRPVTEGVSEQDGGSTLQRAAVSREDSGTYVCWAENRVGRTQAVSFVHVKEAPVLQGEAFSYLVEPVGGSIQLDCVVRGDPVPDIHWIKDGLPLRGSHLRHQLQNGSLTIRRTEARRGLAPWRDDAGRYQCLAENEMGVAKKVVILVLQSAPVFQVEPQDMTVRSGDDVALRCQATGEPTPTIEWLQAGQPLRASRRLRTLPDGSLWLENVETGDAGTYDCVAHNLLGSATARAFLVVRGMGHPCLDLRGQRQDLLPMGIVWCLWETCPLPCQLPTSSLCFITSPE

SEQ ID NO: 6876 - protein, 1188 aa, Homo sapiens
MEPNSLQWVGSPCGLHGPYIFYKAFQFHLEGKPRILSLGDFFFVRCTPKDPICIAELQLLWEERTSRQLLSSSKLYFLPEDTPQGRNSDHGEDEVIAVSEKVIVKLEDLVKWVHSDFSKWRCGFHAGPVKTEALGRNGQKEALLKYRQSTLNSGLNFKDVLKEKADLGEDEEETNVIVLSYPQYCRYRSMLKRIQDKPSSILTDQFALALGGIAVVSRNPQILYCRDTFDHPTLIENESICDEFAPNLKGRPRKKKPCPQRRDSFSGVKDSNNNSDGKAVAKVKCEARSALTKPKNNHNCKKVSNEEKPKVAIGEECRADEQAFLVALYKYMKERKTPIERIPYLGFKQINLWTMFQAAQKLGGYETITARRQWKHIYDELGGNPGSTSAATCTRRHYERLILPYERFIKGEEDKPLPPIKPRKQENSSQENENKTKVSGTKRIKHEIPKSKKEKENAPKPQDAAEVSSEQEKEQETLISQKSIPEPLPAADMKKKIEGYQEFSAKPLASRVDPEKDNETDQGSNSEKVAEEAGEKGPTPPLPSAPLAPEKDSALVPGASKQPLTSPSALVDSKQESKLCCFTESPESEPQEASFPSFPTTQPPLANQNETEDDKLPAMADYIANCTVKVDQLGSDDIHNALKQTPKVLVVQSFDMFKDKDLTGPMNENHGLNYTPLLYSRGNPGIMSPLAKKKLLSQVSGASLSSSYPYGSPPPLISKKKLIARDDLCSSLSQTHHGQSTDHMAVSRPSVIQHVQSFRSKPSEERKTINDIFKHEKLSRSDPHRCSFSKHHLNPLADSYVLKQEIQEGKDKLLEKRALPHSHMPSFLADFYSSPHLHSLYRHTEHHLHNEQTSKYPSRDMYRESENSSFPSHRHQEKLHVNYLTSLHLQDKKSAAAEAPTDDQPTDLSLPKNPHKPTGKVLGLAHSTTGPQESKGISQFQVLGSQSRDCHPKACRVSPMTMSGPKKYPESLSRSGKPHHVRLENFRKMEGMVHPILHRKMSPQNIGAARPIKRSLEDLDLVIAGKKARAVSPLDPSKEVSGKEKASEQESEGSKAAHGGHSGGGSEGHKLPLSSPIFPGLYSGSLCNSGLNSRLPAGYSHSLQYLKNQTVLSPLMQPLAFHSLVMQRGIFTSPTNSQQLYRHLAAATPVGSSYGDLLHNSIYPLAAINPQAAFPSSQLSSVHPSTKL

SEQ ID NO: 6877 - protein, 246 aa, Homo sapiens
KVSNEEKPKVAIGEECRADEQAFLVALYKYMKERKTPIERIPYLGFKQINLWTMFQAAQKLGGYETITARRQWKHIYDELGGNPGSTSAATCTRRHYERLILPYERFIKGEEDKPLPPIKPRKQENSSQENENKTKVSGTKRIKHEIPKSKKEKENAPKPQDAAEVSSEQEKEQETLISQKSIPEPLPAADMKKKIEGYQEFSAKPLASRVDPEKDNETDQGSNSEKVAEEAGEKGPTPPLPSAPL

SEQ ID NO: 6878 - protein, 217 aa, Homo sapiens
MSQFPVVSIVSTVSATVITGALLILLPDDSNSDWRFVERLLDATIAVSPVLSAMVNSVVFFEITRDGKPLGRISIKLFADKIPKTAENFRALSTGEKGFRYKGSCFHRIIPGFMCQGGDFTRPNGTGDKSIYGEKFDDENLIRKHTGSGILSMANAGPNTNGSQFFICAAKTEWLDGKHVAFGKVKERVNIVEATEHFGYRNSKTSKKITIADCGQF

SEQ ID NO: 6879 - protein, 183 aa, Homo sapiens
MHVYFNNFVLSFSDATVAGSPVLSAMVKPIVFFDIAVDAKPSGRISIKLFADKIPKTAEKFHALSTGEKGFCYKGSCFHRIIPRFMCRGGDFTHHNGTGGKFHDENLIRKHTGSGILSMANAGPNTNGSQFFICTAKTECLDGKHVAFGKVKEHMNIVEAMEHFGYRNGKTSKKITIADCGQF

SEQ ID NO: 6880 - protein, 164 aa, Homo sapiens
MVNSVVFFDITVDGKPLGRISIKLFADKILKTAENFRALSTGEKGFRYKGSCFHRIIPGFMCQGGDFTRHNGTGDKSIYGEKFDDENLIRKHTGSGILSMANAGPNTNGSQFFICAAKTEWLDGKHVAFGKVKERVNIVEAMEHFGYRNSKTSKKITIADCGQF

SEQ ID NO: 6881 - protein, 1858 aa, Homo sapiens
MADERKDEAKAPHWTSAPLTEASAHSHPPEIKDQGGAGEGLVRSANGFPYREDEEGAFGEHGSQGTYSNTKENGINGELTSADRETAEEVSARIVQVVTAEAVAVLKGEQEKEAQHKDQTAALPLAAEETANLPPSPPPSPASEQTVTVEEDLLTASKMEFHDQQELTPSTAEPSDQKEKESEKQSKPGEDLKHAALVSQPETTKTYPDKKDMQGTEEEKAPLALFGHTLVASLEDMKQKTEPSLVVPGIDLPKEPPTPKEQKDWFIEMPTEAKKDEWGLVAPISPGPLTPMREKDVFDDIPKWEGKQFDSPMPSPFQGGSFTLPLDVMKNEIVTETSPFAPAFLQPDDKKSLQQTSGPATAKDSFKIEEPHEAKPDKMAEAPPSEAMTLPKDAHIPVVEEHVMGKVLEEEKEAINQETVQQRDTFTPSGQEPILTEKETELKLEEKTTISDKEAVPKESKPPKPADEEIGIIQTSTEHTFSEQKDQEPTTDMLKQDSFPVSLEQAVTDSAMTSKTLEKAMTEPSALIEKSSIQELFEMRVDDKDKIEGVGAATSAELDMPFYEDKSGMSKYFETSALKEEATKSIEPGSDYYELSDTRESVHESIDTMSPMHKNGDKEFQTGKESQPSPPAQEAGYSTLAQSYPSDLPEEPSSPQERMFTIDPKVYGEKRDLHSKNKDDLTLSRSLGLGGRSAIEQRSMSINLPMSCLDSIALGFNFGRGHDLSPLASDILTNTSGSMDEGDDYLPATTPALEKAPCFPVESKEEEQIEKVKATGEESTQAEISCESPFLAKDFYKNGTVMAPDLPEMLDLAGTRSRLASVSADAEVARRKSVPSETVVEDSRTGLPPVTDENHVIVKTDSQLEDLGYCVFNKYTVPLPSPVQDSENLSGESGTFYEGTDDKVRRDLATDLSLIEVKLAAAGRVKDEFSVDKEASAHISGDKSGLSKEFDQEKKANDRLDTVLEKSEEHADSKEHAKKTEEAGDEIETFGLGVTYEQALAKDLSIPTDASSEKAEKGLSSVPEIAEVEPSKKVEQGLDFAVQGQLDVKISDFGQMASGLNIDDRRATELKLEATQDMTPSSKAPQEADAFMGVESGHMKEGTKVSETEVKQKVAKPDLVHQEAVDKEESYESSGEHESLTMESLKADEGKKETSPESSLIQDEIAVKLSVEIPCPPAVSEADLATDERADVQMEFIQGPKEESKETPDISITPSDVAEPLHETIVSEPAEIQSEEEEIEAQGEYDKLLFRSDTLQITDLGVSGAREEFVETCPSEHKGVIESVVTIEDDFITVVQTTTDEGESGSHSVRFAALEQPEVERRPSPHDEEEFEVEEAAEAQAEPKDGSPEAPASPEREEVALSEYKTETYDDYKDETTIDDSIMDADSLWVDTQDDDRSIMTEQLETIPKEEKAEKEARRSSLEKHRKEKPFKTGRGRISTPERKVAKKEPSTVSRDEVRRKKAVYKKAELAKKTEVQAHSPSRKFILKPAIKYTRPTHLSCVKRKTTAAGGESALAPSVFKQAKDKVSDGVTKSPEKRSSLPRPSSILPPRRGVSGDRDENSFSLNSSISSSARRTTRSEPIRRAGKSGTSTPTTPGSTAITPGTPPSYSSRTPGTPGTPSYPRTPHTPGTPKSAILVPSEKKVAIIRTPPKSPATPKQLRLINQPLPDLKNVKSKIGSTDNIKYQPKGGQVRILNKKIDFSKVHSRSGSKDNIKHSAGGGNVQIVTKKIDLSHVTSKCGSLKNIGHRPGGGRVKIESVKLDFKEKAQAKVGSLDNAHHVPGGGNVKIDSQKLNFREHAKARVDHGAEIITQSPGRSSVASPRRLSNVSSSGSINLLESPQLATLAEDVTAALAKQGL

SEQ ID NO: 6882 - protein, 471 aa, Homo sapiens
MADERKDEAKAPHWTSAPLTEASAHSHPPEIKDQGGRGEGLVRSANGFPYREDEEGAFGEHGSQGTYSNTKENGINGELTSADRETAEEVSARIVQVVTAEAVAVLKAEQEKEAQHKDQTAALPLAAEETANLPPSPPPSPASEQTVTVEEAAGGESALAPSVFKQAKDKVSDGVTKSPEKRSSLPRPSSILPPRRGVSGDRDENSFSLNSSISSSARRTTRSEPIRRAGKSGTSTPTTPGSTAITPGTPPSYSSRTPGTPGTPSYPRTPHTPGTPKSAILVPSEKKVAIIRTPPKSPATPKQLRLINQPLPDLKNVKSKIGSTDNIKYQPKGGQVQIVTKKIDLSHVTSKCGSLKNIRHRPGGGRVKIESVKLDFKEKVQAKVGSLDNAHHVPGGGNVKIDSQKLNFREHAKARVDHGAEIITQSPGRSSVASPRRLSNVSSSGSINLLESPQLATLAEDVTAALAKQGL

SEQ ID NO: 6883 - protein, 1827 aa, Homo sapiens
MADERKDEAKAPHWTSAPLTEASAHSHPPEIKDQGGRGEGLVRSANGFPYREDEEGAFGEHGSQGTYSNTKENGINGELTSADRETAEEVSARIVQVVTAEAVAVLKAEQEKEAQHKDQTAALPLAAEETANLPPSPPPSPASEQTVTVEEDLLTASKMEFHDQQELTPSTAEPSDQKEKESEKQSSPGEDLKHAALVSQPETTKTYPDKKDMQGTEEEKAPLALFGHTLVASLEDMKQKTEPSLVVPGIDLPKEPPTPKEQKDWFIEMPTEAKKDEWGLVAPISPGPLTPMREKDVFDDIPKWEGKQFDSPMPSPFQGGSFTLPLDVMKNEIVTETSPFAPAFLQPDDKKSLQQTSGPATAKDSFKIEEPHEAKPDKMAEAPPSEAMTLPKDAHIPVVEEHVMGKVLEEEKEAINQETVQQRDTFTPSGQEPILTEKETELKLEEKTTISDKEAVPKESKPPKPADEEIGIIQTSTEHTFSEQKDQEPTTDMLKQDSFPVSLEQAVTDSAMTSKTLEKAMTEPSALIEKSSIQELFEMRVDDKDKIEGVGAATSAELDMPFYEDKSGMSKYFETSALKEEATKSIEPGSDYYELSDTRESVHESIDTMSPMHKNGDKEFQTGKESQPSPPAQEAGYSTLAQSYPSDLPEEPSSPQERMFTIDPKVYGEKRDLHSKNKDDLTLSRSLGLGGRSAIEQRSMSINLPMSCLDSIALGFNFGRGHDLSPLASDILTNTSGSMDEGDDYLPATTPALEKAPCFPVESKEEEQIEKVKATGEESTQAEISCESPFLAKDFYKNGTVMAPDLPEMLDLAGTRSRLASVSADAEVARRKSVPSETVVEDSRTGLPPVTDENHVIVKTDSQLEDLGYCVFNKYTVPLPSPVQDSENLSGESGTFYEGTDDKVRRDLATDLSLIEVKLAAAGRVKDEFSVDKEASAHISGDKSGLSKEFDQEKKANDRLDTVLEKSEEHADSKEHAKKTEEAGDEIETFGLGVTYEQALAKDLSIPTDASSEKAEKGLSSVPEIAEVEPSKKVEQGLDFAVQGQLDVKISDFGQMASGLNIDDRRATELKLEATQDMTPSSKAPQEADAFMGVESGHMKEGTKVSETEVKQKVAKPDLVHQEAVDKEESYESSGEHESLTMESLKADEGKKETSPESSLIQDEIAVKLSVEIPCPPAVSEADLATDERADVQMEFIQGPKEESKETPDISITPSDVAEPLHETIVSEPAEIQSEEEEIEAQGEYDKLLFRSDTLQITDLGVSGAREEFVETCPSEHKGVIESVVTIEDDFITVVQTTTDEGESGSHSVRFAALEQPEVERRPSPHDEEEFEVEEAAEAQAEPKDGSPEAPASPEREEVALSEYKTETYDDYKDETTIDDSIMDADSLWVDTQDDDRSIMTEQLETIPKEEKAEKEARRSSLEKHRKEKPFKTGRGRISTPERKVAKKEPSTVSRDEVRRKKAVYKKAELAKKTEVQAHSPSRKFILKPAIKYTRPTHLSCVKRKTTAAGGESALAPSVFKQAKDKVSDGVTKSPEKRSSLPRPSSILPPRRGVSGDRDENSFSLNSSISSSARRTTRSEPIRRAGKSGTSTPTTPGSTAITPGTPPSYSSRTPGTPGTPSYPRTPHTPGTPKSAILVPSEKKVAIIRTPPKSPATPKQLRLINQPLPDLKNVKSKIGSTDNIKYQPKGGQVQIVTKKIDLSHVTSKCGSLKNIRHRPGGGRVKIESVKLDFKEKVQAKVGSLDNAHHVPGGGNVKIDSQKLNFREHAKARVDHGAEIITQSPGRSSVASPRRLSNVSSSGSINLLESPQLATLAEDVTAALAKQGL

SEQ ID NO: 6884 - protein, 502 aa, Homo sapiens
MADERKDEAKAPHWTSAPLTEASAHSHPPEIKDQGGAGEGLVRSANGFPYREDEEGAFGEHGSQGTYSNTKENGINGELTSADRETAEEVSARIVQVVTAEAVAVLKGEQEKEAQHKDQTAALPLAAEETANLPPSPPPSPASEQTVTVEEAAGGESALAPSVFKQAKDKVSDGVTKSPEKRSSLPRPSSILPPRRGVSGDRDENSFSLNSSISSSARRTTRSEPIRRAGKSGTSTPTTPGSTAITPGTPPSYSSRTPGTPGTPSYPRTPHTPGTPKSAILVPSEKKVAIIRTPPKSPATPKQLRLINQPLPDLKNVKSKIGSTDNIKYQPKGGQVRILNKKIDFSKVHSRSGSKDNIKHSAGGGNVQIVTKKIDLSHVTSKCGSLKNIGHRPGGGRVKIESVKLDFKEKAQAKVGSLDNAHHVPGGGNVKIDSQKLNFREHAKARVDHGAEIITQSPGRSSVASPRRLSNVSSSGSINLLESPQLATLAEDVTAALAKQGL

SEQ ID NO: 6885 - protein, 559 aa, Homo sapiens
MADERKDEAKAPHWTSAPLTEASAHSHPPEIKDQGGAGEGLVRSANGFPYREDEEGAFGEHGSQGTYSNTKENGINGELTSADRETAEEVSARIVQVVTAEAVAVLKGEQEKEAQHKDQTAALPLAAEETANLPPSPPPSPASEQTVTVEEAAGGESALAPSVFKQAKDKVSNSTLSKIPALQGSTKSPRYSSACPSTTKRATFSDSLLIQPTSAGSTDRLPYSKSGNKDGVTKSPEKRSSLPRPSSILPPRRGVSGDRDENSFSLNSSISSSARRTTRSEPIRRAGKSGTSTPTTPGSTAITPGTPPSYSSRTPGTPGTPSYPRTPHTPGTPKSAILVPSEKKVAIIRTPPKSPATPKQLRLINQPLPDLKNVKSKIGSTDNIKYQPKGGQVRILNKKIDFSKVQSRCGSKDNIKHSAGGGNVQIVTKKIDLSHVTSKCGSLKNIRHRPGGGRVKIESVKLDFKEKAQAKVGSLDNAHHVPGGGNVKIDSQKLNFREHAKARVDHGAEIITQSPGRSSVASPRRLSNVSSSGSINLLESPQLATLAEDVTAALAKQGL

SEQ ID NO: 6886 - protein, 644 aa, Homo sapiens
MEAERGPERRPAERSSPGQTPEEGAQALAEFAALHGPALRASGVPERYWGRLLHKLEHEVFDAGEVFGIMQVEEVEEEEDEAAREVRKQQPNPGNELCYKVIVTRESGLQAAHPNSIFLIDHAWTCRVEHARQQLQQVPGLLHRMANLMGIEFHGELPSTEAVALVLEEMWKFNQTYQLAHGTAEEKMPVWYIMDEFGSRIQHADVPSFATAPFFYMPQQVAYTLLWPLRDLDTGEEVTRDFAYGETDPLIRKCMLLPWAPTDMLDLSSCTPEPPAEHYQAILEENKEKLPLDINPVVHPHGHIFKVYTDVQQVASSLTHPRFTLTQSEADADILFNFSHFKDYRKLSQERPGVLLNQFPCENLLTVKDCLASIARRAGGPEGPPWLPRTFNLRTELPQFVSYFQQRERWGEDNHWICKPWNLARSLDTHVTKSLHSIIRHRESTPKVVSKYIESPVLFLREDVGKVKFDIRYIVLLRSVRPLRLFVYDVFWLRFSNRAFALNDLDDYEKHFTVMNYDPDVVLKQVHCEEFIPEFEKQYPEFPWTDVQAEIFRAFTELFQVACAKPPPLGLCDYPSSRAMYAVDLMLKWDNGPDGRRVMQPQILEVNFNPDCERACRYHPTFFNDVFSTLFLDQPGGCHVTCLV

SEQ ID NO: 6887 - protein, 896 aa, Homo sapiens
MAARAVLDEFTAPAEKAELLEQSRGRIEGLFGVSLAVLGALGAEEPLPARIWLQLCGAQEAEHSAKEYIKGICEPELEERECYPKDMHCIFVGAESLFLKSLIQDTCADLCILDIGLLGIRGSAEAVVMARSHIQQFVKLFENKENLPSSQKESEVKREFKQFVEAHADNYTMDLLILPTSLKKELLTLTQGEENLFETGDDEVIEMRDSQQTEFTQNAATGLNISRDETVLQEEARNKAGTPVSELTKQMDTVLSSSPDVLFDPINGLTPDEEALSNERICQKRRFSDSEERHTKKQFSLENVQEGEILHDAKTLAGNVIADLSDSSADSENLSPDIKETTEEMEYNILVNFFKTMGYSQEIVEKVIKVYGPSTEPLLLLEEIEKENKRFQEDREFSAGTVYPETNKTKNKGVYSSTNELTTDSTPKKTQAHTQQNMVEKFSQLPFKVEAKPCTSNCRINTFRTVPIEQKHEVWGSNQNYICNTDPETDGLSPSVASPSPKEVNFVSRGASSHQPRVPLFPENGLHQQPEPLLPNNMKSACEKRLGCCSSPHSKPNCSTLSPPMPLPQLLPSVTDARSAGPSDHIDSSVTGVQRFRDTLKIPYKLELKNEPGRTDLKHIVIDGSNVAITHGLKKFFSCRGIAIAVEYFWKLGNRNITVFVPQWRTRRDPNVTEQHFLTQLQELGILSLTPARMVFGERIASHDDRFLLHLADKTGGIIVTNDNFREFVNESVSWREIITKRLLQYTFVGDIFMVPDDPLGRSGPRLEEFLQKEVCLRDMQPLLSALPNVGMFDPSFRVPGTQAASTSHQPPTRIQGAPSSHWLPQQPHFPLLPALPSLQQNLPMPAQRSSAETNELREALLKIFPDSEQRLKIDQILVAHPYMKDLNALSAMVLD

SEQ ID NO: 6888 - protein, 907 aa, Homo sapiens
MESAIAEGGASRFSASSGGGGSRGAPQHYPKTAGNSEFLGKTPGQNAQKWIPARSTRRDDNSAANNSANEKERHDAIFRKVRGILNKLTPEKFDKLCLELLNVGVESKLILKGVILLIVDKALEEPKYSSLYAQLCLRLAEDAPNFDGPAAEGQPGQKQSTTFRRLLISKLQDEFENRTRNVDVYDKRENPLLPEEEEQRAIAKIKMLGNIKFIGELGKLDLIHESILHKCIKTLLEKKKRVQLKDMGEDLECLCQIMRTVGPRLDHERAKSLMDQYFARMCSLMLSKELPARIRFLLQDTVELREHHWVPRKAFLDNGPKTINQIRQDAVKDLGVFIPAPMAQGMRSDFFLEGPFMPPRMKMDRDPLGGLADMFGQMPGSGIGTGPGVIQDRFSPTMGRHRSNQLFNGHGGHIMPPTQSQFGEMGGKFMKSQGLSQLYHNQSQGLLSQLQGQSKDMPPRFSKKGQLNADEISLRPAQSFLMNKNQVPKLQPQITMIPPSAQPPRTQTPPLGQTPQLGLKTNPPLIQEKPAKTSKKPPPSKEELLKLTETVVTEYLNSGNANEAVNGVREMRAPKHFLPEMLSKVIILSLDRSDEDKEKASSLISLLKQEGIATSDNFMQAFLNVLDQCPKLEVDIPLVKSYLAQFAARAIISELVSISELAQPLESGTHFPLFLLCLQQLAKLQDREWLTELFQQSKVNMQKMLPEIDQNKDRMLEILEGKGLSFLFPLLKLEKELLKQIKLDPSPQTIYKWIKDNISPKLHVDKGFVNILMTSFLQYISSEVNPPSDETDSSSAPSKEQLEQEKQLLLSFKPVMQKFLHDHVDLQVSALYALQVHCYNSNFPKGMLLRFFVHFYDMEIIEEEAFLAWKEDITQEFPGKGKALFQVNQWLTWLETAEEEESEEEAD

SEQ ID NO: 6889 - protein, 518 aa, Homo sapiens
MTSSKIEMPGEVKADPAALMASLHLLPSPTPNLEIKYTKIFINNEWQNSESGRVFPVYNPATGEQVCEVQEADKADIDKAVQAARLAFSLGSVWRRMDASERGRLLDKLADLVERDRAVLATMESLNGGKPFLQAFYVDLQGVIKTFRYYAGWADKIHGMTIPVDGDYFTFTRHEPIGVCGQIIPWNFPLLMFAWKIAPALCCGNTVVIKPAEQTPLSALYMGALIKEAGFPPGVINILPGYGPTAGAAIASHIGIDKIAFTGSTEVGKLIQEAAGRSNLKRVTLELGGKSPNIIFADADLDYAVEQAHQGVFFNQGQCCTAGSRIFVEESIYEEFVRRSVERAKRRVVGSPFDPTTEQGPQIDKKQYNKILELIQSGVAEGAKLECGGKGLGRKGFFIEPTVFSNVTDDMRIAKEEIFGPVQEILRFKTMDEVIERANNSDFGLVAAVFTNDINKALTVSSAMQAGTVWINCYNALNAQSPFGGFKMSGNGREMGEFGLREYSEVKTVTVKIPQKNS

SEQ ID NO: 6890 - protein, 422 aa, Homo sapiens [sequence omitted]

SEQ ID NO: 6891 - protein, 480 aa, Homo sapiens
MTSSKIEMPGEVKADPAALMASLHLLPSPTPNLEIKYTKIFINNEWQNSESGRVFPVYNPATGEQVCEVQEADKADIDKAVQAARLAFSLGSVWRRMDASERGRLLDKLADLVERDRAVLATMESLNGGKPFLQAFYVDLQGVIKTFRYYAGWADKIHGMTIPVDGDYFTFTRHEPIGVCGQIIPWNFPLLMFAWKIAPALCCGNTVVIKPAEQTPLSALYMGALIKEVGKLIQEAAGRSNLKRVTLELGGKSPNIIFADADLDYAVEQAHQGVFFNQGQCCTAGSRIFVEESIYEEFVRRSVERAKRRVVGSPFDPTTEQGPQIDKKQYNKILELIQSGVAEGAKLECGGKGLGRKGFFIEPTVFSNVTDDMRIAKEEIFGPVQEILRFKTMDEVIERANNSDFGLVAAVFTNDINKALTVSSAMQAGTVWINCYNALNAQSPFGGFKMSGNGREMGEFGLREYSEVKTVTVKIPQKNS

SEQ ID NO: 6892 - protein, 1833 aa, Homo sapiens
MITMTLQSVPDVPVKEDTNSVVEKAMDEIKSQELNLEGQRKISPGSIKDSKTEASGNIAIRKSAKVIFALDETELKSKPEHTWKKNLFERMEARAQAMQQKIIDKENLKKELEKKAEKKLPRDNLAKEWFNTDSMTLNNTAYLLDKLLPTLVPGVENMLTQVEKKKVLTEADTPSKFDPINYLGEYLIRNNPNYIKDPGMSGYQRLMKEVTEDLKIYVPDTICNSYVSSRPVDGHGLGRVQCDPCLEGHDRYPDRVEADSVTIWGDFSDVHISRNIIHTSYSGNPSPHSYKSLPNHFPVYILPYPTLEDFEPQTLCAFLYLSQHKIGPNPFCTKLPDNLWGVFKSGVSKMKENVKQNRKQRESIDKIIVKVANTRKQALQEQFDEWILDPKGMIPKSVYISSHIKDLKSEMFEELLKHLCHSADEFREVIKADMRRQMFAELFLHCDHGKVGFLDRQRTLALLELFYDHSSQMLRSLLRNPRQWPFIEFEEINLTELWGDMDNQKHIYEGFDKVLLEMNTLLSANHASKTQSKLLESPDQPKLNEQRTSTPSPNPPEQQRGVTAEQGPQRISIEEQQQGKKPTAEQELYIESVIEPGTHTESTLEQGSSRRLLTEQETHRESTTEQGQHKGSIEGQGPRRVSVSEQGSSRESVAEQGSRRESIAEQDRHKGSVAEQGSRRMSAAEQGSLRESVIEEPYQKSEQGPYGEIISEEQEDIGSTSQSRKDSILKSTKYGEPITSEYIEVPLQEKRSWEQTYEEEIFLSSELQEEVPTLSRKDHFPETTKKEVQKDKPCEPKSQKIEGKSWSGEFFTCNWKMKYVTFEDEEQANLIYGNSRFTDLHSIIRNIQSCKEVKGRTAFNGVSFNLLQFVQLLETFVGEDAPLSVSETLTSFFKEGYVETEQEKMNALEQFSQNAFQVRQRLLLEAIFQKWDSDGSGFLDLKEVDELLYTYKEGMEKESMKKAADMGRSLVGLPVRVARAVDITLLFRASVKTVKTQNKALGVAVGGRVDGSRDELFRRSPWPKGNFSSRAREMISHSGKLRDFLLEHRKDYINAYSHTMSEYGRMTDTERDQIDQDVQIFMRTCSEAIQQLRTEAHKEIHSQQVKEHRTAVLDFIEDYLKKVCKLYSEQRAIRVKRVTEENPATEEHPEKILTERQPELGTWGDGKGEDELSPEEIQMFEQENQRLIGEMNSLFDEVRQIKGRVVEISRLQEIFTEKVLQQEAEIDGVHQLVVGATENIKEGNEDIREAIKNNAGFRVWILFFLVMCSFSLLFLDWGNEDQVLESVVEFLMNALERSHIESLRNSARRKWLHQIQCAAETSGVSLEPVYSETFKALMQDAEAHGNKKISAHISLLEENLLLPEKGNVLLRNVACTLDDAQFVLNRVLYRDMKGISFTVVDEGKPIHVPQVQYHGNIFFWNQSRNKHDYNGSFLALPLQDAYMRIFGVLAVDTLRDPHEINIFLPHEIRFYQGVANVFSTAYHYVHSREHILHIVITGIGWLYDVTSSITSITTYFVEPSPAQDSDYVLRNMMVTGQLGLTEIHKNPPTIHRKSCIFRDFLFKCTDSSEVVLASACGETHIVVPLRERTGEALGVLDFNIGQNRMLLCQEYKDLQKMMKVVQVACYEILGEFSGEIKKKYILEIENVREVQRAGILFFRIMLLELQESIQLLNSMEFVSLLLYDHTLVTEPNSPQDSKSMELEANVKLVRDILKAVILFFHPELEFSSDFGSWDKCKFYVNKYLVNNICAFDPTAKHVEVNVQLIDEYIRDHSRTEVWKFGNVVIEHLYHWIHICSALMKITKQLNSGITPPLPSKTDNYMYAKMPGEGLQEK

SEQ ID NO: 6893 - protein, 346 aa, Homo sapiens [sequence omitted]

SEQ ID NO: 6894 - protein, 359 aa, Homo sapiens
METQLSNGPTCNNTANGPTTINNNCSSPVDSGNTEDSKTNLIVNYLPQNMTQEELKSLFGSIGEIESCKLVRDKITGQSLGYGFVNYIDPKDAEKAINTLNGLRLQTKTIKVSYARPSSASIRDANLYVSGLPKTMTQKELEQLFSQYGRIITSRILVDQVTGISRGVGFIRFDKRIEAEEAIKGLNGQKPPGATEPITVKFANNPSQKTNQAILSQLYQSPNRRYPGPLAQQAQRFRLDNLLNMAYGVKRFSPMTIDGMTSLAGINIPGHPGTGWCIFVYNLAPDADESILWQMFGPFGAVTNVKVIRDFNTNKCKGFGFVTMTNYDEAAMAIRSLNGYRLGDRVLQVSFKTNKTHKA

SEQ ID NO: 6895 - protein, 346 aa, Homo sapiens
METQLSNGPTCNNTANGPTTINNNCSSPVDSGNTEDSKTNLIVNYLPQNMTQEELKSLFGSIGEIESCKLVRDKITGQSLGYGFVNYIDPKDAEKAINTLNGLRLQTKTIKVSYARPSSASIRDANLYVSGLPKTMTQKELEQLFSQYGRIITSRILVDQVTGISRGVGFIRFDKRIEAEEAIKGLNGQKPPGATEPITVKFANNPSQKTNQAILSQLYQSPNRRYPGPLAQQAQRFRFSPMTIDGMTSLAGINIPGHPGTGWCIFVYNLAPDADESILWQMFGPFGAVTNVKVIRDFNTNKCKGFGFVTMTNYDEAAMAIASLNGYRLGDRVLQVSFKTNKTHKA

SEQ ID NO: 6896 - protein, 339 aa, Homo sapiens
MAAEDELQLPRLPELFETGRQLLDEVEVATEPAGSRIVQEKVFKGLDLLEKAAEMLSQLDLFSRNEDLEEIASTDLKYLLVPAFQGALTMKQVNPSKRLDHLQRAREHFINYLTQCHCYHVAEFELPKTMNNSAENHTANSSMAYPSLVAMASQRQAKIQRYKQKKELEHRLSAMKSAVESGQADDERVREYYLLHLQRWIDISLEEIESIDQEIKILRERDSSREASTSNSSRQERPPVKPFILTRNMAQAKVFGAGYPSLPTMTVSDWYEQHRKYGALPDQGIAKAAPEEFRKAAQQQEEQEEKEEEDDEQTLHRAREWDDWKDTHPRGYGNRQNMG

SEQ ID NO: 6897 - protein, 714 aa, Homo sapiens
MSEEIITPVYCTGVSAQVQKQRARELGLGRHENAIKYLGQDYEQLRVRCLQSGTLFRDEAFPPVPQSLGYKDLGPNSSKTYGIKWKRPTELLSNPQFIVDGATRTDICQGALGDCWLLAAIASLTLNDTLLHRVVPHGQSFQNGYAGIFHFQLWQFGEWVDVVVDDLLPIKDGKLVFVHSAEGNEFWSALLEKAYAKVNGSYEALSGGSTSEGFEDFTGGVTEWYELRKAPSDLYQIILKALERGSLLGCSIDISSVLDMEAITFKKLVKGHAYSVTGAKQVNYRGQVVSLIRMRNPWGEVEWTGAWSDSSSEWNNVDPYERDQLRVKMEDGEFWMSFRDFMREFTRLEICNLTPDALKSRTIRKWNTTLYEGTWRRGSTAGGCRNYPATFWVNPQFKIRLDETDDPDDYGDRESGCSFVLALMQKHRRRERRFGRDMETIGFAVYEVPPELVGQPAVHLKRDFFLANASRARSEQFINLREVSTRFRLPPGEYVVVPSTFEPNKEGDFVLRFFSEKSAGTVELDDQIQANLPDEQVLSEEEIDENFKALFRQLAGEDMEISVKELRTILNRIISKHKDLRTKGFSLESCRSMVNLMDRDGNGKLGLVEFNILWNRIRNYLSIFRKFDLDKSGSMSAYEMRMAIESAGFKLNKKLYELIITRYSEPDLAVDFDNFVCCLVRLETMFRFFKTLDTDLDGVVTFDLFKWLQLTMFA

SEQ ID NO: 6898 - protein, 963 aa, Homo sapiens
MAVAPRLFGGLCFRFRDQNPEVAVEGRLPISHSCVGCRRERTAMATVAANPAAAAAAVAAAAAVTEDREPQHEELPGLDSQWRQIENGESGRERPLRAGESWFLVEKHWYKQWEAYVQGGDQDSSTFPGCINNATLFQDEINWRLKEGLVEGEDYVLLPAAAWHYLVSWYGLEHGQPPIERKVIELPNIQKVEVYPVELLLVRHNDLGKSHTVQFSHTDSIGLVLRTARERFLVEPQEDTRLWAKNSEGSLDRLYDTHITVLDAALETGQLIIMETRKKDGTWPSAQLHVMNNNMSEEDEDFKGQPGICGLTNLGNTCFMNSALQCLSNVPQLTEYFLNNCYLEELNFRNPLGMKGEIAEAYADLVKQAWSGHHRSIVPHVFKNKVGHFASQFLGYQQHDSQELLSFLLDGLHEDLNRVKKKEYVELCDAAGRPDQEVAQEAWQNHKRRNDSVIVDTFHGLFKSTLVCPDCGNVSVTFDPFCYLSVPLPISHKRVLEVFFIPMDPRRKPEQHRLVVPKKGKISDLCVALSKHTGISPERMMVADVFSHRFYKLYQLEEPLSSILDRDDIFVYEVSGRIEAIEGSREDIVVPVYLRERTPARDYNNSYYGLMLFGHPLLVSVPRDRFTWEGLYNVLMYRLSRYVTKPNSDDEDDGDEKEDDEEDKDDVPGPSTGGSLRDPEPEQAGPSSGVTNRCPFLLDNCLGTSQWPPRRRRKQLFTLQTVNSNGTSDRTTSPEEVHAQPYIAIDWEPEMKKRYYDEVEAEGYVKHDCVGYVMKKAPVRLQECIELFTTVETLEKENPWYCPSCKQHQLATKKLDLWMLPEILIIHLKRFSYTKFSREKLDTLVEFPIRDLDFSEFVIQPQNESNPELYKYDLIAVSNHYGGMRDGHYTTFACNKDSGQWHYFDDNSVSPVNENQIESKAAYVLFYQRQDVARRLLSPAGSSGAPASPACSSPPSSEFMDVN

SEQ ID NO: 6899 - protein, 546 aa, Homo sapiens
MNELSCTNELVVNKVESECVLNQQVSLNSQEHANLPTDSLLHLNKEMPLATGRDAHQSHHPPLEGRADVIADIQTIPIQTKIKDISPPGNQTCGASSNCPTLNIKPVSLERKKEMADSGTKALHSRLRSNKREAAGFPQVVSVIECHSVQSQDISSCHRVRKNVSQENMCSASAAFKSSKISLQVDNSLITKYENAFQHRDHCCQGTGHSVEKSSCKVSYTSQERELDGKETNGSLPGDKIRNKMVAGLLNSGNSNKTIHTSSSIKLSEEGLEGKEQDVSKETVFCKYNISDHAIQELNQTVNIPGPEKVLDQSPTVMFSSFKNVKSVETLDQKADEVLDCQSNQNRPDECKSEGQSAKEMLSSDQRETVTEPHGEVNHNQKDLLVSSGSNNSLPCGSPKKCNLKGAFVKMSGCDESTEGMVDIVYTDCSNKLAEGVLDVKASNLLDCGARQEKLAFQEDSRSTLSRRELDAAHTGTTGQDSDFPVTAASTVDFLKIKKSCEENVCRSLKDCEMEKCPDSCAHEMESVADHEPNKRILGRVNFVFK

SEQ ID NO: 6900 - protein, 642 aa, Homo sapiens
MKRSSVSSGGAGRLSMQELRSQDVNKQGLYTPQTKEKPTFGKLSINKPTSERKVSLFGKRTSGHGSRNSQLGIFSSSEKIKDPRPLNDKAFIQQCIRQLCEFLTENGYAHNVSMKSLQAPSVKDFLKIFTFLYGFLCPSYELPDTKFEEEVPRIFKDLGYPFALSKSSMYTVGAPHTWPHIVAALVWLIDCIKIHTAMKESSPLFDDGQPWGEETEDGIMHNKLFLDYTIKCYESFMSGADSFDEMNAELQSKLKDLFNVDAFKLESLEAKNRALNEQIARLEQEREKEPNRLESLRKLKASLQGDVQKYQAYMSNLESHSAILDQKLNGLNEEIARVELECETIKQENTRLQNIIDNQKYSVADIERINHERNELQQTINKLTKDLEAEQQKLWNEELKYARGKEAIETQLAEYHKLARKLKLIPKGAENSKGYDFEIKFNPEAGANCLVKYRAQVYVPLKELLNETEEEINKALNKKMGLEDTLEQLNAMITESKRSVRTLKEEVQKLDDLYQQKIKEAEEEDEKCASELESLEKHKHLLESTVNQGLSEAMNELDAVQREYQLVVQTTTEERRKVGNNLQRLLEMVATHVGSVEKHLEEQIAKVDREYEECMSEDLSENIKEIRDKYEKKATLIKSSEE

SEQ ID NO: 6901 - protein, 2376 aa, Homo sapiens
MNLDSLSLALSQISYLVDNLTKKNYRASQQEIQHIVNRHGPEADRHLLRCLFSHVDFSGDGKSSGKDFHQTQFLIQECALLITKPNFISTLSYAIDNPLHYQKSLKPAPHLFAQLSKVLKLSKVQEVIFGLALLNSSSSDLRGFAAQFIKQKLPDLLRSYIDADVSGNQEGGFQDIAIEVLHLLLSHLLFGQKGAFGVGQEQIDAFLKTLRRDFPQERCPVVLAPLLYPEKRDILMDRILPDSGGVAKTMMESSLADFMQEVGYGFCASIEECRNIIVQFGVREVTAAQVARVLGMMARTHSGLTDGIPLQSISAPGSGIWSDGKDKSDGAQAHTWNVEVLIDVLKELNPSLNFKEVTYELDHPGFQIRDSKGLHNVVYGIQRGLGMEVFPVDLIYRPWKHAEGQLSFIQHSLINPEIFCFADYPCHTVATDILKAPPEDDNREIATWKSLDLIESLLRLAEVGQYEQVKQLFSFPIKHCPDMLVLALLQINTSWHTLRHELISTLMPIFLGNHPNSAIILHYAWHGQGQSPSIRQLIMHAMAEWYMRGEQYDQAKLSRILDVAQDLKALSMLLNGTPFAFVIDLAALASRREYLKLDKWLTDKIREHGEPFIQACMTFLKRRCPSILGGLAPEKDQPKSAQLPPETLATMLACLQACAGSVSQELSETILTMVANCSNVMNKARQPPPGVMPKGRPPSASSLDAISPVQIDPLAGMTSLSIGGSAAPHTQSMQGFPPNLGSAFSTPQSPAKAFPPLSTPNQTTAFSGIGGLSSQLPVGGLGTGSLTGIGTGALGLPAVNNDPFVQRKLGTSGLNQPTFQQSKMKPSDLSQVWPEANQHFSKEIDDEANSYFQRIYNHPPHPTMSVDEVLEMLQRFKDSTIKREREVFNCMLRNLFEEYRFFPQYPDKELHITACLFGGIIEKGLVTYMALGLALRYVLEALRKPFGSKMYYFGIAALDRFKNRLKDYPQYCQHLASISHFMQFPHHLQEYIEYGQQSRDPPVKTQGSITTPGSIALAQAQAQAQVPAKAPLAGQVSTMVTTSTTTTVAKTVTVTRPTGVSFKKDVPPSINTTNIDTLLVATDQTERIVEPPENIQEKIAFIFNNLSQSNMTQKVEELKETVKEEFMPWVSQYLVMRRVSIEPNFHSLYSNFLDTLKNPEFNKMVLNETYRNIKVLLTSDKAAANFSDRSLLKNLGHWLGMITLAKNKPILHTDLDVKSLLLEAYVKGQQELLYVVPFVAKVLESSIRSVVFRPPNPWTMAIMNVLAELHQEHDLKLNLKFEIEVLCKNLALDINELKPGNLLKDKDRLKNLDEQLSAPKKDVKQPEELPPITTTTTSTTPATNTTCTATVPPQPQYSYHDINVYSLAGLAPHITLNPTIPLFQAHPQLKQCVRQAIERAVQELVHPVVDRSIKIAMTTCEQIVRKDFALDSEESRMRIAAHHMMRNLTAGMAMSTCREPLLMSISTNLKNSFASALRTASPQQREMMDQAAAQLAQDNCELACCFIQKTAVEKAGPEMDKRLATEFELRKHARQEGRRYCDPVVLTYQAERMPEQIRLKVGGVDPKQLAVYEEFARNVPGFLPTNDLSQPTGFLAQPMKQAWATDDVAQIYDKCITELEQHLHAIPPTLAMNPQAQALRSLLEVVVLSRNSRDAIAALGLLQKAVEGLLDATSGVDADLLLRYRECHLLVLKALQDGRAYGSPWCNRQITRCLIECRDEYKYNVEAVELLIRNHLVNMQQYDLHLAQSMENGLNYMAVAFAMQLVKILLVDERSVAHVTEADLFHTIETLMRINAHSRGNAPEGLPQLMEVVRSNYEAMIDRAHGGPNFMMHSGISQASEYDDPPGLREKAEYLLREWVNLYHSAAAGRDSTKAFSAFVGQMHQQGILKTDDLITRFFRLCTEMCVEISYRAQAEQQHNPAANPTMIRAKCYHNLDAFVRLIALLVKHSGEATNTVTKINLLNKVLGIVVGVLLQDHDVRQSEFQQLPYHRIFIMLLLELNAPEHVLETINFQTLTAFCNTFHILRPTKAPGFVYAWLELISHRIFIARMLAHTPQQKGWPMYAQLLIDLFKYLAPFLRNVELTKPMQILYKGTLRVLLVLLHDFPEFLCDYHYGFCDVIPPNCIQLRNLILSAFPRNMRLPDPFTPNLKVDMLSEINIAPRILTNFTGVMPPQFKKDLDSYLKTRSPVTFLSDLRSNLQVSNEPGNRYNLQLINALVLYVGTQAIAHIHNKGSTPSMSTITHSAHMGIFQNLAVDLDTEGRYLFLNAIANQLRYPNSHTHYFSCTMLYLFAEANTEAIQEQITRVLLERLIVNRPHPWGLLITFIELIKNPAFKFWNHEFVHCAPEIEKLFQSVAQCCMGQKQAQQVMEGTGAS

SEQ ID NO: 6902 - protein, 838 aa, Homo sapiens
VKETHLPKVVLVDLVPGDSDYEVISDDIPLQLVTDPPQLTVKDISCINTECIDIEDKSCDFFGSEVRCNCKASTPSMTNQCKETFKIINRKKDYIILGEPSCQSCGSEMNFNVDASDQSMTYESQGPDEKMVKYIDSEDKSCGYNGSKGKFNLEDTSHRTTHRLQKAHKEASLRKDPRNAGLKGKSCQSSASAVDFGASSKSALHRRADKKKRSKLKHRDLEVSCEPDGFEMNFQCAPPLPSDTDQPQETVKKRHPCKKVSSDLKEKNHDSQSSSVLKVDSVRNLKKAKDVIEDNPDEPVLEALPHVPPSFVGKTWSQIMREDDIKINALVKEFREGRFHCYFDDDCETKKVSSKGKKKVTWADLQGKEDTAPTQAVSESDDIVCGISDIDDLSVALDKPCHRHPPAERPPKQKGRVASQCQTAKISHSTQTSCKNYPVMKRKIIRQEEDPPKSKCSRLQDDRKTKKKVKIGTVEFPASCTKVLKPMQPKALVCVLSSLNIKLKEGEGLPFPKMRHHSWDNDIRFICKYKRNIFDYYEPLIKQIVISPPLSVIVPEFERRNWVKIHFNRSNQNSSAGDNDADGQGSASAPLMAVPARYGFNSHQGTSDSSLFLEESKVLHARELPKKRNFQLTFLNHDVVKISPKSVRNKLLESQSKKKIHGKRVTTSSNKLGFPKKVYKPIILQQKPRKASEKQSIWIRTKPSDIIRKYISKYSVFLRHRYQSRSAFLGRYLKKKKSVVSRLKKAKRTAKVLLNSSVPPAGAEELSSAMANPPPKRPVRASCRVARRRKKTDESYHGRQKGPSTPVRAYDLRSSSCLQQRERMMTRLANKLRGNEVK

SEQ ID NO: 6903 - protein, 388 aa, Homo sapiens
MLNGTTLEAAMLFHGISGGHIQGIMEEMERRSKTEARLAKGAQLNGRDAGMPPLSPEKPALCAGCGGKISDRYYLLAVDKQWHLRCLKCCECKLALESELTCFAKDGSIYCKEDYYRRFSVQRCARCHLGISASEMVMRARDSVYHLSCFTCSTCNKTLTTGDHFGMKDSLVYCRAHFETLLQGEYPPQLSYTELAAKSGGLALPYFNGTGTVQKGRPRKRKSPALGVDIVNYNSGCNENEADHLDRDQQPYPPSQKTKRMRTSFKHHQLRTMKSYFAINHNPDAKDLKQLAQKTGLTKRVLQVWFQNARAKFRRNLLRQENGGVDKADGTSLPAPPSADSGALTPPGTATTLTDLTNPTITVVTSVTSNMDSHESGSPSQTTLTNLF

SEQ ID NO: 6904 - protein, 390 aa, Homo sapiens
MGLLVFVRNLLLALCLFLVLGFLYYSAWKLHLLQWEEDSSKYSHSSSPQEKPVADSVVLSFDSAGQTLGSEYDRLGFLLNLDSKLPAELATKYANFSEGACKPGYASALMTAIFPRFSKPAPMFLDDSFRKWARIREFVPPFGIKGQDNLIKAILSVTKEYRLTPALDSLRCRRCIIVGNGGVLANKSLGSRIDDYDIVVRLNSAPVKGFEKDVGSKTTLRITYPEGAMQRPEQYERDSLFVLAGFKWQDFKWLKYIVYKERVSASDGFWKSVATRVPKEPPEIRILNPYFIQEAAFTLIGLPFNNGLMGRGNIPTLGSVAVTMALHGCDEVAVAGFGYDMSTPNAPLHYYETVRMAAIKESWTHNIQREKEFLRKLVKARVITDLSSGI

SEQ ID NO: 6905 - protein, 230 aa, Homo sapiens [sequence omitted]

SEQ ID NO: 6906 - protein, 228 aa, Homo sapiens [sequence omitted]

SEQ ID NO: 6907 - protein, 444 aa, Homo sapiens
MGLLVFVRNLLLALCLFLVLGFLYYSAWKLHLLQWEEDSSKYSHSSSPQEKPVADSVVLSFDSAGQTLGSEYDRLGFLLNLDSKLSPRTLCTVVFGLDCILESPGEPKKLLMPASHPLEILKSLSEDTAFALGFLKLPRPAELATKYANFSEGACKPGYASALMTAIFPRFSKPAPMFLDDSFRKWARIREFVPPFGIKGQDNLIKAILSVTKEYRLTPALDSLRCRRCIIVGNGGVLANKSLGSRIDDYDIVVRLNSAPVKGFEKDVGSKTTLRITYPEGAMQRPEQYERDSLFVLAGFKWQDFKWLKYIVYKERVSASDGFWKSVATRVPKEPPEIRILNPYFIQEAAFTLIGLPFNNGLMGRGNIPTLGSVAVTMALHGCDEVAVAGFGYDMSTPNAPLHYYETVRMAAIKESWTHNIQREKEFLRKLVKARVITDLSSGI

SEQ ID NO: 6908 - protein, 189 aa, Homo sapiens
MGLLVFVRNLLLALCLFLVLGFLYYSAWKLHLLQWEEDSNSVVLSFDSAGQTLGSEYDRLGFLLNLDSKLPAELATKYANFSEGACKPGYASALMTAIFPRFSKPAPMFLDDSFRKWARIREFVPPFGIKGQDNLIKAILSVTKEYRLTPALDSLRCRRCIIVGNGGVLANKSLGSRIDDYDIVVRPRL

SEQ ID NO: 6909 - protein, 429 aa, Homo sapiens
MGLLVFVRNLLLALCLFLVLGFLYYSAWKLHLLQWEEDSNSVVLSFDSAGQTLGSEYDRLGFLLNLDSKLSPRTLCTVVFGLDCILESPGEPKKLLMPASHPLEILKSLSEDTAFALGFLKLPRPAELATKYANFSEGACKPGYASALMTAIFPRFSKPAPMFLDDSFRKWARIREFVPPFGIKGQDNLIKAILSVTKEYRLTPALDSLRCRRCIIVGNGGVLANKSLGSRIDDYDIVVRLNSAPVKGFEKDVGSKTTLRITYPEGAMQRPEQYERDSLFVLAGFKWQDFKWLKYIVYKERVSASDGFWKSVATRVPKEPPEIRILNPYFIQEAAFTLIGLPFNNGLMGRGNIPTLGSVAVTMALHGCDEVAVAGFGYDMSTPNAPLHYYETVRMAAIKESWTHNIQREKEFLRKLVKARVITDLSSGI

SEQ ID NO: 6910 - protein, 359 aa, Homo sapiens
MGLLVFVRNLLLALCLFLVLGFLYYSAWKLHLLQWEEDSKYDRLGFLLNLDSKLPAELATKYANFSEGACKPGYASALMTAIFPRFSKPAPMFLDDSFRKWARIREFVPPFGIKGQDNLIKAILSVTKEYRLTPALDSLRCRRCIIVGNGGVLANKSLGSRIDDYDIVVRLNSAPVKGFEKDVGSKTTLRITYPEGAMQRPEQYERDSLFVLAGFKWQDFKWLKYIVYKERVSASDGFWKSVATRVPKEPPEIRILNPYFIQEAAFTLIGLPFNNGLMGRGNIPTLGSVAVTMALHGCDEVAVAGFGYDMSTPNAPLHYYETVRMAAIKESWTHNIQREKEFLRKLVKARVITDLSSGI

SEQ ID NO: 6911 - protein, 201 aa, Homo sapiens
MGLLVFVRNLLLALCLFLVLGFLYYSAWKLHLLQWEEDSSKYSHSSSPQEKPVAEYDRLGFLLNLDSKLPAELATKYANFSEGACKPGYASALMTAIFPRFSKPAPMFLDDSFRKWARIREFVPPFGIKGQDNLIKAILSVTKEYRLTPALDSLRCRRCIIVGNGGVLANKSLGSRIDDYDIVVSPGRTISSERKSFCGSW

SEQ ID NO: 6912 - protein, 375 aa, Homo sapiens
MGLLVFVRNLLLALCLFLVLGFLYYSAWKLHLLQWEEDSNSVVLSFDSAGQTLGSEYDRLGFLLNLDSKLPAELATKYANFSEGACKPGYASALMTAIFPRFSKPAPMFLDDSFRKWARIREFVPPFGIKGQDNLIKAILSVTKEYRLTPALDSLRCRRCIIVGNGGVLANKSLGSRIDDYDIVVRLNSAPVKGFEKDVGSKTTLRITYPEGAMQRPEQYERDSLFVLAGFKWQDFKWLKYIVYKERVSASDGFWKSVATRVPKEPPEIRILNPYFIQEAAFTLIGLPFNNGLMGRGNIPTLGSVAVTMALHGCDEVAVAGFGYDMSTPNAPLHYYETVRMAAIKESWTHNIQREKEFLRKLVKARVITDLSSGI

SEQ ID NO: 6913 - protein, 413 aa, Homo sapiens
MGLLVFVRNLLLALCLFLVLGFLYYSAWKLHLLQWEEDSKYDRLGFLLNLDSKLSPRTLCTVVFGLDCILESPGEPKKLLMPASHPLEILKSLSEDTAFALGFLKLPRPAELATKYANFSEGACKPGYASALMTAIFPRFSKPAPMFLDDSFRKWARIREFVPPFGIKGQDNLIKAILSVTKEYRLTPALDSLRCRRCIIVGNGGVLANKSLGSRIDDYDIVVRLNSAPVKGFEKDVGSKTTLRITYPEGAMQRPEQYERDSLFVLAGFKWQDFKWLKYIVYKERVSASDGFWKSVATRVPKEPPEIRILNPYFIQEAAFTLIGLPFNNGLMGRGNIPTLGSVAVTMALHGCDEVAVAGFGYDMSTPNAPLHYYETVRMAAIKESWTHNIQREKEFLRKLVKARVITDLSSGI

SEQ ID NO: 6914 - protein, 344 aa, Homo sapiens
MGLLVFVRNLLLALCLFLVLGFLYYSAWKLHLLQWEEDSNSVVLSFDSAGQTLGSEYDRLGFLLNLDSKLFSKPAPMFLDDSFRKWARIREFVPPFGIKGQDNLIKAILSVTKEYRLTPALDSLRCRRCIIVGNGGVLANKSLGSRIDDYDIVVRLNSAPVKGFEKDVGSKTTLRITYPEGAMQRPEQYERDSLFVLAGFKWQDFKWLKYIVYKERVSASDGFWKSVATRVPKEPPEIRILNPYFIQEAAFTLIGLPFNNGLMGRGNIPTLGSVAVTMALHGCDEVAVAGFGYDMSTPNAPLHYYETVRMAAIKESWTHNIQREKEFLRKLVKARVITDLSSGI

SEQ ID NO: 6915 - protein, 277 aa, Homo sapiens
MGLLVFVRNLLLALCLFLVLGFLYYSAWKLHLLQWEEDSNSVVLSFDSAGQTLGSEYDRLGFLLNLDSKLPAELATKYANFSEGACKPGYASALMTAIFPRFSKPAPMFLDDSFRKWARIREFVPPFGIKGQDNLIKAILSVTKEYRLTPALDSLRCRRCIIVGNGGVLANKSLGSRIDDYDIVVRLNSAPVKGFEKDVGSKTTLRITYPEGAMQRPEQYERDSLFVLAGFKWQDFKWLKYIVYKERVSWTHNIQREKEFLRKLVKARVITDLSSGI

SEQ ID NO: 6916 - protein, 345 aa, Homo sapiens
MGLLVFVRNLLLALCLFLVLGFLYYSAWKLHLLQWEEDSNSVVLSFDSAGQTLGSEYDRLGFLLNLDSKLPAELATKYANFSEGACKPGYASALMTAIFPRFSKPAPMFLDDSFRKWARIREFVPPFGIKGQDNLIKAILSVTKEYRLTPALDSLRCRRCIIVGNGGVLANKSLGSRIDDYDIVVRLNSAPVKGFEKDVGSKTTLRITYPEGAMQRPEQYERDSLFVLAGFKWQDFKWLKYIVYKERVEAAFTLIGLPFNNGLMGRGNIPTLGSVAVTMALHGCDEVAVAGFGYDMSTPNAPLHYYETVRMAAIKESWTHNIQREKEFLRKLVKARVITDLSSGI

SEQ ID NO: 6917 - protein, 899 aa, Homo sapiens
MYLSICCCFLLWAPALTLKNLNYSVPEEQGAGTVIGNIGRDARLQPGLPPAERGGGGRSKSGSYRVLENSAPHLLDVDADSGLLYTKQRIDRESLCRHNAKCQLSLEVFANDKEICMIKVEIQDINDNAPSFSSDQIEMDISENAAPGTRFPLTSAHDPDAGENGLRTYLLTRDDHGLFGLDVKSRGDGTKFPELVIQKALDREQQNHHTLVLTALDGGEPPRSATVQINVKVIDSNDNSPVFEAPSYLVELPENAPLGTVVIDLNATDADEGPNGEVLYSFSSYVPDRVRELFSIDPKTGLIRVKGNLDYEENGMLEIDVQARDLGPNPIPAHCKVTVKLIDRNDNAPSIGFVSVRQGALSEAAPPGTVIALVRVTDRDSGKNGQLQCRVLGGGGTGGGGGLGGPGGSVPFKLEENYDNFYTVVTDRPLDRETQDEYNVTIVARDGGSPPLNSTKSFAIKILDENDNPPRFTKGLYVLQVHENNIPGEYLGSVLAQDPDLGQNGTVSYSILPSHIGDVSIYTYVSVNPTNGAIYALRSFNFEQTKAFEFKVLAKDSGAPAHLESNATVRVTVLDVNDNAPVIVLPTLQNDTAELQVPRNAGLGYLVSTVRALDSDFGESGRLTYEIVDGNDDHLFEIDPSSGEIRTLHPFWEDVTPVVELVVKVTDHGKPTLSAVAKLIIRSVSGSLPEGVPRVNGEQHHWDMSLPLIVTLSTISIILLAAMITIAVKCKRENKEIRTYNCRIAEYSHPQLGGGKGKKKKINKNDIMLVQSEVEERNAMNVMNVVSSPSLATSPMYFDYQTRLPLSSPRSEVMYLKPASNNLTVPQGHAGCHTSFTGQGTNASETPATRMSIIQTDNFPAEPNYMGSRQQFVQRQHFLFFFFICISVAPRLRTQKEPA

SEQ ID NO: 6918 - protein, 472 aa, Homo sapiens
MAGASRLLFLWLGCFCVSLAQGERPKPPFPELRKAVPGDRTAGGGPDSELQPQDKVSEHMLRLYDRYSTVQAARTPGSLEGGSQPWRPRLLREGNTVRSFRAAAAETLERKGLYIFNLTSLTKSENILSATLYFCIGELGNISLSCPVSGGCSHHAQRKHIQIDLSAWTLKFSRNQSQLLGHLSVDMAKSHRDIMSWLSKDITQFLRKAKENEEFLIGFNITSKGRQLPKRRLPFPEPYILVYANDAAISEPESVVSSLQGHRNFPTGTVPKWDSHIRAALSIERRKKRSTGVLLPLQNNELPGAEYQYKKDEVWEERKPYKTLQAQAPEKSKNKKKQRKGPHRKSQTLQFDEQTLKKARRKQWIEPRNCARRYLKVDFADIGWSEWIISPKSFDAYYCSGACQFPMPKSLKPSNHATIQSIVRAVGVVPGIPEPCCVPEKMSSLSILFFDENKNVVLKVYPNMTVESCACR

SEQ ID NO: 6919 - protein, 870 aa, Homo sapiens
MNSNLPAENLTIAVNMTKTLPTAVTHGFNSTNDPPSMSITRLFPALLECFGIVLCGYIAGRANVITSTQAKGLGNFVSRFALPALLFKNMVVLNFSNVDWSFLYSILIAKASVFFIVCVLTLLVASPDSRFSKAGLFPIFATQSNDFALGYPIVEALYQTTYPEYLQYIYLVAPISLMMLNPIGFIFCEIQKWKDTQNASQNKIKIVGLGLLRVLQNPIVFMVFIGIAFNFILDRKVPVYVENFLDGLGNSFSGSALFYLGLTMVGKIKRLKKSAFVVLILLITAKLLVLPLLCREMVELLDKGDSVVNHTSLSNYAFLYGVFPVAPGVAIFATQFNMEVEIITSGMVISTFVSAPIMYVSAWLLTFPTMDPKPLAYAIQNVSFDISIVSLISLIWSLAILLLSKKYKQLPHMLTTNLLIAQSIVCAGMMIWNFVKEKNFVGQILVFVLLYSSLYSTYLRTGLLAISLFLLKKRERVQIPVGIIIISGWGIPALLVGVLLITGKHNGDSIDSAFFYGKEQMITTAVTLFCSILIAGISLMCMNQTAQAGSYEGFDQSQSHKVVEPGNTAFEESPAPVNEPELFTSSIPETSCCSCSMGNGELHCPSIEPIANTSTSEPVIPSFEKNNHCVSRCNSQSRILAQEEEQYLQSGDQQLTRHVLLCLLLIIGLFANLSSCLWWLFNQEPGRLYVELQFFCAVFNFGQGFISFGIFGLDKHLIILPFKRRLEFLWNNKDTAENRDSPVSEEIKMTCQQFIHYHRDLCIRNIVKERRCGAKTSAGTFCGCDLVSWLIEVGLASDRGEAVIYGDRLVQGGVIQHITNEYEFRDEYLFYRFLQKSPEQSPPAINANTLQQERYKEIEHSSPPSHSPKT

SEQ ID NO: 6920 - protein, 870 aa, Homo sapiens
MNSNLPAENLTIAVNMTKTLPTAVTHGFNSTNDPPSMSITRLFPALLECFGIVLCGYIAGRANVITSTQAKGLGNFVSRFALPALLFKNMVVLNFSNVDWSFLYSILIAKASVFFIVCVLTLLVASPDSRFSKAGLFPIFATQSNDFALGYPIVEALYQTTYPEYLQYIYLVAPISLMMLNPIGFIFCEIQKWEDTQNASQNKIKIVGLGLLRVLQNPIVFMVFIGIAFNFILDRKVPVYVENFLDGLGNSFSGSALFYLGLTMVGKIKRLKKSAFVVLILLITAKLLVLPLLCREMVELLDKGDSVVNHTSLSNYAFLYGVFPVAPGVAIFATQFNMEVEIITSGMVISTFVSAPIMYVSAWLLTFPTMDPKPLAYAIQNVSFDISIVSLISLIWSLAILLLSKKYKQLPHMLTTNLLIAQSIVCAGMMIWNFVKEKNFVGQILVFVLLYSSLYSTYLWTGLLAISLFLLKKRERVQIPVGIIIISGWGIPALLVGVLLITGKHNGDSIDSAFFYGKEQMITTAVTLFCSILIAGISLMCMNQTAQAGGYEGFDQSQSHKVVEPGNTAFEESPAPVNEPELFTSSIPETSCCSCSMGNGELHCPSIEPIANTSTSEPVIPSFEKNNHCVSRCNSQSCILAQEEEQYLQSGDQQLTRHVLLCLLLIIGLFANLYSCLWWLFNQEPGRLYVELQFFCAVFNFGQGFISFGIFGLDKHLIILPFKRRLEFLWNNKDTAENRDSPVSEEIKMTCQQFIHYHRDLCIRNIVKERRCGAKTSAGTFCGCDLVSWLIEVGLASDRGEAVIYGDRLVQGGVIQHITNEYEFRDEYLFYRFLQKSPEQSPPAINANTLQQERYKEIEHSSPPSHSPKT

SEQ ID NO: 6921 - protein, 290 aa, Homo sapiens
MVIQKEKKSCGQVVEEWKEFVWNPRTHQFMGRTGTSWAFILLFYLVFYGFPTAMFTLTMWVMLQTVSDHTPKYQDRLATPGLMIRPKTENLDVIVNVSDTESWDQHVQKLNKFLEPYNDSMQAQKNDVCRPGRYYEQPDNGVLNYPKLACQFNRTQLGNCSGIGDSTHYGYSTGQPCVFIKMNRVINFYAGANQSMNVTCAGKRDEDAENLGNFVMFPANGNIDLMYFPYYGKKFHVNYTQPLVAVKFLNVTPNVEVNVECRINAANIATDDERDKFAGRVAFKLRINKT

SEQ ID NO: 6922 - protein, 791 aa, Homo sapiens
MADDKVAILTDDEEEQKRKYVLADPFNGISREPEPPSNETPSSTETSAIPEEEIDWIEKHCVKINNDLLISKVFYFFFYSAYGSLYPLLPVYYKQLGMSPSQSGLLVGIRYFIEFCSAPFWGVVADRFKKGKIVLLFSLLCWVLFNLGIGFVKPATLRCVPKIRPTTHPTNASHQLTILPTNSSFTSFLTISPKMREKRNLLETGLNVSDTVTLPTAPNMNSEPTLQPQTGEITNRMMDLTLNSSTATPVSPGSVTKETTTVIVTTTKSLPSDQVMLVYDQQEVEAIFLVILVVVIIGEFFSASSVTIVDTVTLQYLGKHRDRYGLQRMWGSLGWGLAMLSVGIGIDYTHIEVLIDGKGCKPPEYRNYQIVFIVFGVLMTMALIVATQFRFRYNHFKNDDSKGKEVEIPQVERNNSTESSEETPTTTSHSQAFNFWDLIKLLCSVQYGSVLFVAWFMGFGYGFVFTFLYWHLEDLNGTTTLFGVCSVLSHVSELTAYFFSHKLIELIGHIRVLYIGLACNTARYIYISYLENAWTVLPMEVLQGVTHAAIWAACISYLSAAVPPELRTSAQGILQGLHLGLGRGCGAMIGGVLVNYFGAAATFRGIGMACLVILLLFALIQWLAVPDEEEDKTMLAERIPVPSSPVPIATIDLVQQQTEDVMPRIEPRLPPKKTKHQEEQEDVNKPAWGVSSSPWVTFVYALYQIKEMMQLTRDNRASEIQPLQGTNENRENSPAGRAQPVPCETHSDPSRNQPSPDAAASQTQTSPAHPSVDPCTEESEEQQAQLAAGGH

SEQ ID NO: 6923 - protein, 162 aa, Homo sapiens
MAIHKALVMCLGLPLFLFPEQSYQGDMYPTRGVGYETILKEQKGQSMFVENKAFSMDEPVAAKRPVSPYSGYNGQLLTSVYQPTEMALMHKVPSEGAYDIILPRATANSQVMGSANSTLRAEDMYSAQSHQAATPPKDGKNSQVSELTQRGQANTNQVFLRL

SEQ ID NO: 6924 - protein, 441 aa, Homo sapiens
MAIHKALVMCLGLPLFLFPGAWAQGHVPPGCSQGLNPLYYNLCDRSGAWGIVLEAVAGAGIVTTFVLTIILVASLPFVQDTKKRSLLGTQVFFLLGTLGLFCLVFACVVKPDFSTCASRRFLFGVLFAICFSCLAAHVFALNFLARKNHGPRGWVIFTVALLLTLVEVIINTEWLIITLVRGSGEGGPQGNSSAGWAVASPCAIANMDFVMALIYVMLLLLGAFLGAWPALCGRYKRWRKHGVFVLLTTATSVAIWVVWIVMYTYGNKQHNSPTWDDPTLAIALAANAWAFVLFYVIPEVSQVTKSSPEQSYQGDMYPTRGVGYETILKEQKGQSMFVENKAFSMDEPVAAKRPVSPYSGYNGQLLTSVYQPTEMALMHKVPSEGAYDIILPRATANSQVMGSANSTLRAEDMYSAQSHQAATPPKDGKNSQVFRNPYVWD

SEQ ID NO: 6925 - protein, 486 aa, Homo sapiens
MRGRGSQQQQPTRRQGQKLPSPSPAGKYESAQPGGTQPEPGLGARMAIHKALVMCLGLPLFLFPGAWAQGHVPPGCSQGLNPLYYNLCDRSGAWGIVLEAVAGAGIVTTFVLTIILVASLPFVQDTKKRSLLGTQVFFLLGTLGLFCLVFACVVKPDFSTCASRRFLFGVLFAICFSCLAAHVFALNFLARKNHGPRGWVIFTVALLLTLVEVIINTEWLIITLVRGSGEGGPQGNSSAGWAVASPCAIANMDFVMALIYVMLLLLGAFLGAWPALCGRYKRWRKHGVFVLLTTATSVAIWVVWIVMYTYGNKQHNSPTWDDPTLAIALAANAWAFVLFYVIPEVSQVTKSSPEQSYQGDMYPTRGVGYETILKEQKGQSMFVENKAFSMDEPVAAKRPVSPYSGYNGQLLTSVYQPTEMALMHKVPSEGAYDIILPRATANSQVMGSANSTLRAEDMYSAQSHQAATPPKDGKNSQVFRNPYVWD

SEQ ID NO: 6926 - protein, 828 aa, Homo sapiens
MAQFYYKRNVNAPYRDRIPLRIVRAESELSPSEKAYLNAVEKGDYASVKKSLEEAEIYFKININCIDPLGRTALLIAIENENLELIELLLSFNVYVGDALLHAIRKEVVGAVELLLNHKKPSGEKQVPPILLDKQFSEFTPDITPIILAAHTNNYEIIKLLVQKGVSVPRPHEVRCNCVECVSSSDVDSLRHSRSRLNIYKALASPSLIALSSEDPFLTAFQLSWELQELSKVENEFKSEYEELSRQCKQFAKDLLDQTRSSRELEIILNYRDDNSLIEEQSGNDLARLKLAIKYRQKEFVAQPNCQQLLASRWYDEFPGWRRRHWAVKMVTCFIIGLLFPVFSVCYLIAPKSPLGLFIRKPFIKFICHTASYLTFLFLLLLASQHIDRSDLNRQGPPPTIVEWMILPWVLGFIWGEIKQMWDGGLQDYIHDWWNLMDFVMNSLYLATISLKIVAFVKYSALNPRESWDMWHPTLVAEALFAIANIFSSLRLISLFTANSHLGPLQISLGRMLLDILKFLFIYCLVLLAFANGLNQLYFYYEETKGLTCKGIRCEKQNNAFSTLFETLQSLFWSIFGLINLYVTNVKAQHEFTEFVGATMFGTYNVISLVVLLNMLIAMMNNSYQLIARRAADNLRRHHQYQEVMRNLVKRYVAAMIRDAKTEEGLTEENFKELKQDISSFRFEVLGLLRGSKLSTIQSANASKESSNSADSDEKSDSEEEVARQQAAGPLERNIQLESRGLASRGDLSIPGLSEQCVLVDHRERNTDTLGLQVGKRVCPFKSEKVVVEDTVPIIPKEKHAKEEDSSIDYDLNLPDTVTHEDYVTTRL

SEQ ID NO: 6927 - protein, 301 aa, Homo sapiens
MERAPPDGPLNASGALAGDAAAAGGARGFSAAWTAVLAALMALLIVATVLGNALVMLAFVADSSLRTQNNFFLLNLAISDFLVGAFCIPLYVPYVLTGRWTFGRGLCKLWLVVDYLLCTSSAFNIVLISYDRFLSVTRAVSYRAQQGDTRRAVRKMLLVWVLAFLLYGPAILSWEYLSGGSSIPEGHCYAEFFYNWYFLITASTLEFFTPFLSVTFFNLSIYLNIQRRTRLRLDGAREAAGPEPPPEAQPSPPPPPGCWGCWQKGHGEAMPLHSFRRAFTKLLCPQKLKIQPHSSLEHCWK

SEQ ID NO: 6928 - protein, 200 aa, Homo sapiens
MERAPPDGPLNASGALAGDAAAAGGARGFSAAWTAVLAALMALLIVATVLGNALVMLAFVADSSLRTQNNFFLLNLAISDFLVGAFCIPLYVPYVLTGRWTFGRGLCKLWLVVDYLLCTSSAFNIVLISYDRFLSVTRAVSYRAQQGDTRRAVRKMLLVWVLAFLLYGPAPAAPRGALRGRAHSRGAPSRRRPRPRWRSA

SEQ ID NO: 6929 - protein, 812 aa, Homo sapiens
MHQFFCRCKEGLQGVTLGAAPGDKLIPQWGCNIAQGQWSLGREWSPGGVGKGDGGRTWPADSGLDSHTHTKEAGKCPEEAGASRRTDPGPCRARPAAPGPGSTAALTPPRSPPPPPLRPPPMKRLPLLVVFSTLLNCSYTQNCTKTPCLPNAKCEIRNGIEACYCNMGFSGNGVTICEDDNECGNLTQSCGENANCTNTEGSYYCMCVPGFRSSSNQDRFITNDGTVCIENVNANCHLDNVCIAANINKTLTKIRSIKEPVALLQEVYRNSVTDLSPTDIITYIEILAESSSLLGYKNNTISAKDTLSNSTLTEFVKTVNNFVQRDTFVVWDKLSVNHRRTHLTKLMHTVEQATLRISQSFQKTTEFDTNSTDIALKVFFFDSYNMKHIHPHMNMDGDYINIFPKRKAAYDSNGNVAVAFVYYKSIGPLLSSSDNFLLKPQNYDNSEEEERVISSVISVSMSSNPPTLYELEKITFTLSHRKVTDRYRSLCAFWNYSPDTMNGSWSSEGCELTYSNETHTSCRCNHLTHFAILMSSGPSIGIKDYNILTRITQLGIIISLICLAICIFTFWFFSEIQSTRTTIHKNLCCSLFLAELVFLVGINTNTNKLFCSIIAGLLHYFFLAAFAWMCIEGIHLYLIVVGVIYNKGFLHKNFYIFGYLSPAVVVGFSAALGYRYYGTTKVCWLSTENNFIWSFIGPACLIILVNLLAFGVIIYKVFRHTAGLKPEVSCFENIRSCARGALALLFLLGTTWIFGVLHVVHASVVTAYLFTVSNAFQGMFIFLFLCVLSRKIQEEYYRLFKNVPCCFGCLSC

SEQ ID NO: 6930 - protein, 1325 aa, Homo sapiens
MLPVYQEVKPNPLQDANICSRVFFWWLNPLFKIGHKRRLEEDDMYSVLPEDRSQHLGEELQGFWDKEVLRAENDAQKPSLTRAIIKCYWKSYLVLGIFTLIEESAKVIQPIFLGKIINYFENYDPMDSVALNTAYAYATVLTFCTLILAILHHLYFYHVQCAGMRLRVAMCHMIYRKALRLSNMAMGKTTTGQIVNLLSNDVNKFDQVTVFLHFLWAGPLQAIAVTALLWMEIGISCLAGMAVLIILLPLQSCFGKLFSSLRSKTATFTDARIRTMNEVITGIRIIKMYAWEKSFSNLITNLRKKEISKILRSSCLRGMNLASFFSASKIIVFVTFTTYVLLGSVITASRVFVAVTLYGAVRLTVTLFFPSAIERVSEAIVSIRRIQTFLLLDEISQRNRQLPSDGKKMVHVQDFTAFWDKASETPTLQGLSFTVRPGELLAVVGPVGAGKSSLLSAVLGELAPSHGLVSVHGRIAYVSQQPWVFSGTLRSNILFGKKYEKERYEKVIKACALKKDLQLLEDGDLTVIGDRGTTLSGGQKARVNLARAVYQDADIYLLDDPLSAVDAEVSRHLFELCICQILHEKITILVTHQLQYLKAASQILILKDGKMVQKGTYTEFLKSGIDFGSLLKKDNEESEQPPVPGTPTLRNRTFSESSVWSQQSSRPSLKDGALESQDTENVPVTLSEENRSEGKVGFQAYKNYFRAGAHWIVFIFLILLNTAAQVAYVLQDWWLSYWANKQSMLNVTVNGGGNVTEKLDLNWYLGIYSGLTVATVLFGIARSLLVFYVLVNSSQTLHNKMFESILKAPVLFFDRNPIGRILNRFSKDIGHLDDLLPLTFLDFIQTLLQVVGVVSVAVAVIPWIAIPLVPLGIIFIFLRRYFLETSRDVKRLESTTRSPVFSHLSSSLQGLWTIRAYKAEERCQELFDAHQDLHSEAWFLFLTTSRWFAVRLDAICAMFVIIVAFGSLILAKTLDAGQVGLALSYALTLMGMFQWCVRQSAEVENMMISVERVIEYTDLEKEAPWEYQKRPPPAWPHEGVIIFDNVNFMYSPGGPLVLKHLTALIKSQEKVGIVGRTGAGKSSLISALFRLSEPEGKIWIDKILTTEIGLHDLRKKMSIIPQEPVLFTGTMRKNLDPFKEHTDEELWNALQEVQLKETIEDLPGKMDTELAESGSNFSVGQRQLVCLARAILRKNQILIIDEATANVDPRTDELIQKKIREKFAHCTVLTIAHRLNTIIDSDKIMVLDSGRLKEYDEPYVLLQNKESLFYKMVQQLGKAEAAALTETAKQVYFKRNYPHIGHTDHMVTNTSNGQPSTLTIFETAL

SEQ ID NO: 6931 - protein, 1059 aa, Homo sapiens
MKESSLQNSSCSLGKETKKENMFLQSSMLTCIFLLISGSCELCAEENFSRSYPCDEKKQNDSVIAECSNRRLQEVPQTVGKYVTELDLSDNFITHITNESFQGLQNLTKINLNHNPNVQHQNGNPGIQSNGLNITDGAFLNLKNLRELLLEDNQLPQIPSGLPESLTELSLIQNNIYNITKEGISRLINLKNLYLAWNCYFNKVCEKTNIEDGVFETLTNLELLSLSFNSLSHVPPKLPSSLRKLFLSNTQIKYISEEDFKGLINLTLLDLSGNCPRCFNAPFPCVPCDGGASINIDRFAFQNLTQLRYLNLSSTSLRKINAAWFKNMPHLKVLDLEFNYLVGEIASGAFLTMLPRLEILDLSFNYIKGSYPQHINISRNFSKLLSLRALHLRGYVFQELREDDFQPLMQLPNLSTINLGINFIKQIDFKLFQNFSNLEIIYLSENRISPLVKDTRQSYANSSSFQRHIRKRRSTDFEFDPHSNFYHFTRPLIKPQCAAYGKALDLSLNSIFFIGPNQFENLPDIACLNLSANSNAQVLSGTEFSAIPHVKYLDLTNNRLDFDNASALTELSDLEVLDLSYNSHYFRIAGVTHHLEFIQNFTNLKVLNLSHNNIYTLTDKYNLESKSLVELVFSGNRLDILWNDDDNRYISIFKGLKNLTRLDLSLNRLKHIPNEAFLNLPASLTELHINDNMLKFFNWTLLQQFPRLELLDLRGNKLLFLTDSLSDFTSSLRTLLLSHNRISHLPSGFLSEVSSLKHLDLSSNLLKTINKSALETKTTTKLSMLELHGNPFECTCDIGDFRRWMDEHLNVKIPRLVDVICASPGDQRGKSIVSLELTTCVSDVTAVILFFFTFFITTMVMLAALAHHLFYWDVWFIYNVCLAKVKGYRSLSTSQTFYDAYISYDTKDASVTDWVINELRYHLEESRDKNVLLCLEERDWDPGLAIIDNLMQSINQSKKTVFVLTKKYAKSWNFKTAFYLALQRLMDENMDVIIFILLEPVLQHSQYLRLRQRICKSSILQWPDNPKAEGLFWQTLRNVVLTENDSRYNNMYVDSIKQY

SEQ ID NO: 6932 - protein, 1041 aa, Homo sapiens
MENMFLQSSMLTCIFLLISGSCELCAEENFSRSYPCDEKKQNDSVIAECSNRRLQEVPQTVGKYVTELDLSDNFITHITNESFQGLQNLTKINLNHNPNVQHQNGNPGIQSNGLNITDGAFLNLKNLRELLLEDNQLPQIPSGLPESLTELSLIQNNIYNITKEGISRLINLKNLYLAWNCYFNKVCEKTNIEDGVFETLTNLELLSLSFNSLSHVPPKLPSSLRKLFLSNTQIKYISEEDFKGLINLTLLDLSGNCPRCFNAPFPCVPCDGGASINIDRFAFQNLTQLRYLNLSSTSLRKINAAWFKNMPHLKVLDLEFNYLVGEIASGAFLTMLPRLEILDLSFNYIKGSYPQHINISRNFSKLLSLRALHLRGYVFQELREDDFQPLMQLPNLSTINLGINFIKQIDFKLFQNFSNLEIIYLSENRISPLVKDTRQSYANSSSFQRHIRKRRSTDFEFDPHSNFYHFTRPLIKPQCAAYGKALDLSLNSIFFIGPNQFENLPDIACLNLSANSNAQVLSGTEFSAIPHVKYLDLTNNRLDFDNASALTELSDLEVLDLSYNSHYFRIAGVTHHLEFIQNFTNLKVLNLSHNNIYTLTDKYNLESKSLVELVFSGNRLDILWNDDDNRYISIFKGLKNLTRLDLSLNRLKHIPNEAFLNLPASLTELHINDNMLKFFNWTLLQQFPRLELLDLRGNKLLFLTDSLSDFTSSLRTLLLSHNRISHLPSGFLSEVSSLKHLDLSSNLLKTINKSALETKTTTKLSMLELHGNPFECTCDIGDFRRWMDEHLNVKIPRLVDVICASPGDQRGKSIVSLELTTCVSDVTAVILFFFTFFITTMVMLAALAHHLFYWDVWFIYNVCLAKVKGYRSLSTSQTFYDAYISYDTKDASVTDWVINELRYHLEESRDKNVLLCLEERDWDPGLAIIDNLMQSINQSKKTVFVLTKKYAKSWNFKTAFYLALQRLMDENMDVIIFILLEPVLQHSQYLRLRQRICKSSILQWPDNPKAEGLFWQTLRNVVLTENDSRYNNMYVDSIKQY

SEQ ID NO: 6933 - protein, 804 aa, Homo sapiens
MAQFYYKRNVNAPYRDRIPLRIVRAESELSPSEKAYLNAVEKGDYASVKKSLEEAEIYFKININCIDPLGRTALLIAIENENLELIELLLSFNVYVGDALLHAIRKEVVGAVELLLNHKKPSGEKQFVAQPNCQQLLASRWYDEFPGWRRRHWAVKMVTCFIIGLLFPVFSVCYLIAPKSPLGLFIRKPFIKFICHTASYLTFLFLLLLASQHIDRSDLNRQGPPPTIVEWMILPWVLGFIWGEIKQMWDGGLQDYIHDWWNLMDFVMNSLYLATISLKIVAFVKYSALNPRESWDMWHPTLVAEALFAIANIFSSLRLISLFTANSHLGPLQISLGRMLLDILKFLFIYCLVLLAFANGLNQLYFYYEETKGLTCKGIRCEKQNNAFSTLFETLQSLFWSIFGLINLYVTNVKAQHEFTEFVGATMFGTYNVISLVVLLNMLIAMMNNSYQLIADHADIEWKFARTKLWMSYFEEGGTLPTPFNVIPSPKSLWYLIKWIWTHLCKKKMRRKPESFGTIGRRAADNLRRHHQYQEVMRNLVKRYVAAMIRDAKTEEGLTEENFKELKQDISSFRFEVLGLLRGSKLSTIQSANASKESSNSADSDEKSDSEGNSKDKKKNFSLFDLTTLIHPRSAAIASERHNISNGSALVVQEPPREKQRKVNFVTDIKNFGLFHRRSKQNAAEQNANQIFSVSEEVARQQAAGPLERNIQLESRGLASRGDLSIPGLSEQCVLVDHRERNTDTLGLQVGKRVCPFKSEKVVVEDTVPIIPKEKHAKEEDSSIDYDLNLPDTVTHEDYVTTRL

SEQ ID NO: 6934 - protein, 893 aa, Homo sapiens
MAQFYYKRNVNAPYRDRIPLRIVRAESELSPSEKAYLNAVEKGDYASVKKSLEEAEIYFKININCIDPLGRTALLIAIENENLELIELLLSFNVYVGDALLHAIRKEVVGAVELLLNHKKPSGEKQVPPILLDKQFSEFTPDITPIILAAHTNNYEIIKLLVQKGVSVPRPHEVRCNCVECVSSSDVDSLRHSRSRLNIYKALASPSLIALSSEDPFLTAFQLSWELQELSKVENEFKSEYEELSRQCKQFAKDLLDQTRSSRELEIILNYRDDNSLIEEQSGNDLARLKLAIKYRQKEFVAQPNCQQLLASRWYDEFPGWRRRHWAVKMVTCFIIGLLFPVFSVCYLIAPKSPLGLFIRKPFIKFICHTASYLTFLFLLLLASQHIDRSDLNRQGPPPTIVEWMILPWVLGFIWGEIKQMWDGGLQDYIHDWWNLMDFVMNSLYLATISLKIVAFVKYSALNPRESWDMWHPTLVAEALFAIANIFSSLRLISLFTANSHLGPLQISLGRMLLDILKFLFIYCLVLLAFANGLNQLYFYYEETKGLTCKGIRCEKQNNAFSTLFETLQSLFWSIFGLINLYVTNVKAQHEFTEFVGATMFGTYNVISLVVLLNMLIAMMNNSYQLIADHADIEWKFARTKLWMSYFEEGGTLPTPFNVIPSPKSLWYLIKWIWTHLCKKKMRRKPESFGTIGRRAADNLRRHHQYQEVMRNLVKRYVAAMIRDAKTEEGLTEENFKELKQDISSFRFEVLGLLRGSKLSTIQSANASKESSNSADSDEKSDSEEEVARQQAAGPLERNIQLESRGLASRGDLSIPGLSEQCVLVDHRERNTDTLGLQVGKRVCPFKSEKVVVEDTVPIIPKEKHAKEEDSSIDYDLNLPDTVTHEDYVTTRL

SEQ ID NO: 6935 - protein, 836 aa, Homo sapiens
MAQFYYKRNVNAPYRDRIPLRIVRAESELSPSEKAYLNAVEKGDYASVKKSLEEAEIYFKININCIDPLGRTALLIAIENENLELIELLLSFNVYVGDALLHAIRKEVVGAVELLLNHKKPSGEKQVPPILLDKQFSEFTPDITPIILAAHTNNYEIIKLLVQKGVSVPRPHEVRCNCVECVSSSDVDSLRHSRSRLNIYKALASPSLIALSSEDPFLTAFQLSWELQELSKVENEFKSEYEELSRQCKQFAKDLLDQTRSSRELEIILNYRDDNSLIEEQSGNDLARLKLAIKYRQKEFVAQPNCQQLLASRWYDEFPGWRRRHWAVKMVTCFIIGLLFPVFSVCYLIAPKSPLGLFIRKPFIKFICHTASYLTFLFLLLLASQHIDRSDLNRQGPPPTIVEWMILPWVLGFIWGEIKQMWDGGLQDYIHDWWNLMDFVMNSLYLATISLKIVAFVKYSALNPRESWDMWHPTLVAEALFAIANIFSSLRLISLFTANSHLGPLQISLGRMLLDILKFLFIYCLVLLAFANGLNQLYFYYEETKGLTCKGIRCEKQNNAFSTLFETLQSLFWSIFGLINLYVTNVKAQHEFTEFVGATMFGTYNVISLVVLLNMLIAMMNNSYQLIADHADIEWKFARTKLWMSYFEEGGTLPTPFNVIPSPKSLWYLIKWIWTHLCKKKMRRKPESFGTIGRRAADNLRRHHQYQEVMRNLVKRYVAAMIRDAKTEEVARQQAAGPLERNIQLESRGLASRGDLSIPGLSEQCVLVDHRERNTDTLGLQVGKRVCPFKSEKVVVEDTVPIIPKEKHAKEEDSSIDYDLNLPDTVTHEDYVTTRL

SEQ ID NO: 6936 - protein, 977 aa, Homo sapiens
MAQFYYKRNVNAPYRDRIPLRIVRAESELSPSEKAYLNAVEKGDYASVKKSLEEAEIYFKININCIDPLGRTALLIAIENENLELIELLLSFNVYVGDALLHAIRKEVVGAVELLLNHKKPSGEKQVPPILLDKQFSEFTPDITPIILAAHTNNYEIIKLLVQKGVSVPRPHEVRCNCVECVSSSDVDSLRHSRSRLNIYKALASPSLIALSSEDPFLTAFQLSWELQELSKVENEFKSEYEELSRQCKQFAKDLLDQTRSSRELEIILNYRDDNSLIEEQSGNDLARLKLAIKYRQKEFVAQPNCQQLLASRWYDEFPGWRRRHWAVKMVTCFIIGLLFPVFSVCYLIAPKSPLGLFIRKPFIKFICHTASYLTFLFLLLLASQHIDRSDLNRQGPPPTIVEWMILPWVLGFIWGEIKQMWDGGLQDYIHDWWNLMDFVMNSLYLATISLKIVAFVKYSALNPRESWDMWHPTLVAEALFAIANIFSSLRLISLFTANSHLGPLQISLGRMLLDILKFLFIYCLVLLAFANGLNQLYFYYEETKGLTCKGIRCEKQNNAFSTLFETLQSLFWSIFGLINLYVTNVKAQHEFTEFVGATMFGTYNVISLVVLLNMLIAMMNNSYQLIADHADIEWKFARTKLWMSYFEEGGTLPTPFNVIPSPKSLWYLIKWIWTHLCKKKMRRKPESFGTIGRRAADNLRRHHQYQEVMRNLVKRYVAAMIRDAKTEEGLTEENFKELKQDISSFRFEVLGLLRGSKLSTIQSANASKESSNSADSDEKSDSEGNSKDKKKNFSLFDLTTLIHPRSAAIASERHNISNGSALVVQEPPREKQRKVNFVTDIKNFGLFHRRSKQNAAEQNANQIFSVSEEVARQQAAGPLERNIQLESRGLASRGDLSIPGLSEQCVLVDHRERNTDTLGLQVGKRVCPFKSEKVVVEDTVPIIPKEKHAKEEDSSIDYDLNLPDTVTHEDYVTTRL

SEQ ID NO: 6937 - protein, 1240 aa, Homo sapiens
MWPSQLLIFMMLLAPIIHAFSRAPIPMAVVRRELSCESYPIELRCPGTDVIMIESANYGRTDDKICDSDPAQMENIRCYLPDAYKIMSQRCNNRTQCAVVAGPDVFPDPCPGTYKYLEVQYECVPYKVEQKVFLCPGLLKGVYQSEHLFESDHQSGAWCKDPLQASDKIYYMPWTPYRTDTLTEYSSKDDFIAGRPTTTYKLPHRVDGTGFVVYDGALFFNKERTRNIVKFDLRTRIKSGEAIIANANYHDTSPYRWGGKSDIDLAVDENGLWVIYATEQNNGKIVISQLNPYTLRIEGTWDTAYDKRSASNAFMICGILYVVKSVYEDDDNEATGNKIDYIYNTDQSKDSLVDVPFPNSYQYIAAVDYNPRDNLLYVWNNYHVVKYSLDFGPLDSRSGQAHHGQVSYISPPIHLDSELERPSVKDISTTGPLGMGSTTTSTTLRTTTLSPGRSTTPSVSGRRNRSTSTPSPAVEVLDDMTTHLPSASSQIPALEESCEAVEAREIMWFKTRQGQIAKQPCPAGTIGVSTYLCLAPDGIWDPQGPDLSNCSSPWVNHITQKLKSGETAANIARELAEQTRNHLNAGDITYSVRAMDQLVGLLDVQLRNLTPGGKDSAARSLNKLQKRERSCRAYVQAMVETVNNLLQPQALNAWRDLTTSDQLRAATMLLHTVEESAFVLADNLLKTDIVRENTDNIKLEVARLSTEGNLEDLKFPENMGHGSTIQLSANTLKQNGRNGEIRVAFVLYNNLGPYLSTENASMKLGTEALSTNHSVIVNSPVITAAINKEFSNKVYLADPVVFTVKHIKQSEENFNPNCSFWSYSKRTMTGYWSTQGCRLLTTNKTHTTCSCNHLTNFAVLMAHVEVKHSDAVHDLLLDVITWVGILLSLVCLLICIFTFCFFRGLQSDRNTIHKNLCISLFVAELLFLIGINRTDQPIACAVFAALLHFFFLAAFTWMFLEGVQLYIMLVEVFESEHSRRKYFYLVGYGMPALIVAVSAAVDYRSYGTDKVCWLRLDTYFIWSFIGPATLIIMLNVIFLGIALYKMFHHTAILKPESGCLDNINYEDNRPFIKSWVIGAIALLCLLGLTWAFGLMYINESTVIMAYLFTIFNSLQGMFIFIFHCVLQKKVRKEYGKCLRTHCCSGKSTESSIGSGKTSGSRTPGRYSTGSQSRIRRMWNDTVRKQSESSFITGDINSSASLNREPYRETSMGVKLNIAYQIGASEQCQGYKCHGYSTTEW

SEQ ID NO: 6938 - protein, 872 aa, Homo sapiens
AEQTRNHLNAGDITYSVRAMDQLVGLLDVQLRNLTPGGKDSAARSLNKAMVETVNNLLQPQALNAWRDLTTSDQLRAATMLLHTVEESAFVLADNLLKTDIVRENTDNIKLEVARLSTEGNLEDLKFPENMGHGSTIQLSANTLKQNGRNGEIRVAFVLYNNLGPYLSTENASMKLGTEALSTNHSVIVNSPVITAAINKEFSNKVYLADPVVFTVKHIKQSEENFNPNCSFWSYSKRTMTGYWSTQGCRLLTTNKTHTTCSCNHLTNFAVLMAHVEVKHSDAVHDLLLDVITWVGILLSLVCLLICIFTFCFFRGLQSDRNTIHKNLCISLFVAELLFLIGINRTDQPIACAVFAALLHFFFLAAFTWMFLEGVQLYIMLVEVFESEHSRRKYFYLVGYGMPALIVAVSAAVDYRSYGTDKVCWLRLDTYFIWSFIGPATLIIMLNVIFLGIALYKMFHHTAILKPESGCLDNIKSWVIGAIALLCLLGLTWAFGLMYINESTVIMAYLFTIFNSLQGMFIFIFHCVLQKKVRKEYGKCLRTHCCSGKSTESSIGSGKTSGSRTPGRYSTGSQSRIRRMWNDTVRKQSESSFITGDINSSASLNREGLLNNARDTSVMDTLPLNGNHGNSYSIASGEYLSNCVQIIDRGYNHNETALEKKILKELTSNYIPSYLNNHERSSEQNRNLMNKLVNNLGSGREDDAIVLDDATSFNHEESLGLELIHEESDAPLLPPRVYSTENHQPHHYTRRRIPQDHSESFFPLLTNEHTEDLQSPHRDSLYTSMPTLAGVAATESVTTSTQTEPPPAKCGDAEDVYYKSMPNLGSRNHVHQLHTYYQLGRGSSDGFIVPPNKDGTPPEGSSKGPAHLVTSL

SEQ ID NO: 6939 - protein, 941 aa, Homo sapiens
MTVHSSVHSNNLNSMPAAEKGKDTLKSAYDDTENDLKGAAIHISKGMLHEEKPGEQILEGGSESESAQKAAGNQMNDRKIQQESLGSAPLMGDDHPNASRDSVEGDALVNGAKLHTLSVEHQREELKEELVLKTQNQPRFSSPDEIDLPRELEDEVPILGRNLPWQQERDVAATASKQMSEKIRLSEGEAKEDSLDEEFFHHKAMQGTEVGQTDQTDSTGGPAFLSKVEEDDYPSEELLEDENAINAKRSKEKNPGNQGRQFDVNLQVPDRAVLGTIHPDPEIEESKQETSMILDSEKTSETAAKGVNTGGREPNTMVEKERPLADKKAQRPFERSDFSDSIKIQTPELGEVFQNKDSDYLKNDNPEEHLKTSGLAGEPEGELSKEDHENTEKYMGTESQGSAAAEPEDDSFHWTPHTSVEPGHSDKREDLLIISSFFKEQQSLQRFQKYFNVHELEALLQEMSSKLKSAQQESLPYNMEKVLDKVFRASESQILSIAEKMLDTRVAENRDLGMNENNIFEEAAVLDDIQDLIYFVRYKRSTAEETATLVMAPPLEEGLGGAMEEMQPLHEDNFSREKTAELNVQVPEEPTHLDQRVIGDTHASEVSQKPNTEKDLDPGPVTTEDTPMDAIDANKQPETAAEEPASVTPLENAILLIYSFMFYLTKSLVATLPDDVQPGPDFYGLPWKPVFITAFLGIASFAIFLWRTVLVVKDRVYQVTEQQISEKLKTIMKENTELVQKLSNYEQKIKESKKHVQETRKQNMILSDEAIKYKDKIKTLEKNQEILDDTAKNLRVMLESEREQNVKNQDLLQQEIEDWSKLHAELSEQIKSFEKSQKDLEVALTHKDDNINALTNCITQLNLLECESESEGQNKGGNDSDELANGEVGGDRNEKMKNQIKQMMDVSRTQTAISVVEEDLKLLQLKLRASVSTKCNLEDQV

SEQ ID NO: 6940 - protein, 1907 aa, Homo sapiens
MAAAPGLLVWLLVLRLPWRVPGQLDPSTGRRFSEHKLCADDECSMLMYRGEALEDFTGPDCRFVNFKKGDPVYVYYKLARGWPEVWAGSVGRTFGYFPKDLIQVVHEYTKEELQVPTDETDFVCFDGGRDDFHNYNVEELLGFLELYNSAATDSEKAVEKTLQDMEKNPELSKEREPEPEPVEANSEESDSVFSENTEDLQEQFTTQKHHSHANSQANHAQGEQASFESFEEMLQDKLKVPESENNKTSNSSQVSNEQDKIDAYKLLKKEMTLDLKTKFGSTADALVSDDETTRLVTSLEDDFDEELDTEYYAVGKEDEENQEDFDELPLLTFTDGEDMKTPAKSGVEKYPTDKEQNSNEEDKVQLTVPPGIKNDDKNILTTWGDTIFSIVTGGEETRDTMDLESSSSEEEKEDDDDALVPDSKQGKPQSATDYSDPDNVDDGLFIVDIPKTNNDKEVNAEHHIKGKGRGVQESKRGLVQDKTELEDENQEGMTVHSSVHSNNLNSMPAAEKGKDTLKSAYDDTENDLKGAAIHISKGMLHEEKPGEQILEGGSESESAQKAAGNQMNDRKIQQESLGSAPLMGDDHPNASRDSVEGDALVNGAKLHTLSVEHQREELKEELVLKTQNQPRFSSPDEIDLPRELEDEVPILGRNLPWQQERDVAATASKQMSEKIRLSEGEAKEDSLDEEFFHHKAMQGTEVGQTDQTDSTGGPAFLSKVEEDDYPSEELLEDENAINAKRSKEKNPGNQGRQFDVNLQVPDRAVLGTIHPDPEIEESKQETSMILDSEKTSETAAKGVNTGGREPNTMVEKERPLADKKAQRPFERSDFSDSIKIQTPELGEVFQNKDSDYLKNDNPEEHLKTSGLAGEPEGELSKEDHENTEKYMGTESQGSAAAEPEDDSFHWTPHTSVEPGHSDKREDLLIISSFFKEQQSLQRFQKYFNVHELEALLQEMSSKLKSAQQESLPYNMEKVLDKVFRASESQILSIAEKMLDTRVAENRDLGMNENNIFEEAAVLDDIQDLIYFVRYKHSTAEETATLVMAPPLEEGLGGAMEEMQPLHEDNFSREKTAELNVQVPEEPTHLDQRVIGDTHASEVSQKPNTEKDLDPGPVTTEDTPMDAIDANKQPETAAEEPASVTPLENAILLIYSFMFYLTKSLVATLPDDVQPGPDFYGLPWKPVFITAFLGIASFAIFLWRTVLVVKDRVYQVTEQQISEKLKTIMKENTELVQKLSNYEQKIKESKKHVQETRKQNMILSDEAIKYKDKIKTLEKNQEILDDTAKNLRVMLESEREQNVKNQDLISENKKSIEKLKDVISMNASEFSEVQIALNEAKLSEEKVKSECHRVQEENARLKKKKEQLQQEIEDWSKLHAELSEQIKSFEKSQKDLEVALTHKDDNINALTNCITQLNLLECESESEGQNKGGNDSDELANGEVGGDRNEKMKNQIKQMMDVSRTQTAISVVEEDLKLLQLKLRASVSTKCNLEDQVKKLEDDRNSLQAAKAGLEDECKTLRQKVEILNELYQQKEMALQKKLSQEEYERQEREHRLSAADEKAVSAAEEVKTYKRRIEEMEDELQKTERSFKNQIATHEKKAHENWLKARAAERAIAEEKREAANLRHKLLELTQKMAMLQEEPVIVKPMPGKPNTQNPPRRGPLSQNGSFGPSPVSGGECSPPLTVEPPVRPLSATLNRRDMPRSEFGSVDGPLPHPRWSAEASGKPSPSDPGSGTATMMNSSSRGSSPTRVLDEGKVNMAPKGPPPFPGVPLMSTPMGGPVPPPIRYGPPPQLCGPFGPRPLPPPFGPGMRPPLGLREFAPGVPPGRRDLPLHPRGFLPGHAPFRPLGSLGPREYFIPGTRLPPPTHGPQEYPPPPAVRDLLPSGSRDEPPPASQSTSQDCSQALKQSP

SEQ ID NO: 6941 - protein, 1907 aa, Homo sapiens
MAAAPGLLVWLLVLRLPWRVPGQLDPSTGRRFSEHKLCADDECSMLMYRGEALEDFTGPDCRFVNFKKGDPVYVYYKLARGWPEVWAGSVGRTFGYFPKDLIQVVHEYTKEELQVPTDETDFVCFDGGRDDFHNYNVEELLGFLELYNSAATDSEKAVEKTLQDMEKNPELSKEREPEPEPVEANSEESDSVFSENTEDLQEQFTTQKHHSHANSQANHAQGEQASFESFEEMLQDKLKVPESENNKTSNSSQVSNEQDKIDAYKLLKKEMTLDLKTKFGSTADALVSDDETTRLVTSLEDDFDEELDTEYYAVGKEDEENQEDFDELPLLTFTDGEDMKTPAKSGVEKYPTDKEQNSNEEDKVQLTVPPGIKNDDKNILTTWGDTIFSIVTGGEETRDTMDLESSSSEEEKEDDDDALVPDSKQGKPQSATDYSDPDNVDDGLFIVDIPKTNNDKEVNAEHHIKGKGRGVQESKRGLVQDKTELEDENQEGMTVHSSVHSNNLNSMPAAEKGKDTLKSAYDDTENDLKGAAIHISKGMLHEEKPGEQILEGGSESESAQKAAGNQMNDRKIQQESLGSAPLMGDDHPNASRDSVEGDALVNGAKLHTLSVEHQREELKEELVLKTQNQPRFSSPDEIDLPRELEDEVPILGRNLPWQQERDVAATASKQMSEKIRLSEGEAKEDSLDEEFFHHKAMQGTEVGQTDQTDSTGGPAFLSKVEEDDYPSEELLEDENAINAKRSKEKNPGNQGRQFDVNLQVPDRAVLGTIHPDPEIEESKQETSMILDSEKTSETAAKGVNTGGREPNTMVEKERPLADKKAQRPFERSDFSDSIKIQTPELGEVFQNKDSDYLKNDNPEEHLKTSGLAGEPEGELSKEDHENTEKYMGTESQGSAAAEPEDDSFHWTPHTSVEPGHSDKREDLLIISSFFKEQQSLQRFQKYFNVHELEALLQEMSSKLKSAQQESLPYNMEKVLDKVFRASESQILSIAEKMLDTRVAENRDLGMNENNIFEEAAVLDDIQDLIYFVRYKHSTAEETATLVMAPPLEEGLGGAMEEMQPLHEDNFSREKTAELNVQVPEEPTHLDQRVIGDTHASEVSQKPNTEKDLDPGPVTTEDTPMDAIDANQQPETAAEEPASVTPLENAILLIYSFMFYLTKSLVATLPDDVQPGPDFYGLPWKPVFITAFLGIASFAIFLWRTVLVVKDRVYQVTEQQISEKLKTIMKENTELVQKLSNYEQKIKESKKHVQETRKQNMILSDEAIKYKDKIKTLEKNQEILDDTAKNLRVMLESEREQNVKNQDLISENKKSIEKLKDVISMNASEFSEVQIALNEAKLSEEKVKSECHRVQEENARLKKKKEQLQQEIEDWSKLHAELSEQIKSFEKSQKDLEVALTHKDDNINALTNCITQLNLLECESESEGQNKGGNDSDELANGEVGGDRNEKMKNQIKQMMDVSRTQTAISVVEEDLKLLQLKLRASVSTKCNLEDQVKKLEDDRNSLQAAKAGLEDECKTLRQKVEILNELYQQKEMALQKKLSQEEYERQEREHRLSAADEKAVSAAEEVKTYKRRIEEMEDELQKTERSFKNQIATHEKKAHENWLKARAAERAIAEEKREAANLRHKLLELTQKMAMLQEEPVIVKPMPGKPNTQNPPRRGPLSQNGSFGPSPVSGGECSPPLTVEPPVRPLSATLNRRDMPRSEFGSVDGPLPHPRWSAEASGKPSPSDPGSGTATMMNSSSRGSSPTRVLDEGKVNMAPKGPPPFPGVPLMSTPMGGPVPPPIRYGPPPQLCGPFGPRPLPPPFGPGMRPPLGLREFAPGVPPGRRDLPLHPRGFLPGHAPFRPLGSLGPREYFIPGTRLPPPTHGPQEYPPPPAVRDLLPSGSRDEPPPASQSTSQDCSQALKQSP

SEQ ID NO: 6942 - protein, 1419 aa, Homo sapiens
YLVTLPARLNFPSVQKVCLDLSPGYSDVKFTVTLETKDKTQKLLEYSGLKKRHLHCISFLVPPPAGGTEEVATIRVSGVGNNISFEEKKKVLIQRQGNGTFVQTDKPLYTPGQQVYFRIVTMDSNFVPVNDKVSTSCSFSIGQDPNSNRIAQWLEVVPEQGIVDLSFQLAPEAMLGTYTVAVAEGKTFGTFSVEEYVLPKFKVEVVEPKELSTVQESFLVKICCRYTYGKPMLGAVQVSVCQKANTYWYREVEREQLPDKCRNLSGQTDKTGCFSAPVDMATFDLIGYAYSHQINIVATVVEEGTGVEANATQNIYISPQMGSMTFEDTSNFYHPNFPFSGKIRVRGHDDSFLKNHLVFLVIYGTNGTFNQTLVTDNNGLAPFTLETSGWNGTDVSLEGKFQMEDLVYNPEQVPRYYQNAYLHLRPFYSTTRSFLGIHRLNGPLKCGQPQEVLVDYYIDPADASPDQEISFSYYVRPGNGDGLVMEGQKHLNSKKKGLKASFSLSLTFTSRLAPDPSLVIYAIFPSGGVVADKIQFSVEMCFDNQVSLGFSPSQQLPGAEVELQLQAAPGSLCALRAVDESVLLLRPDRELSNRSVSNCLLTEFTINSKRMFCFNSLMVEFLGSSPCSWGRDHLNTYFSDAYQDVGLKILSNAKIKKPVDCSHRSPEYSTAMGVFVFSISSAGGGHPEAFESSTPLHQAEDSQVRQYFPETWLWDLFPIGNSGKEAVHVTVPDAITEWKAMSFCTSQSRGFGLSPTVGLTAFKPFFVDLTLPYSVVRGESFRLTATIFNYLKDCIRVQTDLAKSHEYQLESWADSQTSSCLCADDAKTHHWNITAVKLALVCSSEGSPGGTARGLPSLSFSAIPPDVHLCCFYLCLSSSQPEGVLVEKTHSSLLCPKGKVASESVSLELPVDIVPDSTKAYVTVLGDIMGTALQNLDGLVQMPSGCGEQNMVLFAPIIYVLQYLEKAGLLTEEIRSRAVGFLEIGYQKELMYKHSNGSYSAFGERDGNGNTWLTAFVTKCFGQAQKFIFIDPKNIQDALKWMAGNQLPSGCYANVGNLLHTAMKGGVDDEVSLTAYVTAALLEMGKDVDDPMVSQGLRCLKNSATSTTNLYTQALLAYIFSLAGEMDIRNILLKQLDQQAIISGESIYWSQKPTPSSNASPWSEPAAVDVELTAYALLAQLTKPSLTQKEIAKATSIVAWLAKQHNAYGGFSSTQDTVVALQALAKYATTAYMPSEEINLVVKSTENFQRTFNIQSVNRLVFQQDTLPNVPGMYTLEASGQGCVYVQTVLRYNILPPTNMKTFSLSVEIGKARCEQPTSPRSLTLTIHTSYVGSRSSSNMAIVEVKMLSGFSPMEGTNQLVRSFIPHCIQCNFHFTSKVLFHLSSPQLIKNTQTYTFTISQSVLVTNLKPATIKVYDYY

SEQ ID NO: 6943 - protein, 278 aa, Homo sapiens [sequence omitted]

SEQ ID NO: 6944 - protein, 348 aa, Homo sapiens
MAATLGPLGSWQQWRRCLSARDGSRMLLLLLLLGSGQGPQQVGAGQTFEYLKREHSLSKPYQGVGTGSSSLWNLMGNAMVMTQYIRLTPDMQSKQGALWNRVPCFLRDWELQVHFKIHGQGKKNLHGDGLAIWYTKDRMQPGPVFGNMDKFVGLGVFVDTYPNEEKQQERVFPYISAMVNNGSLSYDHERDGRPTELGGCTAIVRNLHYDTFLVIRYVKRHLTIMMDIDGKHEWRDCIEVPGVRLPRGYYFGTSSITGDLSDNHDVISLKLFELTVERTPEEEKLHRDVFLPSVDNMKLPEMTAPLPPLSGLALFLIVFFSLVFSVFAIVIGIILYNKWQEQSRKRFY

SEQ ID NO: 6945 - protein, 180 aa, Homo sapiens
MLCLLLTLGVALVCGVPAMDIPQTKQDLELPKLAGTWHSMAMATNNISLMATLKAPLRVHITSLLPTPEDNLEIVLHRWENNSCVEKKVLGEKTENPKKFKINYTVANEATLLDTDYDNFLFLCLQDTTTPIQSMMCQYLARVLVEDDEIMQGFIRAFRPLPRHLWYLLDLKQMEEPCRF

SEQ ID NO: 6946 - protein, 481 aa, Homo sapiens
  VARIANT 189, 205, 244, 449: Xaa = Any Amino Acid
MWGRVHVKGCPQIQATHSLGLLSRFHGSASTDSELEAKESGITQELIKSLYPQQTRLCAWCWTCIILVGTNVLHRLPLHLASGHAFHLWLSCSNPATLPRVGEKKLVKPVLKLMLQVAFFLLGFLAKVKGKKATQDKAPIFVTAPRSTFFDSIPCVVAGLPSVVSASQNVQIPLAGKFLLSTQLVLVIXEDSHSRKNTKDEILKXVTFGKKWPQILIFLEGVCINRSRLVTFKPGAFCPGVPVXPVLLRYPNTLDMAIWTWQGFTALQACMLTLSQLFTRVEVEFMPVYIPNDEEKKDPILFANTAHINMANALGVPGTGHTYEGCRVMISAGNLQLPVEAGLVEFTNISQKLKLDRDNIHQHLDEYAAIAVASKGGKTGIEEFSSYLKLPISEPLRQPPAHFGRNNDGNIDFREYVIGLKKSLQMSFKLFDLDADGLITEQEFAAILXAAFGHPAYPNLFNSHLDLQAAYIYSLPQKVQF

SEQ ID NO: 6947 - protein, 538 aa, Homo sapiens
MEESVNQMQPLNEKQIANSQDGYVWQVTDMNRLHRFLCFGSEGGTYYIKEQKLGLENAEALIRLIEDGRGCEVIQEIKSFSQEGRTTKQEPMLFALAICSQCSDISTKQAAFKAVSEVCRIPTHLFTFIQFKKDLKESMKCGMWGRALRKAIADWYNEKGGMALALAVTKYKQRNGWSHKDLLRLSHLKPSSEGLAIVTKYITKGWKEVHELYKEKALSVETEKLLKYLEAVEKVKRTKDELEVIHLIEEHRLVREHLLTNHLKSKEVWKALLQEMPLTALLRNLGKMTANSVLEPGNSEVSLVCEKLCNEKLLKKARIHPFHILIALETYKTGHGLRGKLKWRPDEEILKALDAAFYKTFKTVEPTGKRFLLAVDVSASMNQRVLGSILNASTVAAAMCMVVTRTEKDSYVVAFSDEMVPCPVTTDMTLQQVLMAMSQIPAGGTDCSLPMIWAQKTNTPADVFIVFTDNETFAGGVHPAIALREYRKKMDIPAKLIVCGMTSNGFTIADPDDRGMLDMCGFDTGALDVIRNFTLDMI

SEQ ID NO: 6948 - protein, 538 aa, Homo sapiens
MEESVNQMQPLNEKQIANSQDGYVWQVTDMNRLHRFLCFGSEGGTYYIKEQKLGLENAEALIRLIEDGRGCEVIQEIKSFSQEGRTTKQEPMLFALAICSQCSDISTKQAAFKAVSEVCRIPTHLFTFIQFKKDLKESMKCGMWGRALRKAIADWYNEKGGMALALAVTKYKQRNGWSHKDLLRLSHLKPSSEGLAIVTKYITKGWKEVHELYKEKALSVETEKLLKYLEAVEKVKRTRDELEVIHLIEEHRLVREHLLTNHLKSKEVWKALLQEMPLTALLRNLGKMTANSVLEPGNSEVSLVCEKLCNEKLLKKARIHPFHILIALETYKTGHGLRGKLKWRPDEEILKALDAAFYKTFKTVEPTGKRFLLAVDVSASMNQRVLGSILNASTVAAAMCMVVTRTEKDSYVVAFSDEMVPCPVTTDMTLQQVLMAMSQIPAGGTDCSLPMIWAQKTNTPADVFIVFTDNETFAGGVHPAIALREYRKKMDIPAKLIVCGMTSNGFTIADPDDRGMLDMCGFDTGALDVIRNFTLDMI

SEQ ID NO: 6949 - protein, 817 aa, Homo sapiens
MMDGPRSDVGRWGGNPLQPPTTPSPEPEPEPDGRSRRGGGRSFWARCCGCCSCRNAADDDWGPEPSDSRGRGSSSGTRRPGSRGSDSRRPVSRGSGVNAAGDGTIRGGMLVVNGVDLLSSRSDQNRREHHTDEYEYDELIVRRGQPFHMLLLLSRTYESSDRITLELLIGNNPEVGKGTHVIIPVGKGGSGGWKAQVVKASGQNLNLRVHTSPNAIIGKFQFTVRTQSDAGEFQLPFDPRNEIYILFNPWCPGDIVYVDHEDWRQEYVLNESGRIYYGTEAQIGERTWNYGQVDHGVLDACLYILDRRGMPYGGRGDPVNVSRVISAMVNSLDDNGVLIGNWSGDYSRGTNPSAWVGSVEILLSYLRTGYSVPYGQCWVFAGVTTTGLRCLGLATRTVTNFNSAHDTDTSLTMDIYFDENMKPLEHLNHDSVWNFHVWNDCWMKRPDLPSGFDGWQVVDATPQETSSGIFCCGPCSVESIKNGLVYMKYDTPFIFAEVNSDKVYWQRQDDGSFKIVYVEEKAIGTLIVTKAISSNMREDITYLYKHPEGSDAERKAVETAAAHGSKPNVYANRGSAEDVAMQVEAQDAVMGQDLMVSVMLINHSSSRRTVKLHLYLSVTFYTGVSGTIFKETKKEVELAPGAWDRVTMPVAYKEYRPHLVDQGAMLLNVSGHVKESGQVLAKQHTFRLRTPDLSLTVLGAAVVGQECEVQIVFKNPLPVTLTNVVFRLEGSGLQRPKILNVGDIGGNETVTLRQSFVPVRPGPRQLIASLDSPQLSQVHGVIQVDVAPAPGDGGFFSDAGGDSHLGETIPMASRGGA

SEQ ID NO: 6950 - protein, 189 aa, Homo sapiens
MKEKLNGDTEEGFNRLSDEFSKSHKSRRKDLPNGDIDEYEKKSKRVSSLDTSTHKSSDNKLEETLTREQKEGAFSNFPISEETIKLLKGRGVTYLFPIQVKTFGPVYEGKDLIAQARTGTGKTFSFAIPLIERLQRNQETIKKSRSPKVLVLAPTRELANQVAKDFKDITRSPCSINASISSITSYTCF

SEQ ID NO: 6951 - protein, 986 aa, Homo sapiens
MSQWTPEYKELYTLKVDMKSEIPSDAPKTQESLKGILLHPEPIGAAKSFPAGVEMINSKVGNEFSHLCDDSQKQEKEMNGNQQEQEKSLVVRKKRKSQQAGPSYVQNCVKENQGILGLRQHLGTPSDEDNDSSFSDCLSSPSSSLHFGDSDTVTSDEDKEVSVRHSQTILNAKSRSHSARSHKWPRTETESVSGLLMKRPCLHGSSLRRLPCRKRFVKNNSSQRTQKQKERILMQRKKREVLARRKYALLPSSSSSSENDLSSESSSSSSTEGEEDLFVSASENHQNNPAVPSGSIDEDVVVIEASSTPQVTANEEINVTSTDSEVEIVTVGESYRSRSTLGHSRSHWSQGSSSHASRPQEPRNRSRISTVIQPLRQNAAEVVDLTVDEDEPTVVPTTSARMESQATSASINNSNPSTSEQASDTASAVTSSQPSTVSETSATLTSNSTTGTSIGDDSRRTTSSAVTETGPPEMPRLPSCCPQHSPCGGSSQNHHALGHPHTSCFQQHGHHFQHHHHHHHTPHPAVPVSPSFSDPACPVERPPQVQAPCGANSSSGTSYHEQQALPVDLSNSGIRSHGSGSFHGASAFDPCCPVSSSRAAIFGHQAAAAAPSQPLSSIDGYGSSMVAQPQPQPPPQPSLSSCRHYMPPPYASLTRPLHHQASACPHSHGNPPPQTQPPPQVDYVIPHPVHAFHSQISSHATSHPVAPPPPTHLASTAAPIPQHLPPTHQPISHHIPATAPPAQRLHPHEVMQRMEVQRRRMMQHPTRAHERPPPHPHRMHPNYGHGHHIHVPQTMSSHPRQAPERSAWGLGIEAGVTAATYTPGALHPHLAHYHAPPRLHHLQLGALPLMVPDMAGYPHIRYISSGLDGTSFRGPFRGNFEELIHLEERLGNVNRGASQGTIERCTYPHKYKKRKLHCKQDGGEGTEEDTEEKCTICLSILEEGEDVRRLPCMHLFHQVCVDQWLITNKKCPICRVDIEAQLPSES

SEQ ID NO: 6952 - protein, 365 aa, Homo sapiens
SAARWEFGFGWLQPASRVKTPTPGAAGSTHGDPRGAAAAPGNWSSRQRPAHPRTPGPAASVFSRSVQRLTMRNTSKELQGATHRYAPCDWYYHVPVKRSEKAVDAPPASQIPGLSNLGDSHSENLPGTRRYWIKETDSEYVKLAKQGGRPDLLKHFAPGTRKGSPVAYSLPDWYIHHSKPPTASQQEVRAVSMLDYMVHEEFNPDQANGSYASRRGPFDFDTKTVWQREAEELEKEKKKLRLPAIDSKYLSKAGTPLGPKNPAGSRLSFPHVPGQKNSSPTNFSKLISNGYKDEWLQQQQRADSDKRTPKTSRASVLSQSPRDLEGPQDAARLQDAEASEGPEDTPESSQSPEESVSASTPAELK

SEQ ID NO: 6953 - protein, 813 aa, Homo sapiens
DPETPSDAAAMESGPRAELGAGAPPAVVARTPPEPRPSPEGDPSPPPPPMSALVPDTPPDTPPAMKNATSSKQLPLEPESPSGQVGPRPAPPQEESPSSEAKSRGPTPPAMGPRDARPPRRSSQPSPTAVPASDSPPTKQEVKKAGERHKLAKERREERAKYLAAKKAVWLEKEEKAKALREKQLQERRRRLEEQRLKAEQRRAALEERQRQKLEKNKERYEAAIQRSVKKTWAEIRQQRWSWAGALHHSSPGHKTNRSLQLSAWESSIVDRLMTPTLSFLARSRSAVTLPRNGRDQGRGCDPGRGPTWGRAGASLARGPQPDRTHPSAAVPVCPRSASASPLTPCSVTRSVHRCAPAGERGERRKPNAGGSPAPVRRRPEASPVQKKEKKDKERENEKEKSALARERSLKKRQSLPASPRARLSASTASELSPKSKARPSSPSTSWHRPASPCPSPGPGHTLPPKPPSPRGTTASPKGRVRRKEEAKESPSAAGPEDKSQSKRRASNEKESAAPASPAPSPAPSPTPAPPQKEQPPAETPTDAAVLTSPPAPAPPVTPSKPMAGTTDREEATRLLAEKRRQAREQREREEQERRLQAERDKRMREEQLAREAEARAEREAEARRREEQEAREKAQAEQEEQERLQKQKEEAEARSREEAERQRLEREKHFQQQEQERQERRKRLEEIMKRTRKSEVSETKKQDSKEANANGSSPEPVKAVEARSPGLQKEAVQKEEPIPQEPQWSLPSKELPASLVNGLQPLPAHQENGFSTNGPSGDKSLSRTPETLLPFAEAEAFLKKAVVQSPQVTEVL

SEQ ID NO: 6954 - protein, 1581 aa, Homo sapiens
MKAQGETEESEKLSKMSSLLERLHAKFNQNRPWSETIKLVRQVMEKRVVMSSGGHQHLVSCLETLQKALKVTSLPAMTDRLESIARQNGLGSHLSASGTECYITSDMFYVEVQLDPAGQLCDVKVAHHGENPVSCPELVQQLREKNFDEFSKHLKGLVNLYNLPGDNKLKTKMYLALQSLEQDLSKMAIMYWKATNAGPLDKILHGSVGYLTPRSGGHLMNLKYYVSPSDLLDDKTASPIILHENNVSRSLGMNASVTIEGTSAVYKLPIAPLIMGSHPVDNKWTPSFSSITSANSVDLPACFFLKFPQPIPVSRAFVQKLQNCTGIPLFETQPTYAPLYELITQFELSKDPDPIPLNHNMRFYAALPGQQHCYFLNKDAPLPDGRSLQGTLVSKITFQHPGRVPLILNLIRHQVAYNTLIGSCVKRTILKEDSPGLLQFEVCPLSESRFSVSFQHPVNDSLVCVVMDVQDSTHVSCKLYKGLSDALICTDDFIAKVVQRCMSIPVTMRAIRRKAETIQADTPALSLIAETVEDMVKKNLPPASSPGYGMTTGNNPMSGTTTSTNTFPGGPIATLFNMSMSIKDRHESVGHGEDFSKVSQNPILTSLLQITGNGGSTIGSSPTPPHHTPPPVSSMAGNTKNHPMLMNLLKDNPAQDFSTLYGSSPLERQNSSSGSPRMEICSGSNKTKKKKSSRLPPEKPKHQTEDDFQRELFSMDVDSQNPIFDVNMTADTLDTPHITPAPSQCSTPPTTYPQPVPHPQPSIQRMVRLSSSDSIGPDVTDILSDIAEEASKLPSTSDDCPAIGTPLRDSSSSGHSQSTLFDSDVFQTNNNENPYTDPADLIADAAGSPSSDSPTNHFFHDGVDFNPDLLNSQSQSGFGEEYFDESSQSGDNDDFKGFASQALNTLGVPMLGGDNGETKFKGNNQADTVDFSIISVAGKALAPADLMEHHSGSQGPLLTTGDLGKEKTQKRVKEGNGTSNSTLSGPGLDSKPGKRSRTPSNDGKSKDKPPKRKKADTEGKSPSHSSSNRPFTPPTSTGGSKSPGSAGRSQTPPGVATPPIPKITIQIPKGTVMVGKPSSHSQYTSSGSVSSSGSKSHHSHSSSSSSSASTSGKMKSSKSEGSSSSKLSSSMYSSQGSSGSSQSKNSSQSGGKPGSSPITKHGLSSGSSSTKMKPQGKPSSLMNPSLSKPNISPSHSRPPGGSDKLASPMKPVPGTPPSSKAKSPISSGSGGSHMSGTSSSSGMKSSSGLGSSGSLSQKTPPSSNSCTASSSSFSSSGSSMSSSQNQHGSSKGKSPSRNKKPSLTAVIDKLKHGVVTSGPGGEDPLDGQMGVSTNSSSHPMSSKHNMSGGEFQGKREKSDKDKSKVSTSGSSVDSSKKTSESKNVGSTGVAKIIISKHDGGSPSIKAKVTLQKPGESSGEGLRPQMASSKNYGSPLISGSTPKHERGSPSHSKSPAYTPQNLDSESESGSSIAEKSYQNSPSSDDGIRPLPEYSTEKHKKHKKEKKKVKDKDRDRDRDKDRDKKKSHSIKPESWSKSPISSDQSLSMTSNTILSADRPSRLSPDFMIGEEDDDLMDVALIGN

SEQ ID NO: 6955 - protein, 111 aa, Homo sapiens
MVRTKADSVPGTYRKVVAARAPRKVLGSSTSATNSTSVSSRKAENKYAGGNPVCVRPTPKWQKGIGEFFRLSPKDSEKENQIPEEAGSSGLGKAKRKACPLQPDHTNDEKE

SEQ ID NO: 6956 - protein, 2098 aa, Homo sapiens
MATDDKTSPTLDSANDLPRSPTSPSHLTHFKPLTPDQDEPPFKSAYSSFVNLFRFNKERAEGGQGEQQPLSGSWTSPQLPSRTQSVRSPTPYKKQLNEELQRRSSALDTRRKAEPTFGGHDPRTAVQLRSLSTVLKRLKEIMEGKSQDSDLKQYWMPDSQCKECYDCSEKFTTFRRRHHCRLCGQIFCSRCCNQEIPGKFMGYTGDLRACTYCRKIALSYAHSTDSNSIGEDLNALSDSACSVSVLDPSEPRTPVGSRKASRNIFLEDDLAWQSLIHPDSSNTPLSTRLVSVQEDAGKSPARNRSASITNLSLDRSGSPMVPSYETSVSPQANRTYVRTETTEDERKILLDSVQLKDLWKKICHHSSGMEFQDHRYWLRTHPNCIVGKELVNWLIRNGHIATRAQAIAIGQAMVDGRWLDCVSHHDQLFRDEYALYRPLQSTEFSETPSPDSDSVNSVEGHSEPSWFKDIKFDDSDTEQIAEEGDDNLANSASPSKRTSVSSFQSTVDSDSAASISLNVELDNVNFHIKKPSKYPHVPPHPADQKEYLISDTGGQQLSISDAFIKESLFNRRVEEKSKELPFTPLGWHHNNLELLREENGEKQAMERLLSANHNHMMALLQQLLHSDSLSSSWRDIIVSLVCQVVQTVRPDVKNQDDDMDIRQFVHIKKIPGGKKFDSVVVNGFVCTKNIAHKKMNSCIKNPKILLLKCSIEYLYREETKFTCIDPIVLQEREFLKNYVQRIVDVRPTLVLVEKTVSRIAQDMLLEHGITLVINVKSQVLERISRMTQGDLVMSMDQLLTKPHLGTCHKFYMQIFQLPNEQTKTLMFFEGCPQHLGCTIKLRGGSDYELARVKEILIFMICVAYHSQLEISFLMDEFAMPPTLMQNPSFHSLIEGRGHEGAVQEQYGGGSIPWDPDIPPESLPCDDSSLLESRIVFEKGEQENKNLPQAVASVKHQEHSTTACPAGLPCAFFAPVPESLLPLPVDDQQDALGSELPESLQQTVVLQDPKSQIRAFRDPLQDDTGLYVTEEVTSSEDKRKTYSLAFKQELKDVILCISPVITFREPFLLTEKGMRCSTRDYFAEQVYWSPLLNKEFKEMENRRKKQLLRDLSGLQGMNGSIQAKSIQVLPSHELVSTRIAEHLGDSQSLGRMLADYRARGGRIQPKNSDPFAHSKDASSTSSGKSGSKNEGDEERGLILSDAVWSTKVDCLNPINHQRLCVLFSSSSAQSSNAPSACVSPWIVTMEFYGKNDLTLGIFLERYCFRPSYQCPSMFCDTPMVHHIRRFVHGQGCVQIILKELDSPVPGYQHTILTYSWCRICKQVTPVVALSNESWSMSFAKYLELRFYGHQYTRRANAEPCGHSIHHDYHQYFSYNQMVASFSYSPIRLLEVCVPLPKIFIKRQAPLKVSLLQDLKDFFQKVSQVYVAIDERLASLKTDTFSKTREEKMEDIFAQKEMEEGEFKNWIEKMQARLMSSSVDTPQQLQSVFESLIAKKQSLCEVLQAWNNRLQDLFQQEKGRKRPSVPPSPGRLRQGEESKISAMDASPRNISPGLQNGEKEDRFLTTLSSQSSTSSTHLQLPTPPEVMSEQSVGGPPELDTASSSEDVFDGHLLGSTDSQVKEKSTMKAIFANLLPGNSYNPIPFPFDPDKHYLMYEHERVPIAVCEKEPSSIIAFALSCKEYRNALEELSKATQWNSAEEGLPTNSTSDSRPKSSSPIRLPEMSGGQTNRTTETEPQPTKKASGMLSFFRGTAGKSPDLSSQKRETLRGADSAYYQVGQTGKEGTENQGVEPQDEVDGGDTQKKQLINPHVELQFSDANAKFYCRLYYAGEFHKMREVILDSSEEDFIRSLSHSSPWQARGGKSGAAFYATEDDRFILKQMPRLEVQSFLDFAPHYFNYITNAVQQKRPTALAKILGVYRIGYKNSQNNTEKKLDLLVMENLFYGRKMAQVFDLKGSLRNRNVKTDTGKESCDVVLLDENLLKMVRDNPLYIRSHSKAVLRTSIHSDSHFLSSHLIIDYSLLVGRDDTSNELVVGIIDYIRTFTWDKKLEMVVKSTGILGGQGKMPTVVSPELYRTRFCEAMDKYFLMVPDHWTGLGLNC

SEQ ID NO: 6957 - protein, 1613 aa, Homo sapiens
MSKIDIFMEILKTEIGKMMENIWVSMKGGKSRYDTCVRINYRWWSLGGYYEGFEYKLTDVEYLISDTGGQQLSISDAFIKESLFNRRVEEKSKELPFTPLGWHHNNLELLREENGEKQAMERLLSANHNHMMALLQQLLHSDSLSSSWRDIIVSLVCQVVQTVRPDVKNQDDDMDIRQFVHIKKIPGGKKFDSVVVNGFVCTKNIAHKKMSSCIKNPKILLLKCSIEYLYREETKFTCIDPIVLQEREFLKNYVQRIVDVRPTLVLVEKTVSRIAQDMLLEHGITLVINVKSQVLERISRMTQGDLVMSMDQLLTKPHLGTCHKFYMQIFQLPNEQTKTLMFFEGCPQHLGCTIKLRGGSDYELARVKEILIFMICVAYHSQLEISFLMDEFAMPPTLMQNPSFHSLIEGRGHEGAVQEQYGGGSIPWDPDIPPESLPCDDSSLLELRIVFEKGEQENKNLPQAVASVKHQEHSTTACPAGLPCAFFAPVPESLLPLPVDDQQDALGSEQPETLQQTVVLQDPKSQIRAFRDPLQDDTGLYVTEEVTSSEDKRKTYSLAFKQELKDVILCISPVITFREPFLLTEKGMRCSTRDYFAEQVYWSPLLNKEFKEMENRRKKQLLRDLSGLQGMNGSIQAKSIQVLPSHELVSTRIAEHLGDSQSLGRMLADYRARGGRIQPKNSDPFAHSKDASSTSSGQSGSKNEGDEERGLILSDAVWSTKVDCLNPINHQRLCVLFSSSSAQSSNAPSACVSPWIVTMEFYGKNDLTLGIFLERYCFRPSYQCPSMFCDTPMVHHIRRFVHGQGCVQIILKELDSPVPGYQHTILTYSWCRICKQVTPVVALSNESWSMSFAKYLELRFYGHQYTRRANAEPCGHSIHHDYHQYFSYNQMVASFSYSPIRLLEVCVPLPKIFIKRQAPLKVSLLQDLKDFFQKVSQVYVAIDERLASLKTDTFSKTREEKMEDIFAQKEMEEGEFKNWIEKMQARLMSSSVDTPQQLQSVFESLIAKKQSLCEVLQAWNNRLQDLFQQEKGRKRPSVPPSPGRLRQGEESKISAMDASPRNISPGLQNGEKEDRFLTTLSSQSSTSSTHLQLPTPPEVMSEQSVGGPPELDTASSSEDVFDGHLLGSTDSQVKEKSTMKAIFANLLPGNSYNPIPFPFDPDKHYLMYEHERVPIAVCEKEPSSIIAFALSCKEYRNALEELSKATQWNSAEEGLPTNSTSDSRPKSSSPIRLPEMSGGQTNRTTETEPQPTKKASGMLSFFRGTAGKSPDLSSQKRETLRGADSAYYQVGQTGKEGTENQGVEPQDEVDGGDTQKKQLINPHVELQFSDANAKFYCRLYYAGEFHKMREVILDSSEEDFIRSLSHSSPWQARGGKSGAAFYATEDDRFILKQMPRLEVQSFLDFAPHYFNYITNAVQQKRPTALAKILGVYRIGYKNSQNNTEKKLDLLVMENLFYGRKMAQVFDLKGSLRNRNVKTDTGKESCDVVLLDENLLKMVRDNPLYIRSHSKAVLRTSIHSDSHFLSSHLIIDYSLLVGRDDTSNELVVGIIDYIRTFTWDKKLEMVVKSTGILGGQGKMPTVVSPELYRTRFCEAMDKYFLMVPDHWTGLGLNC

SEQ ID NO: 6958 - protein, 419 aa, Homo sapiens
MPAENSPAPAYKVSSHGGDSGLDGLGGPGVQLGSPDKKKRKANTQGPSFPPLSEYAPPPNPNSDHLVAANPFDDNYNTISYKPLPSSNPYLGPGYPGFGGYSTFRMPPHVPPRMSSPYCGPYSLRNQPHPFPQNPLGMGFNRPHAFNFGPHDNSSFGNPSYNNALSQNVNMPNQHFRQNPAENFSQIPPQNASQVSNPDLASNFVPGNNSNFTSPLESNHSFIPPPNTFGQAKAPPPKQDFTQGATKNTNQNSSAHPPHLNMDDTVNQSNIELKNVNRNNAVNQENSRSSSTEATNNNPANGTQNKPRQPRGAADACTTEKSNKSSLHPNRHGHSSSDPVYPCGICTNEVNDDQDAILCEASCQKWFHRICTGMTETAYGLLTAEASAVWGCDTCMADKDVQLMRTRETFGPSAVGSDA

SEQ ID NO: 6959 - protein, 207 aa, Homo sapiens
MAKTYDYLFKLLLIGDSGVGKTCLLFRFSEDAFNTTFISTIGIDFKIRTIELDGKKIKLQIWDTAGQERFRTITTAYYRGAMGIMLVYDITNEKSFDNIKNWIRNIEEHASSDVERMILGNKCDMNDKRQVSKERGEKLAIDYGIKFLETSAKSSANVEEAFFTLARDIMTKLNRKMNDSNSAGAGGPVKITENRSKKTSFFRCSLL

SEQ ID NO: 6960 - protein, 145 aa, Homo sapiens
MAVSTGVKVPRNFRLLEELEEGQKGVGDGTVSWGLEDDEDMTLTRWTGMIIGPPRTNYENRIYSLKVECGPKYPEAPPSVRFVTKINMNGINNSSGMVDARSIPVLAKWQNSYSIKVVLQELRRLMMSKENMKLPQPPEGQTYNN

SEQ ID NO: 6961 - protein, 319 aa, Homo sapiens
MASDDFDIVIEAMLEAPYKKEEDEQQRKEVKKDYPSNTTSSTSNSGNETSGSSTIGETSKKKRSRSHNKSRDRKRSRSRDRDRYRRRNSRSRSPGRQCRHRSRSWDRRHGSESRSRDHRREDRVHYRSPPLATGYRYGHSKSPHFREKSPVREPVDNLSPEERDARTVFCMQLAARIRPRDLEDFFSAVGKVRDVRIISDRNSRRSKGIAYVEFCEIQSVPLAIGLTGQRLLGVPIIVQASQAEKNRLAAMANNLQKGNGGPMRLYVGSLHFNITEDMLRGIFEPFGKIDNIVLMKDSDTGRSKGYGFITLHPPPLGTV

SEQ ID NO: 6962 - protein, 439 aa, Homo sapiens
MASDDFDIVIEAMLEAPYKKEEDEQQRKEVKKDYPSNTTSSTSNSGNETSGSSTIGETSKKKRSRSHNKSRDRKRSRSRDRDRYRRRNSRSRSPGRQCRHRSRSWDRRHGSESRSRDHRREDRVHYRSPPLATGYRYGHSKSPHFREKSPVREPVDNLSPEERDARTVFCMQLAARIRPRDLEDFFSAVGKVRDVRIISDRNSRRSKGIAYVEFCEIQSVPLAIGLTGQRLLGVPIIVQASQAEKNRLAAMANNLQKGNGGPMRLYVGSLHFNITEDMLRGIFEPFGKIDNIVLMKDSDTGRSKGYGFITFSDSECARRALEQLNGFELAGRPMRVGHVTERLDGGTDITFPDGDQELDLGSAGGRFQLMAKLAEGAGIQLPSTAAAAAAAAAQAAALQLNGAVPLGALNPAALTALSPALNLASQCFQLSSLFTPQTM

SEQ ID NO: 6963 - protein, 336 aa, Homo sapiens
MVTAFRSLPRGSSGAAASMSAHNRGTELDLSWISKIQVNHPAVLRRAEQIQARRTVKKEWQAAWLLKAVTFIDLTTLSGDDTSSNIQRLCYKAKYPIREDLLKALNMHDKGITTAAVCVYPARVCDAVKALKAAGCNIPVASVAAGFPAGQTHLKTRLEEIRLAVEDGATEIDVVINRSLVLTGQWEALYDEIRQFRKACGEAHLKTILATGELGTLTNVYKASMIAMMAGSDFIKTSTGKETVNATFPVAIVMLRAIRDFFWKTGNKIGFKPAGGIRSAKDSLAWLSLVKEELGDEWLKPELFRIGASTLLSDIERQIYHHVTGRYAAYHDLPMS

SEQ ID NO: 6964 - protein, 230 aa, Homo sapiens
MCGNNMSTPLPAIVPAARKATAAVIFLHGLGDTGHGWAEAFAGIRSSHIKYICPHAPVRPVTLNMNVAMPSWFDIIGLSPDSQEDESGIKQAAENIKALIDQEVKNGIPSNRIILGGFSQGGALSLYTALTTQQKLAGVTALSCWLPLRASFPQGPIGGANRDISILQCHGDCDPLVPLMFGSLTVEKLKTLVNPANVTFKTYEGMMHSSCQQEMMDVKQFIDKLLPPID

SEQ ID NO: 6965 - protein, 61 aa, Homo sapiens
MDPNCSCAASDSCTCAGSCKCKECKCTSCKKSCCSCCPVGCAKCAQGCICKGASDKCSCCA

SEQ ID NO: 6966 - protein, 756 aa, Homo sapiens
MHLKIVLAFLALSLITIFALAYVLLTSPGGSSQPPHCPSVSHRAQPWPHPGQSQLFADLSREELTAVMRFLTQRLGPGLVDAAQAQPSDNCIFSVELQLPPKAAALAHLDRGSPPPAREALAIVLFGGQPQPNVSELVVGPLPHPSYMRDVTVERHGGPLPYHRRPVLRAEFTQMWRHLKDVELPKAPIFLSSTFNYNGSTLAAVHATPRGLRSRERTTWMALYHNISGVGLFLHPVGLELLLDHRALDPAHWTVQQVFYLGHYYADLGQLEREFKSGRLEVVRVPLPPPNGASSLRSRNSPGPLPPLQFSPQGSQYSVQGNLVVSSLWSFTFGHGVFSGLRIFDVRFQGERIAYEVSVQECVSIYGADSPKTMLTRYLDSSFGLGRNSRGLVRGVDCPYQATMVDIHILVGKGAVQLLPGAVCVFEEAQGLPLRRHHNYLQNHFYGGLASSALVVRSVSSVGNYDYIWDFVLYPNGALEGRVHATGYINTAFLKGGEEGLLFGNRVGERVLGTVHTHAFHFKLDLDVAGLKNWVVAEDVVFKPVAAPWNPEHWLQRPQLTRQVLGKEDLTAFSLGSPLPRYLYLASNQTNAWGHQRGYRIQIHSPLGIQIPLESDMERALSWGRYQLVVTQRKEEESQSSSIYHQNDIWTPTVTFADFINNETLLGEDLVAWVTASFLHIPHAEDIPNTVTLGNRVGFLLRPYNFFDEDPSIFSPGSVYFEKGQDAGLCSINPVACLPDLAACVPDLPPFSYHGF

SEQ ID NO: 6967 - protein, 729 aa, Homo sapiens [sequence omitted]

SEQ ID NO: 6968 - protein, 335 aa, Homo sapiens
MGHPPLLPLLLLLHTCVPASWGLRCMQCKTNGDCRVEECALGQDLCRTTIVRLWEEGEELELVEKSCTHSEKTNRTLSYRTGLKITSLTEVVCGLDLCNQGNSGRAVTYSRSRYLECISCGSSDMSCERGRHQSLQCRSPEEQCLDVVTHWIQEGEEGRPKDDRHLRGCGYLPGCPGSNGFHNNDTFHFLKCCNTTKCNEGPILELENLPQNGRQCYSCKGNSTHGCSSEETFLIDCRGPMNQCLVATGTHEPKNQSYMVRGCATASMCQHAHLGDAFSMNHIDVSCCTKSGCNHPDLDVQYRSGAAPQPGPAHLSLTITLLMTARLWGGTLLWT

SEQ ID NO: 6969 - protein, 290 aa, Homo sapiens [sequence omitted]

SEQ ID NO: 6970 - protein, 803 aa, Homo sapiens
DIRIRVAIPLDYETVDRYDFDLFANESVPDHVGYAKVKITLINENDNRPIFSQPLYNISLYENVTVGTSVLTVLATDNDAGTFGEVNYFFSDDPDRFSLDKDTGLIMLIARLDYELIQRFTLTIIARDGGGEETTGRVRINVLDVNDNVPTFQKDAYVGALRENEPSVTQLVRLRATDEDSPPNNQITYSIVSASAFGSYFDISLYEGYGVISVSRPLDYEQISNGLIYLTVMAMDAGNPPLNSTVPVTIEVFDENDNPPTFSKPAYFVSVVENIMAGATVLFLNATDLDRSREYGQESIIYSLEGSTQFRINARSGEITTTSLLDRETKSEYILIVRAVDGGVGHNQKTGIATVNITLLDINDNHPTWKDAPYYINLVEMTPPDSDVTTVVAVDPDLGENGTLVYSIQPPNKFYSLNSTTGKIRTTHAMLDRENPDPHEAELMRKIVVSVTDCGRPPLKATSSATVFVNLLDLNDNDPTFQNLPFVAEVLEGIPAGVSIYQVVAIDLDEGLNGLVSYRMPVGMPRMDFLINSSSGVVVTTTELDRERIAEYQLRVVASDAGTPTKSSTSTLTIHVLDVNDETPTFFPAVYNVSVSEDVPREFRVVWLNCTDNDVGLNAELSYFITGGNVDGKFSVGYRDAVVRTVVGLDRETTAAYMLILEAIDNGPVGKRHTGTATVFVTVLDVNDNRPIFLQSSYEASVPEDIPEGHSILQEEDLASPCISPAPPRRAFQSSGEKETSQFPGKELRREPGPSKAQNRAAFTEPLAEAPLLGSKQAQEERAPLPREQAQQLQGSEGEKGGP

SEQ ID NO: 6971 - protein, 818 aa, Homo sapiens
DIRIRVAIPLDYETVDRYDFDLFANESVPDHVGYAKVKITLINENDNRPIFSQPLYNISLYENVTVGTSVLTVLATDNDAGTFGEVSYFFSDDPDRFSLDKDTGLIMLIARLDYELIQRFTLTIIARDGGGEETTGRVRINVLDVNDNVPTFQKDAYVGALRENEPSVTQLVRLRATDEDSPPNNQITYSIVSASAFGSYFDISLYEGYGVISVSRPLDYEQISNGLIYLTVMAMDAGNPPLNSTVPVTIEVFDENDNPPTFSKPAYFVSVVENIMAGATVLFLNATDLDRSREYGQESIIYSLEGSTQFRINARSGEITTTSLLDRETKSEYILIVRAVDGGVGHNQKTGIATVNITLLDINDNHPTWKDAPYYINLVEMTPPDSDVTTVVAVDPDLGENGTLVYSIQPPNKFYSLNSTTGKIRTTHAMLDRENPDPHEAELMRKIVVSVTDCGRPPLKATSSATVFVNLLDLNDNDPTFQNLPFVAEVLEGIPAGVSIYQVVAIDLDEGLNGLVSYRMPVGMPRMDFLINSSSGVVVTTTELDRERIAEYQLRVVASDAGTPTKSSTSTLTIHVLDVNDETPTFFPAVYNVSVSEDVPREFRVVWLNCTDNDVGLNAELSYFITGGNVDGKFSVGYRDAVVRTVVGLDRETTAAYMLILEAIDNGPVGKRHTGTATVFVTVLDVNDNRPIFLQSSYEASVPEDIPEGHSILQAGCRAEDRALAPHKQEEDLASPCISPAPPRRAFQSSGEKETSQFPGKELRREPGPSKAQNRAAFTEPLAEAPLLGSKQAQEERAPLPREQAQQLQGSEGEKGGP

SEQ ID NO: 6972 - protein, 537 aa, Homo sapiens
DYELIQRFTLTIIARDGGGEETTGRVRINVLDVNDNVPTFQKDAYVGALRENEPSVTQLVRLRATDEDSPPNNQITYSIVSASAFGSYFDISLYEGYGVISVSRPLDYEQISNGLIYLTVMAMDAGNPPLNSTVPVTIEVFDENDNPPTFSKPAYFVSVVENIMAGATVLFLNATDLDRSREYGQESIIYSLEGSTQFRINARSGEITTTSLLDRETKSEYILIVRAVDGGVGHNQKTGIATVNITLLDINDNHPTWKDAPYYINLVEMTPPDSDVTTVVAVDPDLGENGTLVYSIQPPNKFYSLNSTTGKIRTTHAMLDRENPDPHEAELMRKIVVSVTDCGRPPLKATSSATVFVNLLDLNDNDPTFQNLPFVAEVLEGIPAGVSIYQVVAIDLDEGLNGLVSYRMPVGMPRMDFLINSSSGVVVTTTELDRERIAEYQLRVVASDAGTPTKSSTSTLTIHGLAPAPVLPRSAGCERRDAHLLPGRVQCVCVRGRATRVPGGLAELHGQRRGPQCRAQLLHHRWQRGWEVQRGLP

SEQ ID NO: 6973 - protein, 373 aa, Homo sapiens
TVLFLNATDLDRSREYGQESIIYSLEGSTQFRINARSGEITTTSLLDRETKSEYILIVRAVDGGVGHNQKTGIATVNITLLDINDNHPTWKDAPYYINLVEMTPPDSDVTTVVAVDPDLGENGTLVYSIQPPNKFYSLNSTTGKIRTTHAMLDRENPDPHEAELMRKIVVSVTDCGRPPLKATSSATVFVNLLDLNDNDPTFQNLPFVAEVLEGIPAGVSIYQVVAIDLDEGLNGLVSYRMPVGMPRMDFLINSSSGVVVTTTELDRERIAEYQLRVVASDAGTPTKSSTSTLTIHVLDVNDETPTFFPAVYNVSVSEDVPREFRVVWLNCTDNDVGLNAELSYFITGAAPASTHLCRPPGALPPPLPDGQPD

SEQ ID NO: 6974 - protein, 794 aa, Homo sapiens
MRVRIGLTLLLCAVLLSLASASSDEEGSQDESLDSKTTLTSDESVKDHTTAGRVVAGQIFLDSEESELESSIQEEEDSLKSQEGESVTEDISFLESPNPENKDYEEPKKVRKPALTAIEGTAHGEPCHFPFLFLDKEYDECTSDGREDGRLWCATTYDYKADEKWGFCETEEEAAKRRQMQEAEMMYQTGMKILNGSNKKSQKREAYRYLQKAASMNHTKALERVSYALLFGDYLPQNIQAAREMFEKLTEEGSPKGQTALGFLYASGLGVNSSQAKALVYYTFGALGGNLIAHMVLGYRYWAGIGVLQSCESALTHYRLVANHVASDISLTGGSVVQRIRLPDEVENPGMNSGMLEEDLIQYYQFLAEKGDVQAQVGLGQLHLHGGRGVEQNHQRAFDYFNLAANAGNSHAMAFLGKMYSEGSDIVPQSNETALHYFKKAADMGNPVGQSGLGMAYLYGRGVQVNYDLALKYFQKAAEQGWVDGQLQLGSMYYNGIGVKRDYKQALKYFNLASQGGHILAFYNLAQMHASGTGVMRSCHTAVELFKNVCERGRWSERLMTAYNSYKDGDYNAAVIQYLLLAEQGYEVAQSNAAFILDQREASIVGENETYPRALLHWNRAASQGYTVARIKLGDYHFYGFGTDVDYETAFIHYRLASEQQHSAQAMFNLGYMHEKGLGIKQDIHLAKRFYDMAAEASPDAQVPVFLALCKLGVVYFLQYIRETNIRDMFTQLDMDQLLGPEWDLYLMTIIALLLGTVIAYRQRQHQDMPAPRPPGPRPAPPQQEGPPEQQPPQ

SEQ ID NO: 6975 - protein, 41 aa, Homo sapiens
MSISLAWCQFLQVDGTSLPLNHLSKLQDIFYPNTSNCAKGH

SEQ ID NO: 6976 - protein, 3241 aa, Homo sapiens
MELVQKEEGGEKQLKVAQFVLKCIDDKDSTEKEGFDIILAGQTVHNVGYRHQSLESGISHSFQLDSQPRLQEDPAGNARSSWHFPAVSLVVCPGTDFACSQADLSKPEHRDHALSRDSRPAAFGRALLSPGLAGAAGVPAEEAIVLANRGLRVPFGREVWLDPLHDLVLQVQPGDRCAVSVLDNDALAQRPGRLSPKRFPCDFGPGEVRYSHLGARSPSRDRVRLQLRYDAPGGAVVLPLVLEVEVVFTQLEVVTRNLPLVVEELLGTSNALDARSLEFAFQPETEECRVGILSGLGALPRYGELLHYPQVPGGAREGGAPETLLMDCKAFQELGVRYRHTAASRSPNRDWIPMVVELRSRGAPVGSPALKREHFQVLVRIRGGAENTAPKPSFVAMMMMEVDQFVLTALTPDMLAAEDAESPSDLLIFNLTSPFQPGQGYLVSTDDRSLPLSSFTQRDLRLLKIAYQPPSEDSDQERLFELELEVVDLEGAASDPFAFMVVVKPMNTMAPVVTRNTGLILYEGQSRPLTGPAGSGPQNLVISDEDDLEAVRLEVVAGLRHGHLVILGASSGSSAPKSFTVAELAAGQVVYQHDDRDGSLSDNLVLRMVDGGGRHQVQFLFPITLVPVDDQPPVLNANTGLTLAEGETVPILPLSLSATDMDSDDSLLLFVLESPFLTTGHLLLRQTHPPHEKQELLRGLWRKEGAFYERTVTEWQQQDITEGRLFYRHSGPHSPGPVTDQFTFRVQDNHDPPNQSGLQRFVIRIHPVDRLPPELGSGCPLRMVVQESQLTPLRKKWLRYTDLDTDDRELRYTVTQSPTDTDENHLPAPLGTLVLTDNPSVVVTHFTQAQINHHKIAYRPPGQELGVATRVAQFQFQVEDRAGNVAPGTFTLYLHPVDNQPPEILNTGFTIQEKGHHILSETELHVNDVDTDVAHISFTLTQAPKHGHMRVSGQILHVGGLFHLEDIKQGRVSYAHNGDKSLTDSCSLEVSDRHHVVPITLRVNVRPVDDEVPILSHPTGTLESYLDVLENGATEITANVIKGTNEETDDLMLTFLLEDPPLYGEILVNGIPAEQFTQRDILEGSVVYTHTSGEIGLLPKADSFNLSLSDMSQEWRIGGNTIQGVTIWVTILPVDSQAPEIFVGEQLIVMEGDKSVITSVHISAEDVDSLNDDILCTIVIQPTSGYVENISPAPGSEKSRAGIAISAFNLKDLRQGHINYVQSVHKGVEPVEDRFVFRCSDGINFSERQFFPIVIIPTNDEQPEMFMREFMVMEGMSLVIDTPILNAADADVPLDDLTFTITQFPTHGHIMNQLINGTVLVESFTLDQIIESSSIIYEHDDSETQEDSFVIKLTDGKHSVEKTVLIIVIPVDDETPRMTINNGLEIEIGDTKIINNKILMATDLDSEDKSLVYIIRYGPGHGLLQRRKPTGAFENITLGMNFTQDEVDRNLIQYVHLGQEGIRDLIKFDVTDGINPLIDRYFYVSIGSIDIVFPDVISKGVSLKEGGKVTLTTDLLSTSDLNSPDENLVFTITRAPMRGHLECTDQPGVSITSFTQLQLAGNKIYYIHTADDEVKMDSFEFQVTDGRNPVFRTFRISISDVDNKKPVVTIHKLVVSESENKLITPFELTVEDRDTPDKLLKFTITQVPIHGHLLFNNTRPVMVFTKQDLNENLISYKHDGTESSEDSFSFTVTDGTHTDFYVFPDTVFETRRPQVMKIQVLAVDNSVPQIAVNKGASTLRTLATGHLGFMITSKILKVEDRDSLHISLRFIVTEAPQHGYLLNLDKGNHSITQFTQADIDDMKICYVLREGANATSDMFYFAVEDGGGNKLTYQNFRLNWAWISFEKEYYLVNEDSKFLDVVLKRRGYLGETSFISIGTRDRTAEKDKDFKGKAQKQVQFNPGQTRATWRVRILSDGEHEQSETFQVVLSEPVLAALEFPTVATVEIVDPGDEPTVFIPQSKYSVEEDVGELFIPIRRSGDVSQELMVVCYTQQGTATGTVPTSVLSYSDYISRPEDHTSVVRFDKDEREKLCRIVIIDDSLYEEEETFHVLLSMPMGGRIGSEFPGAQVTIVPDKDDEPIFYFGDVEYSVDESAGYVEVQVWRTGTDLSKSSSVTVRSRKTDPPSADAGTDYVGISRNLDFAPGVNMQPVRVVILDDLGQPALEGIEKFELVLRMPMNAALGEPSKATVSINDSVSDLPKMQFKERIYTGSESDGQIVTMIHRTGDVQYRSSVRCYTRQGSAQVMMDFEERPNTDTSIITFLPGETEKPCILELMDDVLYEEVEELRLVLGTPQSNSPFGAAVGEQNETLIRIRDDADKTVIKFGETKFSVTEPKEPGESVVIRIPVIRQGDTSKVSIVRVHTKDGSATSGEDYHPVSEEIEFKEGETQHVVEIEVTFDGVREMREAFTVHLKPDENMIAEMQLTKAIVYIEEMSSMADVTFPSVPQIVSLLMYDDTSKAKESAEPMSGYPVICITACNPKYSDYDKTGSICASENINDTLTRYRWLISAPAGPDGVTSPMREVDFDTFFTSSKMVTLDSIYFQPGSRVQCAARAVNTNGDEGLELMSPIVTISREEGLCQPRVPGVVGAEPFSAKLRYTGPEDADYTNLIKLTVTMPHIDGMLPVISTRELSNFELTLSPDGTRVGNHKCSNLLDYTEVKTHYGFLTDATKNPEIIGETYPYQYSLSIRGSTTLRFYRNLNLEACLWEFVSYYDMSELLADCGGTIGTDGQVLNLVQSYVTLRVPLYVSYVFHSPVGVGGWQHFDLKSELRLTFVYDTAILWNDGIGSPPEAELQGSLYPTSMRIGDEGRLAVHFKTEAQFHGLFVLSHPASFTSSVIMSADHPGLTFSLRLIRSEPTYNQPVQQWSFVSDFAVRDYSGTYTVKLVPCTAPSHQEYRLPVTCNPREPVTFDLDIRFQQVSDPVAAEFSLNTQMYLLSKKSLWLSDGSMGFGQESDVAFAEGDIIYGRVMVDPVQNLGDSFYCSIEKVFLCTGADGYVPKYSPMNAEYGCLADSPSLLYRFKIVDKAQPETQATSFGNVLFNAKLAVDDPEAILLVNQPGSDGFKVDSTPLFQVALGREWYIHTIYTVRSKDNANRGIGKRSVEYHSLVSQGKPQSTTKSRKKREIRSTPSLAWEIGAENSRGTNIQHIALDRTKRQIPHGRAPPDGILPWELNSPSSAVSLVTVVGGTTVGLLTICLTVIAVLMCRGKESFRGKDAPKGSSSSEPMVPPQSHHNDSSEV

SEQ ID NO: 6977 - protein, 101 aa, Homo sapiens
MLRLLLALNLFPSIQVTGKHLCPSPLFPGPSKPFWVLVVVGGVLACYSLLVTVAFIIFWVRSKRSRLLHSDYMNMTPRRPGPTRKHYQPYAPPRDFAAYRS

SEQ ID NO: 6978 - protein, 220 aa, Homo sapiens
MLRLLLALNLFPSIQVTGNKILVKQSPMLVAYDNAVNLSCKYSYNLFSREFRASLHKGLDSAVEVCVVYGNYSQQLQVYSKTGFNCDGKLGNESVTFYLQNLYVNQTDIYFCKIEVMYPPPYLDNEKSNGTIIHVKGKHLCPSPLFPGPSKPFWVLVVVGGVLACYSLLVTVAFIIFWVRSKRSRLLHSDYMNMTPRRPGPTRKHYQPYAPPRDFAAYRS

SEQ ID NO: 6979 - protein, 123 aa, Homo sapiens
MLRLLLALNLFPSIQVTGNKILVKQSPMLVAYDNAVNLSWKHLCPSPLFPGPSKPFWVLVVVGGVLACYSLLVTVAFIIFWVRSKRSRLLHSDYMNMTPRRPGPTRKHYQPYAPPRDFAAYRS

SEQ ID NO: 6980 - protein, 136 aa, Homo sapiens
MLRLLLALNLFPSIQVTGNKILVKQSPMLVAYDNAVNLSYNEKSNGTIIHVKGKHLCPSPLFPGPSKPFWVLVVVGGVLACYSLLVTVAFIIFWVRSKRSRLLHSDYMNMTPRRPGPTRKHYQPYAPPRDFAAYRS

SEQ ID NO: 6981 - protein, 393 aa, Homo sapiens
MVSRSLVGILMMANVFIYFIMEVSKSSSQEKNGKGEVIIPKEKFWKISTPPEAYWNREQEKLNRQYNPILSMLTNQTGEAGRLSNISHLNYCEPDLRVTSVVTGFNNLPDRFKDFLLYLRCRNYSLLIDQPDKCAKKPFLLLAIKSLTPHFARRQAIRESWGQESNAGNQTVVRVFLLGQTPPEDNHPDLSDMLKFESEKHQDILMWNYRDTFFNLSLKEVLFLRWVSTSCPDTEFVFKGDDDVFVNTHHILNYLNSLSKTKAKDLFIGDVIHNAGPHRDKKLKYYIPEVVYSGLYPPYAGGGGFLYSGHLALRLYHITDQVHLYPIDDVYTGMCLQKLGLVPEKHKGFRTFDIEEKNKNNICSYVDLMLVHSRKPQEMIDIWSQLQSAHLKC

SEQ ID NO: 6982 - protein, 397 aa, Homo sapiens
MSVGRRRIKLLGILMMANVFIYFIMEVSKSSSQEKNGKGEVIIPKEKFWKISTPPEAYWNREQEKLNRQYNPILSMLTNQTGEAGRLSNISHLNYCEPDLRVTSVVTGFNNLPDRFKDFLLYLRCRNYSLLIDQPDKCAKKPFLLLAIKSLTPHFARRQAIRESWGQESNAGNQTVVRVFLLGQTPPEDNHPDLSDMLKFESEKHQDILMWNYRDTFFNLSLKEVLFLRWVSTSCPDTEFVFKGDDDVFVNTHHILNYLNSLSKTKAKDLFIGDVIHNAGPHRDKKLKYYIPEVVYSGLYPPYAGGGGFLYSGHLALRLYHITDQVHLYPIDDVYTGMCLQKLGLVPEKHKGFRTFDIEEKNKNNICSYVDLMLVHSRKPQEMIDIWSQLQSAHLKC

SEQ ID NO: 6983 - protein, 838 aa, Homo sapiens
MQEQEIGFISKYNEGLCVNTDPVSILTSILDMSLHRQMGSDRDLQSSASSVSLPSVKKAPKKRRISIGSLFRRKKDNKRKSRELNGGVDGIASIESIHSEMCTDKNSIFSTNTSSDNGLTSISKQIGDFIECPLCLLRHSKDRFPDIMTCHHRSCVDCLRQYLRIEISESRVNISCPECTERFNPHDIRLILSDDVLMEKYEEFMLRRWLVADPDCRWCPAPDCGYAVIAFGCASCPKLTCGREGCGTEFCYHCKQIWHPNQTCDAARQERAQSLRLRTIRSSSISYSQESGAAADDIKPCPRCAAYIIKMNDGSCNHMTCAVCGCEFCWLCMKEISDLHYLSPSGCTFWGKKPWSRKKKILWQLGTLVGAPVGIALIAGIAIPAMIIGIPVYVGRKIHNRYEGKDVSKHKRNLAIAGGVTLSVIVSPVVAAVTVGIGVPIMLAYVYGVVPISLCRSGGCGVSAGNGKGVRIEFDDENDINVGGTNTAVDTTSVAEARHNPSIGEGSVGGLTGSLSASGSHMDRIGAIRDNLSETASTMALAGASITGSLSGSAMVNCFNRLEVQADVQKERYSLSGESGTVSLGTVSDNASTKAMAGSILNSYIPLDKEGNSMEVQVDIESKPSKFRHNSGSSSVDDGSATRSYAGGSSSGLPEGKSSATKWSKEATAGKKSKSGKLRKKGNMKINETREDMDAQLLEQQSTNSSEFEAPSLSDSMPSVADSHSSHFSEFSCSDLESMKTSCSHGSSDYHTRFATVNILPEVENDRLENSPHQCSISVVTQTASCSEVSQLNHIAEEHGNNGIKPNVDLYFGDALKETNNNHSHQTMELKVAIQTEI

SEQ ID NO: 6984 - protein, 1359 aa, Homo sapiens
MAEAGLRGWLLWALLLRLAQSEPYTTIHQPGYCAFYDECGKNPELSGSLMTLSNVSCLSNTPARKITGDHLILLQKICPRLYTGPNTQACCSAKQLVSLEASLSITKALLTRCPACSDNFVNLHCHNTCSPNQSLFINVTRVAQLGAGQLPAVVAYEAFYQHSFAEQSYDSCSRVRVPAAATLAVGTMCGVYGSALCNAQRWLNFQGDTGNGLAPLDITFHLLEPGQAVGSGIQPLNEGVARCNESQGDDVATCSCQDCAASCPAIARPQALDSTFYLGQMPGSLVLIIILCSVFAVVTILLVGFRVAPARDKSKMVDPKKGTSLSDKLSFSTHTLLGQFFQGWGTWVASWPLTILVLSVIPVVALAAGLVFTELTTDPVELWSAPNSQARSEKAFHDQHFGPFFRTNQVILTAPNRSSYRYDSLLLGPKNFSGILDLDLLLELLELQERLRHLQVWSPEAQRNISLQDICYAPLNPDNTSLYDCCINSLLQYFQNNRTLLLLTANQTLMGQTSQVDWKDHFLYCANAPLTFKDGTALALSCMADYGAPVFPFLAIGGYKGKDYSEAEALIMTFSLNNYPAGDPRLAQAKLWEEAFLEEMRAFQRRMAGMFQVTFMAERSLEDEINRTTAEDLPIFATSYIVIFLYISLALGSYSSWSRVMVDSKATLGLGGVAVVLGAVMAAMGFFSYLGIRSSLVILQVVPFLVLSVGADNIFIFVLEYQRLPRRPGEPREVHIGRALGRVAPSMLLCSLSEAICFFLGALTPMPAVRTFALTSGLAVILDFLLQMSAFVALLSLDSKRQEASRLDVCCCVKPQELPPPGQGEGLLLGFFQKAYAPFLLHWITRGVVLLLFLALFGVSLYSMCHISVGLDQELALPKDSYLLDYFLFLNRYFEVGAPVYFVTTLGYNFSSEAGMNAICSSAGCNNFSFTQKIQYATEFPEQSYLAIPASSWVDDFIDWLTPSSCCRLYISGPNKDKFCPSTVNSLNCLKNCMSITMGSVRPSVEQFHKYLPWFLNDRPNIKCPKGGLAAYSTSVNLTSDGQVLDTVAILSPRLEYSGTISAHCNLYLLDSASRFMAYHKPLKNSQDYTEALRAARELAANITADLRKVPGTDPAFEVFPYTITNVFYEQYLTILPEGLFMLSLCLVPTFAVSCLLLGLDLRSGLLNLLSIVMILVDTVGFMALWGISYNAVSLINLVSAVGMSVEFVSHITRSFAISTKPTWLERAKEATISMGSAVFAGVAMTNLPGILVLGLAKAQLIQIFFFRLNLLITLLGLLHGLVFLPVILSYVGPDVNPALALEQKRAEEAVAAVMVASCPNHPSRVSTADNIYVNHSFEGSIKGAGAISNFLPNNGRQF

SEQ ID NO: 6985 - protein, 273 aa, Homo sapiens
MTFDDLKIQTVKDQPDEKSNGKKAKGLQFLYSPWWCLAAATLGVLCLGLVVTIMVLGMQLSQVSDLLTQEQANLTHQKKKLEGQISARQQAEEASQESENELKEMIETLARKLNEKSKEQMELHHQNLNLQETLKRVANCSAPCPQDWIWHGENCYLFSSGSFNWEKSQEKCLSLDAKLLKINSTADLDFIQQAISYSSFPFWMGLSRRNPSYPWLWEDGSPLMPHLFRVRGAVSQTYPSGTCAYIQRGAVYAENCILAAFSICQKKANLRAQ

SEQ ID NO: 6986 - protein, 329 aa, Homo sapiens
MMGHQNHTFSSDFILLGLFSSSPTSVVFFLVLFVIFIMSVTENTLMILLIRSDSRLHTPMYFLLSHLSLMDILHVSNIVPKMVTNFLSGSRTISFAGCGFQVFLSLTLLGGECLLLAAMSCDRYVAICHPLRYPILMKEYASALMAGGSWLIGVFNSTVHTAYALQFPFCGSRAIDHFFCEVPAMLKLSCADTTRYERGVCVSAVIFLLIPFSLISASYGQIILTVLQMKSSEARKKSFSTCSFHMIVVTMYYGPFIFTYMRPKSYHTPGQDKFLAIFYTILTPTLNPFIYSFRNKDVLAVMKNMLKSNFLHKKMNRKIPECVFCLFLC

SEQ ID NO: 6987 - protein, 4031 aa, Homo sapiens [sequence omitted]

SEQ ID NO: 6988 - protein, 4024 aa, Homo sapiens
MSSEQDKSASKEKSKKPVRFLPQLSMEKLASKEKFKAPARALPQLSMVSTKPHWQQAAPSFHLSVKQDDESPEPFSVKNEQSHAEYMERFGKKGKLPHQVDDSYVGPSTSKSKGKSPHKERENFRSTLVNVIMQQDADLDSAVPDGSTIPKPTASAIEKDILRYYYYIHHGIDTDHVAPMEDSWLEHVLDLVPQHLKVFTDSIVTLSDEMREDYLLSVRKSIVDFVLKDPREKGDDKKTDELPAHRAEMEILPKPWRKSFLAASSYIRDHLNAMNPTMLAVLDLWHTNFKKLRLVDIKEFHNCQDALELSSFQNIIMRHMDSAKETLLKMWFPEVQNIYYQGNKKKQLPTGDSSAKLESFFNCAAALMTLQLQDLTLVSMQDFTDLIAQPPDSVRAFEHPGFIMRLILDNDTIKFEPELSDYIDIFLNVYDVMIKAVSFVPRVETKLYSKWESKSKPTTLKPIILNEIVDAHKEKIKEVIMKESVAPTEHLRLYDKYDFLITRKAERDVDNFLAENHSYEKIIDEICKYQKLIEEIQYTSIKTIRLGMFEMHCEELIRALVKRADIICGKLLAKMFRDHQEVNTRLCDEFERIAEKALSTPPNTAELMEMKAYIQKVEVTDMIELEQRLVDSKNCLAFLIEYVNFSPADMRLNNSVFQWYGRMGEIFEEHRKIIKEKIEQYQEGLKLRCERFVEELESYAKQSEEFYSFGDLQDVQRYLKKAQILNGKLDLAADKIEQFNAEEEAFGWLPSVYPQRKKIQDGLNPYLRLYETAVEFSSNYRAWTEGPYHKVNPDQVEADIGNYWRGLYKLEKTFHDSPYALAMTKKVRSKVEDFKQHIPLIQVICNPGLRPRHWEAMSAIVGYPLQPSDDSTVSSFLDMNLEPYIDRFEGISEAASKEYSLEKAMEKMITEWDAVEFVIHSYRETGTFILASVDEIQMLLDDHIIKTQTMRGSPFIKPYEKQMREWEGKLLLLQEILDEWLKVQATWLYLEPIFSSPDIMSQMPEEGRRFTAVDKTWRDIMRSVMQDKHVLTVVTIDRMLERLKKSNELLELILKGLNEYLEKKRLFFPRFFFLSNDELLEILSETKDPTRVQPHLKKCFEGIAKVEFTETLDITHMKSSEGEVVELIEIISTAKARGQVEKWLVELERVMINSIHKVTGDATFAYTKYERINWVRDWPGQTVLCVSQIFWTKEVQTAIPMGIKALEQYLKTCNRQIDDIVTLVRGKLSMQNRVTLGALVVLDVHARDVLSSLVKKNISDDSDFEWLSQLRYYWQENHLETKMINAGLRYGYEYLGNSPRLVITPLTDRCYRTLFGALHLHLGGAPEGPAGTGKTETTKDLAKAVAKQCVVFNCSDGLDYLALGKFFKGLLSCGAWACFDEFNRIDLEVLSVVAQQILTIQRGINAGADILMFEGTELKLDPTCAVFITMNPGYAGRSELPDNLKALFRTVAMMVPDYAMIAEIVLYSCGFVTARPLSVKIVATYRLCSEQLSSQHHYDYGMRAVKSVLTAAGNLKLKYPNENEEILLLRSIIDVNLPKFLSHDLPLFEGITSDLFPGVKLPKPDYNDLLAAIKDNCASMNLQMTAFFSEKILQVYEMMIVRHGFMIVGEPFGGKTSAYRVLAGALNDICEKGLMEENKVQITVLNPKSVTMGQLYGQFDSVSHEWSDGVLAVSFRAFASSVTPDRKWLIFDGPVDAVWIENMNTVLDDNKKLCLMSGEIIQMSPQMNLIFEPMDLEVASPATVSRCGMIYMEPHMLGWRPLMLSWVNLLPASVSVIQKEFIMGLFDRMVPVSVEFIRKHTKELSPTSDTNLVRSLMNLIDCFMDDFADEVKLKERNDRETYSLLEGIFLFSLIWSVGASCTDDDRLKFNKILRELMESPISDRTRNTFKLQSGTEQTSSKALTVPFPEKGTIYDYQFVTEGIGKWEPWIKKLKEAPPIPKDVMFNEIIVPTLDTIRYSALMELLTTHQKPSIFVGPTGTGKSVYITNFLLNQLNKEIYKPLLINFSAQTTAAQTQNIVMSKLDKRRKGVFGPPLGKRMVVFVDDVNMPAREVYGAQPPIELLRQWLDHWNWYDLKDCSMIKLVDIQIMCAMGPPGGGRNPVTPRYMRHFNIITINEFSDKSMYTIFSRILTWHLEICYKFPDEFLDLTTQIVNGTMTLYKEAMKNLLPTPAKSHYLFNLRDFSRVIQGVCLSRPETTETTEVIKRLWVHEVLRVYYDRLLDNTDRSWLINYIQEILRNYMYEDFHELFQRLDFDNDGMVEADDLRSLMFCDFHDPKREDTNYREIADVDNLRMIVEIHLEEYNNISKKPMNLVLFRFAIEHISRISRILKQPRSHALLVGVGGSGRQSVTRLAAHMADYSVFQVEISKGYDTTEWHEDLKVILRKCAEGEMQGVFLFTDTQIKEESFLEDVSNLLNAGEIPNLFALDEKQEICDKMRQLDRQRDKTKQTDGSPIALFNMFIDHCRSQLHVVLAMSPIGDAFRNRLRKFPALVNCCTIDWFQSWPEDALQAVASRFLEEIEMSEEIRDGCIDMCKSFHTSTIDLSKSFFVELQRYNYVTPTSYLELISTFKLLLEKKRSEVMKMKKRYEVGLEKLDSASSQVATMQMELEALHPQLKVASKEVDEMMIMIEKESVEVAKTEKIVKADETIANEQAMASKAIKDECDADLAGALPILESALAALDTLTAQDITVVKSMKSPPAGVKLVMEAICILKGIKADKIPDPTGSGKKIEDFWGPAKRLLGDMRFLQSLHEYDKDNIPPAYMNIIRKNYIPNPDFVPEKIRNASTAAEGLCKWVIAMDSYDKVAKIVAPKKIKLAAAEGELKIAMDGLRKKQAALKEVQDKLARLQDTLELNKQKKADLENQVDLCSKKLERAEQLIGGLGGEKTRWSHTALELGQLYINLTGDILISSGVVAYLGAFTSTYRQNQTKEWTTLCKGRDIPCSDDCSLMGTLGEAVTIRTWNIAGLPSDSFSIDNGIIIMNARRWPLMIDPQSQANKWIKNMEKANSLYVIKLSEPDYVRTLENCIQFGTPVLLENVGEELDPILEPLLLKQTFKQGGSTCIRLGDSTIEYAPDFRFYITTKLRNPHYLPETSVKVTLLNFMITPEGMQDQLLGIVVAQERPDLEEEKQALILQGAENKRQLKEIEDKILEVLSSSEGNILEDETAIKILSSSKALANEISQKQEVAEETEKKIDTTRMGYRPIAIHSSILFFSLADLANIEPMYQYSLTWFINLFILSIENSEKSEILAKRLQILKDHFTYSLYVNVCRSLFEKDKLLFSFCLTINLLLHERAINKAEWRFLLTGGIGLDNPYANPCTWLPQKSWDEICRLDDLPAFKTIRREFMRLKDGWKKVYDSLEPHHEVFPEEWEDKANEFQRMLIIRCLRPDKVIPMLQEFIINRLGRAFIEPPPFDLAKAFGDSNCCAPLIFVLSPGADPMAALLKFADDQGYGGSKLSSLSLGQGQGPIAMKMLEKAVKEGTWVVLQNCHLATSWMPTLEKVCEELSPESTHPDFRMWLTSYPSPNFPVSVLQNGVKMTNEAPKGLRANIIRSYLMDPISDPEFFGSCKKPEEFKKLLYGLCFFHALVQERRKFGPLGWNIPYEFNETDLRISVQQLHMFLNQYEELPYEALRYMTGECNYGGRVTDDWDRRTLRSILNKFFNPELVENSDYKFDSSGIYFVPPSGDHKSYIEYTKTLPLTPAPEIFGMNANADITKDQSETQLLFDNILLTQSRSAGAGAKSSDEVVNEVASDILGKLPNNFDIEAAMRRYPTTYTQSMNTVLVQEMGRFNKLLKTIRDSCVNIQKAIKGLAVMSTDLEEVVSSILNVKIPEMWMGKSYPSLKPLGSYVNDFLARLKFLQQWYEVGPPPVFWLSGFFFTQAFLTGAQQNYARKYTIPIDLLGFDYEVMEDKEYKHPPEDGVFIHGLFLDGASWNRKIKKLAESHPKILYDTVPVMWLKPCKRADIPKRPSYVAPLYKTSERRGVLSTTGHSTNFVIAMTLPSDQPKEHWIGRGVALLCQLNS

SEQ ID NO: 6989 - protein, 6669 aa, Homo sapiens
MADDEDYEEVVEYYTEEVVYEEVPGETITKIYETTTTRTSDYEQSETSKPALAQPALAQPASAKPVERRKVIRKKVDPSKFMTPYIAHSQKMQDLFSPNKYKEKFEKTKGQPYASTTDTPELRRIKKVQDQLSEVKYRMDGDVAKTICHVDEKAKDIEHAKKVSQQVSKVLYKQNWEDTKDKYLLPPDAPELVQAVKNTAMFSKKLYTEDWEADKSLFYPYNDSPELRRVAQAQKALSDVAYKKGLAEQQAQFTPLADPPDIEFAKKVTNQVSKQKYKEDYENKIKGKWSETPCFEVANARMNADNISTRKYQEDFENMKDQIYFMQTETPEYKMNKKAGVAASKVKYKEDYEKNKGKADYNVLPASENPQLRQLKAAGDALSDKLYKENYEKTKAKSINYCETPKFKLDTVLQNFSSDKKYKDSYLKDILGHYVGSFEDPYHSHCMKVTAQNSDKNYKAEYEEDRGKGFFPQTITQEYEAIKKLDQCKDHTYKVHPDKTKFTQVTDSPVLLQAQVNSKQLSDLNYKAKHESEKFKCHIPPDTPAFIQHKVNAYNLSDNLYKQDWEKSKAKKFDIKVDAIPLLAAKANTKNTSDVMYKKDYEKNKGKMIGVLSINDDPKMLHSLKVAKNQSDRLYKENYEKTKAKSMNYCETPKYQLDTQLKNFSEARYKDLYVKDVLGHYVGSMEDPYHTHCMKVAAQNSDKSYKAEYEEDKGKCYFPQTITQEYDAIKKLDQCKDHTYKVHPDKTKFTAVTDSPVLLQAQLNTKQLSDLNYKAKHEGERFKCHIPADAPQFIQHRVNAYNLSDNVYKQDWEKSKAKKFDIKVDAIPLLAAKANTKNTSDVMYKKDYEKSKGKMIGALSINDDPKMLHSLKTAKNQSDREYRKDYEKSKTIYTAPLDMLQVTQAKKSQAIASDVDYKHILHSYSYPPDSINVDLAKKAYALQSDVEYKADYNSWMKGCGWVPFGSLEMEKAKRASDILNEKKYRQHPDTLKFTSIEDAPITVQSKINQAQRSDIAYKAKGEEIIHNYNLPPDLPQFIQAKVNAYNISENMYKADLKDLSKKGYDLRTDAIPIRAAKAARQAASDVQYKKDYEKAKGKMVGFQSLQDDPKLVHYMNVAKIQSDREYKKDYEKTKSKYNTPHDMFNVVAAKKAQDVVSNVNYKHSLHHYTYLPDAMDLELSKNMMQIQSDNVYKEDYNNWMKGIGWIPIGSLDVEKVKKAGDALNEKKYRQHPDTLKFTSIVDSPVMVQAKQNTKQVSDILYKAKGEDVKHKYTMSPDLPQFLQAKCNAYSISDVCYKRDWHDLIRKGNNVLGDAIPITAAKASRNIASDYKYKEAYEKSKGKHVGFRSLQDDPKLVHYMNVAKLQSDREYKKNYENTKTSYHTPGDMVTITAAKMAQDVATNVNYKQPLHHYTYLPDAMSLEHTRNVNQIQSDNVYKDEYNSFLKGIGWIPIGSLEVEKVKKAGDALNERKYRQHPDTVKFTSVPDSMGMMLAQHNTKQLSDLNYKVEGEKLKHKYTIDPELPQFIQAKVNALNMSDAHYKADWKKTIRKGYDLRPDAIPIVAAKSSRNIASDCKYKEAYEKAKGKQVGFLSLQDDPKLVHYMNVAKIQSDREYKKGYEASKTKYHTPLDMVSVTAAKKSQEVATNANYRQSYHHYTLLPDALNVEHSRNAMQIQSDNLYKSDFTNWMKGIGWVPIESLEVEKAKKAGEILSEKKYRQHPEKLKFTYAMDTMEQALNKSNKLNMDKRLYTEKWNKDKTTIHVMPDTPDILLSRVNQITMSDKLYKAGWEEEKKKGYDLRPDAIAIKAARASRDIASDYKYKKAYEQAKGKHIGFRSLEDDPKLVHFMQVAKMQSDREYKKGYEKSKTSFHTPVDMLSVVAAKKSQEVATNANYRNVIHTYNMLPDAMSFELAKNMMQIQSDNQYKADYADFMKGIGWLPLGSLEAEKNKKAMEIISEKKYRQHPDTLKYSTLMDSMNMVLAQNNAKIMNEHLYKQAWEADKTKVHIMPDIPQIILAKANAINISDKLYKLSLEESKKKGYDLRPDAIPIKAAKASRDIASDYKYKYNYEKGKGKMVGFRSLEDDPKLVHSMQVAKMQSDREYKKNYENTKTSYHTPADMLSVTAAKDAQANITNTNYKHLIHKYILLPDAMNIELTRNMNRIQSDNEYKQDYNEWYKGLGWSPAGSLEVEKAKKATEYASDQKYRQHPSNFQFKKLTDSMDMVLAKQNAHTMNKHLYTIDWNKDKTKIHVMPDTPDILQAKQNQTLYSQKLYKLGWEEALKKGYDLPVDAISVQLAKASRDIASDYKYKQGYRKQLGHHVGFRSLQDDPKLVLSMNVAKMQSEREYKKDFEKWKTKFSSPVDMLGVVLAKKCQELVSDVDYKNYLHQWTCLPDQNDVVQAKKVYELQSENLYKSDLEWLRGIGWSPLGSLEAEKNKRASEIISEKKYRQPPDRNKFTSIPDAMDIVLAKTNAKNRSDRLYREAWDKDKTQIHIMPDTPDIVLAKANLINTSDKLYRMGYEELKRKGYDLPVDAIPIKAAKASREIASEYKYKEGFRKQLGHHIGARNIEDDPKMMWSMHVAKIQSDREYKKDFEKWKTKFSSPVDMLGVVLAYKCQTLVSDVDYKNYLHQWTCLPDQSDVIHARQAYDLQSDNLYKSDLQWLKGIGWMTSGSLEDEKNKRATQILSDHVYRQHPDQFKFSSLMDSIPMVLAKNNAITMNHRLYTEAWDKDKTTVHIMPDTPEVLLAKQNKVNYSEKLYKLGLEEAKRKGYDMRVDAIPIKAAKASRDIASEFKYKEGYRKQLGHHIGARAIRDDPKMMWSMHVAKIQSDREYKKDFEKWKTKFSSPVDMLGVVLAKKCQTLVSDVDYKNYLHQWTCLPDQSDVIHARQAYDLQSDNMYKSDLQWMRGIGWVSIGSLDVEKCKRATEILSDKIYRQPPDRFKFTSVTDSLEQVLAKNNALNMNKRLYTEAWDKDKTQIHIMPDTPEIMLARQNKINYSETLYKLANEEAKKKGYDLRSDAIPIVAAKASRDVISDYKYKDGYRKQLGHHIGARNIEDDPKMMWSMHVAKIQSDREYKKDFEKWKTKFSSPVDMLGVVLAKKCQTLVSDVDYKNYLHEWTCLPDQNDVIHARQAYDLQSDNIYKSDLQWLRGIGWVPIGSMDVVKCKRAAEILSDNIYRQPPDKLKFTSVTDSLEQVLAKNNALNMNKRLYTEAWDKDKTQVHIMPDTPEIMLARQNKINYSESLYRQAMEEAKKEGYDLRSDAIPIVAAKASRDIASDYKYKEAYRKQLGHHIGARAVHDDPKIMWSLHIAKVQSDREYKKDFEKYKTRYSSPVDMLGIVLAKKCQTLVSDVDYKHPLHECICLPDQNDIIHARKAYDLQSDNLYKSDLEWMKGIGWVPIDSLEVVRAKRAGELLSDTIYRQRPETLKFTSITDTPEQVLAKNNALNMNKRLYTEAWDNDKKTIHVMPDTPEIMLAKLNRINYSDKLYKLALEESKKEGYDLRLDAIPIQAAKASRDIASDYKYKEGYRKQLGHHIGARNIKDDPKMMWSIHVAKIQSDREYKKEFEKWKTKFSSPVDMLGVVLAKKCQILVSDIDYKHPLHEWTCLPDQNDVIQARKAYDLQSDAIYKSDLEWLRGIGWVPIGSVEVEKVKRAGEILSDRKYRQPADQLKFTCITDTPEIVLAKNNALTMSKHLYTEAWDADKTSIHVMPDTPDILLAKSNSANISQKLYTKGWDESKMKDYDLRADAISIKSAKASRDIASDYKYKEAYEKQKGHHIGAQSIEDDPKIMCAIHAEKIQSEREYKKEFQKWKTKFSSPVDMLSILLAKKCQTLVTDIYYRNYLHEWTCMPDQNDIIQAKKAYDLQSDALYKADLEWLRGIGWMPQGSPEVLRVKNAQNIFCDSVYRTPVVNLKYTSIVDTPEVVLAKSNAENISIPKYREVWDKDKTSIHIMPDTPEINLARANALNVSNKLYREGWDEMKAGCDVRLDAIPIQAAKASREIASDYKYKLDHEKQKGHYVGTLTARDDNKIRWALIADKLQNEREYRLDWAKWKAKIQSPVDMLSILHSKNSQALVSDMDYRNYLHQWTCMPDQNDVIQAKKAYELQSDNVYKADLEWLRGIGWMPNDSVSVNHAKHAADIFSEKKYRTKIETLNFTPVDDRVDYVTAKQSGEILDDIKYRKDWNATKSKYTLTETPLLHTAQEAARILDQYLYKEGWERQKATGYILPPDAVPFVHAHHCNDVQSELKYKAEHVKQKGHYVGVPTMRDDPKLVWFEHAGQIQNERLYKEDYHKTKAKINIPADMVSVLAAKQGQTLVSDIDYRNYLHQWMCHPDQNDVIQARKAYDLQSDNVYRADLEWLRGIGWIPLDSVDHVRVTKNQEMMSQIKYKKNALENYPNFTSVVDPPEIVLAKINSVNQSDVKYKETFNKAKGKYTFSPDTPHISHSKDMGKLYSTILYKGAWEGTKAYGYTLDERYIPIVGAKHADLVNSELKYKETYEKQKGHYLAGKVIGEFPGVVHCLDFQKMRSALNYRKHYEDTKANVHIPNDMMNHVLAKRCQYILSDLEYRHYFHQWTSLLEEPNVIRVRNAQEILSDNVYKDDLNWLKGIGCYVWDTPQILHAKKSYDLQSQLQYTAAGKENLQNYNLVTDTPLYVTAVQSGINASEVKYKENYHQIKDKYTTVLETVDYDRTRNLKNLYSSNLYKEAWDRVKATSYILPSSTLSLTHAKNQKHLASHIKYREEYEKFKALYTLPRSVDDDPNTARCLRVGKLNIDRLYRSVYEKNKMKIHIVPDMVEMVTAKDSQKKVSEIDYRLRLHEWICHPDLQVNDHVRKVTDQISDIVYKDDLNWLKGIGCYVWDTPEILHAKHAYDLRDDIKYKAHMLKTRNDYKLVTDTPVYVQAVKSGKQLSDAVYHYDYVHSVRGKVAPTTKTVDLDRALHAYKLQSSNLYKTSLRTLPTGYRLPGDTPHFKHIKDTRYMSSYFKYKEAYEHTKAYGYTLGPKDVPFVHVRRVNNVTSERLYRELYHKLKDKIHTTPDPPEIRQVKKTQEAVSELIYKSDFFKMQGHMISLPYTPQVIHCRYVGDITSDIKYKEDLQVLKGFGCFLYDTPDMVRSRHLRKLWSNYLYTDKAREMRDKYKVVLDTPEYRKVQELKTHLSELVYRAAGKKQKSIFTSVPDTPDLLRAKRGQKLQSQYLYVELATKERPHHHAGNQTTALKHAKDVKDMVSEKKYKIQYEKMKDKYTPVPDTPILIRAKRAYWNASDLRYKETFQKTKGKYHTVKDALDIVYHRKVTDDISKIKYKENYMSQLGIWRSIPDRPEHFHHRAVTDTVSDVKYKEDLTWLKGIGCYAYDTPDFTLAEKNKTLYSKYKYKEVFERTKSDFKYVADSPINRHFKYATQLMNEKKYRADYEQRKDKYHLVVDEPRHLLAKTRSDQISQIKYRKNYEKSKDKFTSIVDTPEHLRTTKVNKQISDILYKLEYNKAKPRGYTTIHDTPMLLHVRKVKDEVSDLKYKEVYQRNKSNCTIEPDAVHIKAAKDAYKVNTNLDYKKQYEANKAHWKWTPDRPDFLQAAKSSLQQSDFEYKLDREFLKGCKLSVTDDKNTVLALRNTLIESDLKYKEKHVKERGTCHAVPDTPQILLAKTVSNLVSENKYKDHVKKHLAQGSYTTLPETRDTVHVKEVTKHVSDTNYKKKFVKEKGKSNYSIMLEPPEVKHAMEVAKKQSDVAYRKDAKENLHYTTVADRPDIKKATQAAKQASEVEYRAKHRKEGSHGLSMLGRPDIEMAKKAAKLSSQVKYRENFDKEKGKTPKYNPKDSQLYKVMKDANNLASEVKYKADLKKLHKPVTDMKESLIMNHVLNTSQLASSYQYKKKYEKSKGHYHTIPDNLEQLHLKEATELQSIVKYKEKYEKERGKPMLDFETPTYITAKESQQMQSGKEYRKDYEESIKGRNLTGLEVTPALLHVKYATKIASEKEYRKDLEESIRGKGLTEMEDTPDMLRAKNATQILNEKEYKRDLELEVKGRGLNAMANETPDFMRARNATDIASQIKYKQSAEMEKANFTSVVDTPEIIHAQQVKNLSSQKKYKEDAEKSMSYYETVLDTPEIQRVRENQKNFSLLQYQCDLKNSKGKITVVQDTPEILRVKENQKNFSSVLYKEDVSPGTAIGKTPEMMRVKQTQDHISSVKYKEAIGQGTPIPDLPEVKRVKETQKHISSVMYKENLGTGIPTTVTPEIERVKRNQENFSSVLYKENLGKGIPTPITPEMERVKRNQENFSSVLYKENMGKGTPLPVTPEMERVKHNQENISSVLYKENVGKATATPVTPEMQRVKRNQENISSVLYKENLGKATPTPFTPEMERVKRNQENFSSVLYKENMRKATPTPVTPEMERAKRNQENISSVLYSDSFRKQIQGKAAYVLDTPEMRRVRETQRHISTVKYHEDFEKHKGCFTPVVTDPITERVKKNMQDFSDINYRGIQRKVVEMEQKRNDQDQETITGLRVWRTNPGSVFDYDPAEDNIQSRSLHMINVQAQRRSREQSRSASALSVSGGEEKSEHSEAPDHHLSTYSDGGVFAVSTAYKHAKTTELPQQRSSSVATQQTTVSSIPSHPSTAGKIFRAMYDYMAADADEVSFKDGDAIINVQAIDEGWMYGTVQRTGRTGMLPANYVEAI

SEQ ID NO: 6990 - protein, 977 aa, Homo sapiens
VAYRKDAKENLHYTTVADRPDIKKATQAAKQASEVEYRAKHRKEGSHGLSMLGRPDIEMAKKAAKLSSQVKYRENFDKEKGKTPKYNPKDSQLYKVMKDANNLASEVKYKADLKKLHKPVTDMKESLIMNHVLNTSQLASSYQYKKKYEKSKGHYHTIPDNLEQLHLKEATELQSIVKYKEKYEKERGKPMLDFETPTYITAKESQQMQSGKEYRKDYEESIKGRNLTGLEVTPALLHVKYATKIASEKEYRKDLEESIRGKGLTEMEDTPDMLRAKNATQILNEKEYKRDLELEVKGRGLNAMANETPDFMRARNATDIASQIKYKQSAEMEKANFTSVVDTPEIIHAQQVKNLSSQKKYKEDAEKSMSYYETVLDTPEIQRVRENQKNFSLLQYQCDLKNSKGKITVVQDTPEILRVKENQKNFSSVLYKEDVSPGTAIGKTPEMMRVKQTQDHISSVKYKEAIGQGTPIPDLPEVKRVKETQKHISSVMYKENLGTGIPTTVTPEIERVKRNQENFSSVLYKENLGKGIPTPITPEMERVKRNQENFSSVLYKENMGKGTPLPVTPEMERVKHNQENISSVLYKENMGKGTPLPVTPEMERVKHNQENISSVLYKENVGKATATPVTPEMQRVKRNQENISSVLYKENLGKATPTPFTPEMERVKRNQENFSSVLYKENMRKATPTPVTPEMERAKRNQENISSVLYSDSFRKQIQGKAAYVLDTPEMRRVRETQRHISTVKYHEDFEKHKGCFTPVVTDPITERVKKNMQDFSDINYRGIQRKVVEMEQKRNDQDQETITGLRVWRTNPGSVFDYDPAEDNIQSRSLHMINVQAQRRSREQSRSASALSISGGEEKSEHSEAPDHHLSTYSDGGVFAVSTAYKHAKTTELPQQRSSSVATQQTTVSSIPSHPSTAGKIFRAMYDYMAADADEVSFKDGDAIINVQAIDEGWMYGTVQRTGRTGMLPANYVEAI

SEQ ID NO: 6991 - protein, 316 aa, Homo sapiens
GTGSAAGAAARTRSSGPPPPAVPASRVYPRALKEVRQPSPAPADRAMAQRKNAKSSGNSSSSGSGSGSTSAGSSSPGARRETKHGGHKNGRKGGLSGTSFFTWFMVIALLGVWTSVAVVWFDLVDYEEVLGKLGIYDADGDGDFDVDDAKVLLGLKERSTSEPAVPPEEAEPHTEPEEQVPVEAEPQNIEDEAKEQIQSLLHEMVHAEHETEHSYHVEETVSQDCNQDMEEMMSEQENPDSSEPVVEDERLHHDTDDVTYQVYEEQAVYEPLENEGIEITEVTAPPEDNPVEDSQVIVEEVSIFPVEEQQEVPPDT

SEQ ID NO: 6992 - protein, 758 aa, Homo sapiens [sequence omitted]

SEQ ID NO: 6993 - protein, 313 aa, Homo sapiens
MAQRKNAKSSGNSSSSGSGSGSTSAGSSSPGARRETKHGGHKNGRKGGLSGTSFFTWFMVIALLGVWTSVAVVWFDLVDYEEVLGKLGIYDADGDGDFDVDDAKVLLGLKERSTSEPAVPPEEAEPHTEPEEQVPVEAEPQNIEDEAKEQIQSLLHEMVHAEHVEGEDLQQEDGPTGEPQQEDDEFLMATDVDDRFETLEPEVSHEETEHSYHVEETVSQDCNQDMEEMMSEQENPDSSEPVVEDERLHHDTDDVTYQVYEEQAVYEPLENEGIEITEVTAPPEDNPVEDSQVIVEEVSIFPVEEQQEVPPDT

SEQ ID NO: 6994 - protein, 750 aa, Homo sapiens
MEDYPDPQSANHMNSSLLSLYRKGNPDSVSNTPEMEQRETTSSTPRISSKTGSIPLKTPAKDSEGGWFIDKTPSVKKDSFFLDLSCEKSNPKKPITEIQDSKDSSLLESDMKRKGKLKNKGSKRKKEDLQEVDGEIEAVLQKKAKARGLEFQISNVKFEDVGGNDMTLKEVCKMLIHMRHPEVYHHLGVVPPRGVLLHGPPGCGKTLLAHAIAGELDLPILKVAAPEIVSGVSGESEQKLRELFEQAVSNAPCIIFIDEIDAITPKREVASKDMERRIVAQLLTCMDDLNNVAATARVLVIGATNRPDSLDPALRRAGRFDREICLGIPDEASRERILQTLCRKLRLPQAFDFCHLAHLTPGFVGADLMALCREAAMCAVNRVLMKLQEQQKKNPEMEDLPSKGVQEERLGTEPTSETQDELQRLLGLLRDQDPLSEEQMQGLCIELNDFIVALSSVQPSAKREGFVTVPNVTWADIGALEDIREELTMAILAPVRNPDQFKALGLVTPAGVLLAGPPGCGKTLLAKAVANESGLNFISVKGPELLNMYVGESERAVRQVFQRAKNSAPCVIFFDEVDALCPRRSDRETGASVRVVNQLLTEMDGLEARQQVFIMAATNRPDIIDPAILRPGRLDKTLFVGLPPPADRLAILKTITKNGTKPPLDADVNLEAIAGDLRCDCYTGADLSALVREASICALRQEMARQKSGNEKGELKVSHKHFEEAFKKVRSSISKKDQIMYERLQESLSR

SEQ ID NO: 6995 - protein, 856 aa, Homo sapiens
MKPRPAGFVDNKLKQRVIQYLTSNKCGKYVDIGVLASDLQRVYSIDYGRRKRNAFRIQVEKVFSIISSEKELKNLTELEDEHLAKRARQGEEDNEYTESYSDDDSSMEDYPDPQSANHMNSSLLSLYRKGNPDSVSNTPEMEQRETTSSTPRISSKTGSIPLKTPAKDSEGGWFIDKTPSVKKDSFFLDLSCEKSNPKKPITEIQDSKDSSLLESDMKRKGKLKNKGSKRKKEDLQEVDGEIEAVLQKKAKARGLEFQISNVKFEDVGGNDMTLKEVCKMLIHMRHPEVYHHLGVVPPRGVLLHGPPGCGKTLLAHAIAGELDLPILKVAAPEIVSGVSGESEQKLRELFEQAVSNAPCIIFIDEIDAITPKREVASKDMERRIVAQLLTCMDDLNNVAATARVLVIGATNRPDSLDPALRRAGRFDREICLGIPDEASRERILQTLCRKLRLPQAFDFCHLAHLTPGFVGADLMALCREAAMCAVNRVLMKLQEQQKKNPEMEDLPSKGVQEERLGTEPTSETQDELQRLLGLLRDQDPLSEEQMQGLCIELNDFIVALSSVQPSAKREGFVTVPNVTWADIGALEDIREELTMAILAPVRNPDQFKALGLVTPAGVLLAGPPGCGKTLLAKAVANESGLNFISVKGPELLNMYVGESERAVRQVFQRAKNSAPCVIFFDEVDALCPRRSDRETGASVRVVNQLLTEMDGLEARQQVFIMAATNRPDIIDPAILRPGRLDKTLFVGLPPPADRLAILKTITKNGTKPPLDADVNLEAIAGDLRCDCYTGADLSALVREASICALRQEMARQKSGNEKGELKVSHKHFEEAFKKVRSSISKKDQIMYERLQESLSR

SEQ ID NO: 6996 - protein, 790 aa, Homo sapiens
HACVIRGQVMTSDGTPLVGVNISFVNNPLFGYTISRQDGSFDLVTNGGISIILRFERAPFITQEHTLWLPWDRFFVMETIIMRHEENEIPSCDLSNFARPNPVVSPSPLTSFASSCAEKGPIVPEIQVPSFPNCIPPCFYFILGVEEDLRDSGKRKNTSVGLGYLSSRTPGYKSVLRISLTHPTIPFNLMKVHLMVAVEGRLFRKWFAAAPDLSYYFIWDKTDVYNQKVFGLSEAFVSVGYEYESCPDLILWEKRTTVLQGYEIDASKLGGWSLDKHHALNIQSGILHKGNGENQFVSQQPPVIGSIMGNGRRRSISCPSCNGLADGNKLLAPVALTCGSDGSLYVGDFNYIRRIFPSGNVTNILELRYVSPAHKYYLATDPMSGAVFLSDSNSRRVFKIKSTVVVKDLVKNSEVVAGTGDQCLPFDDTRCGDGGKATEATLTNPRGITVDKFGLIYFVDGTMIRRIDQNGIISTLLGSNDLTSARPLSCDSVMDISQVHLEWPTDLAINPMDNSLYVLDNNVVLQISENHQVRIVAGRPMHCQVPGIDHFLLSKVAIHATLESATALAVSHNGVLYIAETDEKKINRIRQVTTSGEISLVAGAPSGCDCKNDANCDCFSGDDGYAKDAKLNTPSSLAVCADGELYVADLGNIRIRFIRKNKPFLNTQNMYELSSPIDQELYLFDTTGKHLYTQSLPTGDYLYNFTYTGDGDITLITDNNGNMVNVRRDSTGMPLWLVVPDGQVYWVTMGTNSALKSVTTQGHELAMMTYHGNSGLLATKSNENGWTTFY

SEQ ID NO: 6997 - protein, 649 aa, Homo sapiens
RSLPRGRAHGRTERRKGWRCDSRAGALASPPRALAAGPGEMESTAYPLNLSLKEEEEEEEIQSRELEDGPADMQKVRICSEGGWVPALFDEVAIYFSDEEWEVLTEQQKALYREVMRMNYETVLSLEFPFPKPDMITRLEGEEESQNSDEWQLQGGTSAENEESDVKPPDWPNPMNATSQFPQPQHFDSFGLRLPRDITELPEWSEGYPFYMAMGFPGYDLSADDIAGKFQFSRGMRRSYDAGFKLMVVEYAESTNNCQAAKQFGVLEKNVRDWRKVKPQLQNAHAMRRAFRGPKNGRFALVDQRVAEYVRYMQAKGDPITREAMQLKALEIAQEMNIPEKGFKASLGWCRRMMRRYDLSLRHKVPVPQHLPEDLTEKLVTYQRSVLALRRAHDYEVAQMGNADETPICLEVPSRVTVDNQGEKPVLVKTPGREKLKITAMLGVLADGRKLPPYIILRGTYIPPGKFPSGMEIRCHRYGWMTEDLMQDWLEVVWRRRTGAVPKQRGMLILNGFRGHATDSVKNSMESMNTDMVIIPGGLTSQLQVLDVVVYKPLNDSVRAQYSNWLLAGNLALSPTGNAKKPPLGLFLEWVMVAWNSISSESIVQGFKKCHISSNLEEEDDVLWEIESELPGGGEPPKDCDTESMAESN

SEQ ID NO: 6998 - protein, 145 aa, Homo sapiens
ALGGVAEYDLKEGLLVSPGSVIMNGSNMANTSPSVKSKEDQGLSGHDEKENPFAEYMWMENEEDFNRQVEEELQEQDFLDRCFQEMLDEEDQDWFIPSRDLPQAMGQLQQQLNGLSVSEGHDSEDILSKSNLNPDAKEFIPGEKY

SEQ ID NO: 6999 - protein, 431 aa, Homo sapiens
MPNPRPGKPSAPSLALGPSPGASPSWRAAPKASDLLGARGPGGTFQGRDLRGGAHASSSSLNPMPPSQLQLPTLPLVMVAPSGARLGPLPHLQALLQDRPHFMHQLSTVDAHARTPVLQVHPLESPAMISLTPPTTATGVFSLKARPGLPPGINVASLEWVSREPALLCTFPNPSAPRKDSTLSAVPQSSYPLLANGVCKWPGCEKVFEEPEDFLKHCQADHLLDEKGRAQCLLQREMVQSLEQQLVLEKEKLSAMQAHLAGKMALTKASSVASSDKGSCCIVAAGSQGPVVPAWSGPREAPDSLFAVRRHLWGSHGNSTFPEFLHNMDYFKFHNMRPPFTYATLIRWAILEAPEKQRTLNEIYHWFTRMFAFFRNHPATWKNAIRHNLSLHKCFVRVESEKGAVWTVDELEFRKKRSQRPSRCSNPTPGP

SEQ ID NO: 7000 - protein, 628 aa, Homo sapiens
MSDKSDLKAELERKKQRLAQIREEKKRKEEERKKKEADMQQKKEPVQDDSDLDRKRRETEALLQSIGISPEPPLVPTPMSPSSKSVSTPSEAGSQDSGDLGPLTRTLQWDTDPSVLQLQSDSELGRRLHKLGVSKVTQVDFLPREVVSYSKETQTPLATHQSEEDEEDEEMVESKVGQDSELENQDKKQEVKEAPPRELTEEEKQQILHSEEFLIFFDRTIRVIERALAEDSDIFFDYSGRELEEKDGDVQAGANLSFNRQFYDEHWSKHRVVTCMDWSLQYPELMVASYNNNEDAPHEPDGVALVWNMKFKKTTPEYVFHCQSSVMSVCFARFHPNLVVGGTYSGQIVLWDNRSHRRTPVQRTPLSAAAHTHPVYCVNVVGTQNAHNLITVSTDGKMCSWSLDMLSTPQESMELVYNKSKPVAVTGMAFPTGDVNNFVVGSEEGTVYTACRHGSKAGIGEVFEGHQGPVTGINCHMAVGPIDFSHLFVTSSFDWTVKLWTTKHNKPLYSFEDNADYVYDVMWSPVHPALFACVDGMGRLDLWNLNNDTEVPTASVAIEGASALNRVRWAQAGKEVAVGDSEGRIWVYDVGELAVPHNDEWTRFARTLVEIRANRADSEEEGTVELSA

SEQ ID NO: 7001 - protein, 645 aa, Homo sapiens
MSDKSDLKAELERKKQRLAQIREEKKRKEEERKKKEADMQQKKEPVQDDSDLDRKRRETEALLQSIGISPEPPLVQPLHFLTWDTCYFHYLVPTPMSPSSKSVSTPSEAGSQDSGDLGPLTRTLQWDTDPSVLQLQSDSELGRRLHKLGVSKVTQVDFLPREVVSYSKETQTPLATHQSEEDEEDEEMVESKVGQDSELENQDKKQEVKEAPPRELTEEEKQQILHSEEFLIFFDRTIRVIERALAEDSDIFFDYSGRELEEKDGDVQAGANLSFNRQFYDEHWSKHRVVTCMDWSLQYPELMVASYNNNEDAPHEPDGVALVWNMKFKKTTPEYVFHCQSSVMSVCFARFHPNLVVGGTYSGQIVLWDNRSHRRTPVQRTPLSAAAHTHPVYCVNVVGTQNAHNLITVSTDGKMCSWSLDMLSTPQESMELVYNKSKPVAVTGMAFPTGDVNNFVVGSEEGTVYTACRHGSKAGIGEVFEGHQGPVTGINCHMAVGPIDFSHLFVTSSFDWTVKLWTTKHNKPLYSFEDNADYVYDVMWSPVHPALFACVDGMGRLDLWNLNNDTEVPTASVAIEGASALNRVRWAQAGKEVAVGDSEGRIWVYDVGELAVPHNDEWTRFARTLVEIRANRADSEEEGTVELSA

SEQ ID NO: 7002 - protein, 608 aa, Homo sapiens
MSDKSDLKAELERKKQRLAQIREEKKRKEEERKKKEADMQQKKEPVQDDSDLDRKRRETEALLQSIGISPEPPLVPTPMSPSSKSVSTPSEAGSQDSGDLGPLTRRRLHKLGVSKVTQVDFLPREVVSYSKETQTPLATHQSEEDEEDEEMVESKVGQDSELENQDKKQEVKEAPPRELTEEEKQQILHSEEFLIFFDRTIRVIERALAEDSDIFFDYSGRELEEKDGDVQAGANLSFNRQFYDEHWSKHRVVTCMDWSLQYPELMVASYNNNEDAPHEPDGVALVWNMKFKKTTPEYVFHCQSSVMSVCFARFHPNLVVGGTYSGQIVLWDNRSHRRTPVQRTPLSAAAHTHPVYCVNVVGTQNAHNLITVSTDGKMCSWSLDMLSTPQESMELVYNKSKPVAVTGMAFPTGDVNNFVVGSEEGTVYTACRHGSKAGIGEVFEGHQGPVTGINCHMAVGPIDFSHLFVTSSFDWTVKLWTTKHNKPLYSFEDNADYVYDVMWSPVHPALFACVDGMGRLDLWNLNNDTEVPTASVAIEGASALNRVRWAQAGKEVAVGDSEGRIWVYDVGELAVPHNDEWTRFARTLVEIRANRADSEEEGTVELSA

SEQ ID NO: 7003 - protein, 1781 aa, Homo sapiens
MTTYRAIPSDGVDLAASCGARVGDVLPGPHTGDYAPLGFWAQNGSMSQPLGESPATATATATATTRPSPTTPAMPKMGVRARVADWPPKREALREHSNPSPSQDTDGTKATKMAHSMRSIQNGQPPTSTPASSGSKAFHRLSRRRSKDVEFQDGWPRSPGRAFLPLRHRSSSEITLSECDAEDAGEPRGARHTGALPLFREYGSTSSIDVQGMPEQSFFDILNEFRSEQPDARGCQALTELLRADPGPHLMGGGGGAKGDSHNGQPAKDSLLPLQPTKEKEKARKKPARGLGGGDTVDSSIFRKLRSSKPEGEAGRSPGEADEGRSPPEASRPWVCQKSFAHFDVQSMLFDLNEAAANRVSVSQRRNTTTGASAASAASAMASLTASRAHSLGGLDPAFTSTEDLNCKENLEQDLGDDNSNDLLLSCPHFRNEIGGECERNVSFSRASVGSPSSGEGHLAEPALSAYRTNASISVLEVPKEQQRTQSRPRQYSIEHVDLGARYYQDYFVGKEHANYFGVDEKLGPVAVSIKREKLEDHKEHGPQYQYRIIFRTRELITLRGSILEDATPTATKHGTGRGLPLKDALEYVIPELNIHCLRLALNTPKVTEQLLKLDEQGLCRKHKVGILYCKAGQSSEEEMYNNEEAGPAFEEFLSLIGEKVCLKGFTKYAAQLDVKTDSTGTHSLYTMYQDYEIMFHVSTLLPYTPNNRQQLLRKRHIGNDIVTIIFQEPGALPFTPKNIRSHFQHVFIIVRVHNPCTDNVCYSMAVTRSKDAPPFGPPIPSGTTFRKSDVFRDFLLAKVINAENAAHKSDKFHTMATRTRQEYLKDLAENCVSNTPIDSTGKFNLISLTSKKKEKTKARAGAEQHSAGAIAWRVVAQDYAQGVEIDCILGISNEFVVLLDLRTKEVVFNCYCGDVIGWTPDSSTLKIFYGRGDHIFLQATEGSVEDIREIVQRLKVMTSGWETVDMTLRRNGLGQLGFHVKYDGTVAEVEDYGFAWQAGLRQGSRLVEICKVAVVTLTHDQMIDLLRTSVTVKVVIIPPFEDGTPRRGWPETYDMNTSEPKTEQESITPGGRPPYRSNAPWQWSGPASHNSLPASKWATPTTPGHAQSLSRPLKQTPIVPFRESQPLHSKRPVSFPETPYTVSPAGADRVPPYRQPSGSFSTPGSATYVRYKPSPERYTAAPHPLLSLDPHFSHDGTSSGDSSSGGLTSQESTMERQKPEPLWHVPAQARLSAIAGSSGNKHPSRQDAAGKDSPNRHSKGEPQYSSHSSSNTLSSNASSSHSDDRWFDPLDPLEPEQDPLSKGGSSDSGIDTTLYTSSPSCMSLAKAPRPAKPHKPPGSMGLCGGGREAAGRSHHADRRREVSPAPAVAGQSKGYRPKLYSSGSSTPTGLAGGSRDPPRQPSDMGSRVGYPAQVYKTASAETPRPSQLAQPSPFQLSASVPKSFFSKQPVRNKHPTGWKRTEEPPPRPLPFSDPKKQVDTNTKNVFGQPRLRASLRDLRSPRKNYKSTIEDDLKKLIIMDNLGPEQERDTGQSPQKGLQRTLSDESLCSGRREPSFASPAGLEPGLPSDVLFTSTCAFPSSTLPARRQHQHPHPPVGPGATPAAGSGFPEKKSTISASELSLADGRDRPLRRLDPGLMPLPDTAAGLEWSSLVNAAKAYEVQRAVSLFSLNDPALSPDIPPAHSPVHSHLSLERGPPTPRTTPTMSEEPPLDLTGKVYQLEVMLKQLHTDLQKEKQDKVVLQSEVASLRQNNQRLQEESQAASEQLRKFAEIFCREKKEL

SEQ ID NO: 7004 - protein, 353 aa, Homo sapiens
MTTYRAIPSDGVDLAASCGARVGDVLPGPHTGDYAPLGFWAQNGSMSQPLGESPATATATATATTRPSPTTPAMPKMGVRARVADWPPKREALREHSNPSPSQDTDGTKATKMAHSMRSIQNGQPPTSTPASSGSKAFHRLSRRRSKDVEFQDGWPRSPGRAFLPLRHRSSSEITLSECDAEDAGEPRGARHTGALPLFREYGSTSSIDVQGMPEQSFFDILNEFRSEQPDARGCQALTELLRADPGPHLMGGGGGAKGDSHNGQPAKDSLLPLQPTKEKEKARKKPARGLGGGDTVDSSIFRKLRSSKPEGEAGRSPGEADEGRSPPEASRPWVCQKSFAHFDVQSMLFDLN

SEQ ID NO: 7005 - protein, 318 aa, Homo sapiens
MPNIKIFSGSSHQDLSQKIADRLGLELGKVVTKKFSNQETCVEIDESVRGEDVYIVQSGCGEINDSLMELLIMINACKIASASRVTAVIPCFPYARQDKKDKSRSPISAKLVANMLSIAGADHIITMDLHASQIQGFFDIPVDNLYAEPTVLKWIRENIPEWKNCIIVSPDAGGAKRVTSIADQLNVDFALIHKERKKANEVDCIVLVGDVNDRVAILVDDMADTCVTICLAADKLLSAGATRVYAILTHGIFSGPAISRINTACFEAVVVTNTIPQDEKMKHCSKIRVIDISMILAEAIRRTHNGESVSYLFSHVPL

SEQ ID NO: 7006 - protein, 349 aa, Homo sapiens [sequence omitted]

SEQ ID NO: 7007 - protein, 726 aa, Homo sapiens
MNHSPLKTALAYECFQDQDNSTLALPSDQKMKTGTSGRQRVQEQVMMTVKRQKSKSSQSSTLSHSNRGSMYDGLADNYNYGTTSRSSYYSKFQAGNGSWGYPIYNGTLKREPDNRRFSSYSQMENWSRHYPRGSCNTTGAGSDICFMQKIKASRSEPDLYCDPRGTLRKGTLGSKGQKTTQNRYSFYSTCSGQKAIKKCPVRPPSCASKQDPVYIPPISCNKDLSFGHSRASSKICSEDIECSGLTIPKAVQYLSSQDEKYQAIGAYYIQHTCFQDESAKQQVYQLGGICKLVDLLRSPNQNVQQAAAGALRNLVFRSTTNKLETRRQNGIREAVSLLRRTGNAEIQKQLTGLLWNLSSTDELKEELIADALPVLADRVIIPFSGWCDGNSNMSREVVDPEVFFNATGCLRNLSSADAGRQTMRNYSGLIDSLMAYVQNCVAASRCDDKSVENCMCVLHNLSYRLDAEVPTRYRQLEYNARNAYTEKSSTGCFSNKSDKMMNNNYDCPLPEEETNPKGSGWLYHSDAIRTYLNLMGKSKKDATLEACAGALQNLTASKGLMSSGMSQLIGLKEKGLPQIARLLQSGNSDVVRSGASLLSNMSRHPLLHRVMGNQVFPEVTRLLTSHTGNTSNSEDILSSACYTVRNLMASQPQLAKQYFSSSMLNNIINLCRSSASPKAAEAARLLLSDMWSSKELQGVLRQQGFDRNMLGTLAGANSLRNFTSRF

SEQ ID NO: 7008 - protein, 747 aa, Homo sapiens
MNHSPLKTALAYECFQDQDNSTLALPSDQKMKTGTSGRQRVQEQVMMTVKRQKSKSSQSSTLSHSNRGSMYDGLADNYNYGTTSRSSYYSKFQAGNGSWGYPIYNGTLKREPDNRRFSSYSQMENWSRHYPRGSCNTTGAGSDICFMQKIKASRSEPDLYCDPRGTLRKGTLGSKGQKTTQNRYSFYSTCSGQKAIKKCPVRPPSCASKQDPVYIPPISCNKDLSFGHSRASSKICSEDIECSGLTIPKAVQYLSSQDEKYQAIGAYYIQHTCFQDESAKQQVYQLGGICKLVDLLRSPNQNVQQAAAGALRNLVFRSTTNKLETRRQNGIREAVSLLRRTGNAEIQKQLTGLLWNLSSTDELKEELIADALPVLADRVIIPFSGWCDGNSNMSREVVDPEVFFNATGCLRKRLGMRELLALVPQRATSSRVNLSSADAGRQTMRNYSGLIDSLMAYVQNCVAASRCDDKSVENCMCVLHNLSYRLDAEVPTRYRQLEYNARNAYTEKSSTGCFSNKSDKMMNNNYDCPLPEEETNPKGSGWLYHSDAIRTYLNLMGKSKKDATLEACAGALQNLTASKGLMSSGMSQLIGLKEKGLPQIARLLQSGNSDVVRSGASLLSNMSRHPLLHRVMGNQVFPEVTRLLTSHTGNTSNSEDILSSACYTVRNLMASQPQLAKQYFSSSMLNNIINLCRSSASPKAAEAARLLLSDMWSSKELQGVLRQQGFDRNMLGTLAGANSLRNFTSRF

SEQ ID NO: 7009 - protein, 1890 aa, Homo sapiens
MVKLANPLYTEWILEAIQKIKKQKQRPSEERICHAVSTSHGLDKKTVSEQLELSVQDGSVLKVTNKGLASYKDPDNPGRFSSVKPGTFPKSAKGSRGSCNDLRNVDWNKLLRRAIEGLEEPNGSSLKNIEKYLRSQSDLTSTTNNPAFQQRLRLGAKRAVNNGRLLKDGPQYRVNYGSLDGKGAPQYPSAFPSSLPPVSLLPHEKDQPRADPIPICSFCLGTKESNREKKPEELLSCADCGSSGHPSCLKFCPELTTNVKALRWQCIECKTCSACRVQGRNADNMLFCDSCDRGFHMECCDPPLSRMPKGMWICQVCRPKKKGRKLLHEKAAQIKRRYAKPIGRPKNKLKQRLLSVTSDEGSMNAFTGRGSPGRGQKTKVCTTPSSGHAASGKDSSSRLAVTDPTRPGATTKITTTSTYISASTLKVNKKTKGLIDGLTKFFTPSPDGRRSRGEIIDFSKHYRPRKKVSQKQSCTSHVLATDTEIKINIKQESADVNVIGNKDVVTEEDLDVFKQAQELSWEKIECESGVEDCGRYPSVIEFGKYEIQTWYSSPYPQEYARLPKLYLCEFCLKYMKSKNILLRHSKKCGWFHPPANEIYRRKDLSVFEVDGNMSKIYCQNLCLLAKLFLDHKTLYYDVEPFLFYVLTKNDEKGCHLVGYLSKEKLCQQKYNVSCIMIMPQHQRQGFGRFLIDFSYLLSRREGQAGSPEKPLSDLGRLSYLAYWKSVILEYLYHHHERHISIKAISRATGMCPHDIATTLQHLHMIDKRDGRFVIIRREKLILSHMEKLKTCSRANELDPDSLRWTPILISNAAVSEEEREAEKEAERLMEQASCWEKEEQEILSTRANSRQSPAKVQSKNKYLHSPESRPVTGERGQLLELSKESSEEEEEEEDEEEEEEEEEEEEDEEEEEEEEEEEEEENIQSSPPRLTKPQSVAIKRKRPFVLKKKRGRKRRRINSSVTTETISETTEVLNEPFDNSDEERPMPQLEPTCEIEVEEDGRKPVLRKAFQHQPGKKRQTEEEEGKDNHCFKNADPCRNNMNDDSSNLKEGSKDNPEPLKCKQVWPKGTKRGLSKWRQNKERKTGFKLNLYTPPETPMEPDEQVTVEEQKETSEGKTSPSPIRIEEEVKETGEALLPQEENRREETCAPVSPNTSPGEKPEDDLIKPEEEEEEEEEEEEEEEEEEGEEEEGGGNVEKDPDGAKSQEKEEPEISTEKEDSARLDDHEEEEEEDEEPSHNEDHDADDEDDSHMESAEVEKEELPRESFKEVLENQETFLDLNVQPGHSNPEVLMDCGVDLTASCNSEPKELAGDPEAVPESDEEPPPGEQAQKQDQKNSKEVDTEFKEGNPATMEIDSETVQAVQSLTQESSEQDDTFQDCAETQEACRSLQNYTRADQSPQIATTLDDCQQSDHSSPVSSVHSHPGQSVRSVNSPSVPALENSYAQISPDQSAISVPSLQNMETSPMMDVPSVSDHSQQVVDSGFSDLGSIESTTENYENPSSYDSTMGGSICGNGSSQNSCSYSNLTSSSLTQSSCAVTQQMSNISGSCSMLQQTSISSPPTCSVKSPQGCVVERPPSSSQQLAQCSMAANFTPPMQLAEIPETSNANIGLYERMGQSDFGAGHYPQPSATFSLAKLQQLTNTLIDHSLPYSHSAAVTSYANSASLSTPLSNTGLVQLSQSPHSVPGGPQAQATMTPPPNLTPPPMNLPPPLLQRNMAASNIGISHSQRLQTQIASKGHISMRTKSASLSPAAATHQSQIYGRSQTVAMQGPARTLTMQRGMNMSVNLMPAPAYNVNSVNMNMNTLNAMNGYSMSQPMMNSGYHSNHGYMNQTPQYPMQMQMGMMGTQPYAQQPMQTPPHGNMMYTAPGHHGYMNTGMSKQSLNGSYMRR

SEQ ID NO: 7010 - protein, 2073 aa, Homo sapiens
MVKLANPLYTEWILEAIQKIKKQKQRPSEERICHAVSTSHGLDKKTVSEQLELSVQDGSVLKVTNKGLASYKDPDNPGRFSSVKPGTFPKSAKGSRGSCNDLRNVDWNKLLRRAIEGLEEPNGSSLKNIEKYLRSQSDLTSTTNNPAFQQRLRLGAKRAVNNGRLLKDGPQYRVNYGSLDGKGAPQYPSAFPSSLPPVSLLPHEKDQPRADPIPICSFCLGTKESNREKKPEELLSCADCGSSGHPSCLKFCPELTTNVKALRWQCIECKTCSACRVQGRNADNMLFCDSCDRGFHMECCDPPLSRMPKGMWICQVCRPKKKGRKLLHEKAAQIKRRYAKPIGRPKNKLKQRLLSVTSDEGSMNAFTGRGSPGRGQKTKVCTTPSSGHAASGKDSSSRLAVTDPTRPGATTKITTTSTYISASTLKVNKKTKGLIDGLTKFFTPSPDGRRSRGEIIDFSKHYRPRKKVSQKQSCTSHVLATGTTQKLKPPPSSLPPPTPISGQSPSSQKSSTATSSPSPQSSSSQCSVPSLSSLTTNSQLKALFDGLSHTIPLRDSLAKRDTPSYAPPKRMRRKTELSSTAKSKAHFFGKRDIRSRFISHSSSSSWGMARGSIFKAIAHFKRTTFLKKHRMLGRLKYKVTPQMGTPSPGKGSLTDGRIKPDQDDDTEIKINIKQESADVNVIGNKDVVTEEDLDVFKQAQELSWEKIECESGVEDCGRYPSVIEFGKYEIQTWYSSPYPQEYARLPKLYLCEFCLKYMKSKNILLRHSKKCGWFHPPANEIYRRKDLSVFEVDGNMSKIYCQNLCLLAKLFLDHKTLYYDVEPFLFYVLTKNDEKGCHLVGYLSKEKLCQQKYNVSCIMIMPQHQRQGFGRFLIDFSYLLSRREGQAGSPEKPLSDLGRLSYLAYWKSVILEYLYHHHERHISIKAISRATGMCPHDIATTLQHLHMIDKRDGRFVIIRREKLILSHMEKLKTCSRANELDPDSLRWTPILISNAAVSEEEREAEKEAERLMEQASCWEKEEQEILSTRANSRQSPAKVQSKNKYLHSPESRPVTGERGQLLELSKESSEEEEEEEDEEEEEEEEEEEEDEEEEEEEEEEEEEENIQSSPPRLTKPQSVAIKRKRPFVLKKKRGRKRRRINSSVTTETISETTEVLNEPFDNSDEERPMPQLEPTCEIEVEEDGRKPVLRKAFQHQPGKKRQTEEEEGKDNHCFKNADPCRNNMNDDSSNLKEGSKDNPEPLKCKQVWPKGTKRGLSKWRQNKERKTGFKLNLYTPPETPMEPDEQVTVEEQKETSEGKTSPSPIRIEEEVKETGEALLPQEENRREETCAPVSPNTSPGEKPEDDLIKPEEEEEEEEEEEEEEEEEEGEEEEGGGNVEKDPDGAKSQEKEEPEISTEKEDSARLDDHEEEEEEDEEPSHNEDHDADDEDDSHMESAEVEKEELPRESFKEVLENQETFLDLNVQPGHSNPEVLMDCGVDLTASCNSEPKELAGDPEAVPESDEEPPPGEQAQKQDQKNSKEVDTEFKEGNPATMEIDSETVQAVQSLTQESSEQDDTFQDCAETQEACRSLQNYTRADQSPQIATTLDDCQQSDHSSPVSSVHSHPGQSVRSVNSPSVPALENSYAQISPDQSAISVPSLQNMETSPMMDVPSVSDHSQQVVDSGFSDLGSIESTTENYENPSSYDSTMGGSICGNGSSQNSCSYSNLTSSSLTQSSCAVTQQMSNISGSCSMLQQTSISSPPTCSVKSPQGCVVERPPSSSQQLAQCSMAANFTPPMQLAEIPETSNANIGLYERMGQSDFGAGHYPQPSATFSLAKLQQLTNTLIDHSLPYSHSAAVTSYANSASLSTPLSNTGLVQLSQSPHSVPGGPQAQATMTPPPNLTPPPMNLPPPLLQRNMAASNIGISHSQRLQTQIASKGHISMRTKSASLSPAAATHQSQIYGRSQTVAMQGPARTLTMQRGMNMSVNLMPAPAYNVNSVNMNMNTLNAMNGYSMSQPMMNSGYHSNHGYMNQTPQYPMQMQMGMMGTQPYAQQPMQTPPHGNMMYTAPGHHGYMNTGMSKQSLNGSYMRR

SEQ ID NO: 7011 - protein, 1781 aa, Homo sapiens
MVKLANPLYTEWILEAIQKIKKQKQRPSEERICHAVSTSHGLDKKTVSEQLELSVQDGSVLKVTNKGLASYKDPDNPGRFSSVKPGTFPKSAKGSRGSCNDLRNVDWNKLLRRAIEGLEEPNGSSLKNIEKYLRSQSDLTSTTNNPAFQQRLRLGAKRAVNNGRLLKDGPQYRVNYGSLDGKGAPQYPSAFPSSLPPVSLLPHEKDQPRADPIPICSFCLGTKESNREKKPEELLSCADCGSSGHPSCLKFCPELTTNVKALRWQCIECKTCSACRVQGRNADNMLFCDSCDRGFHMECCDPPLSRMPKGMWICQVCRPKKKGRKLLHEKAAQIKRRYAKPIGRPKNKLKQRLLSVTSDEGSMNAFTGRGSPDTEIKINIKQESADVNVIGNKDVVTEEDLDVFKQAQELSWEKIECESGVEDCGRYPSVIEFGKYEIQTWYSSPYPQEYARLPKLYLCEFCLKYMKSKNILLRHSKKCGWFHPPANEIYRRKDLSVFEVDGNMSKIYCQNLCLLAKLFLDHKTLYYDVEPFLFYVLTKNDEKGCHLVGYLSKEKLCQQKYNVSCIMIMPQHQRQGFGRFLIDFSYLLSRREGQAGSPEKPLSDLGRLSYLAYWKSVILEYLYHHHERHISIKAISRATGMCPHDIATTLQHLHMIDKRDGRFVIIRREKLILSHMEKLKTCSRANELDPDSLRWTPILISNAAVSEEEREAEKEAERLMEQASCWEKEEQEILSTRANSRQSPAKVQSKNKYLHSPESRPVTGERGQLLELSKESSEEEEEEEDEEEEEEEEEEEEDEEEEEEEEEEEEEENIQSSPPRLTKPQSVAIKRKRPFVLKKKRGRKRRRINSSVTTETISETTEVLNEPFDNSDEERPMPQLEPTCEIEVEEDGRKPVLRKAFQHQPGKKRQTEEEEGKDNHCFKNADPCRNNMNDDSSNLKEGSKDNPEPLKCKQVWPKGTKRGLSKWRQNKERKTGFKLNLYTPPETPMEPDEQVTVEEQKETSEGKTSPSPIRIEEEVKETGEALLPQEENRREETCAPVSPNTSPGEKPEDDLIKPEEEEEEEEEEEEEEEEEEGEEEEGGGNVEKDPDGAKSQEKEEPEISTEKEDSARLDDHEEEEEEDEEPSHNEDHDADDEDDSHMESAEVEKEELPRESFKEVLENQETFLDLNVQPGHSNPEVLMDCGVDLTASCNSEPKELAGDPEAVPESDEEPPPGEQAQKQDQKNSKEVDTEFKEGNPATMEIDSETVQAVQSLTQESSEQDDTFQDCAETQEACRSLQNYTRADQSPQIATTLDDCQQSDHSSPVSSVHSHPGQSVRSVNSPSVPALENSYAQISPDQSAISVPSLQNMETSPMMDVPSVSDHSQQVVDSGFSDLGSIESTTENYENPSSYDSTMGGSICGNGSSQNSCSYSNLTSSSLTQSSCAVTQQMSNISGSCSMLQQTSISSPPTCSVKSPQGCVVERPPSSSQQLAQCSMAANFTPPMQLAEIPETSNANIGLYERMGQSDFGAGHYPQPSATFSLAKLQQLTNTLIDHSLPYSHSAAVTSYANSASLSTPLSNTGLVQLSQSPHSVPGGPQAQATMTPPPNLTPPPMNLPPPLLQRNMAASNIGISHSQRLQTQIASKGHISMRTKSASLSPAAATHQSQIYGRSQTVAMQGPARTLTMQRGMNMSVNLMPAPAYNVNSVNMNMNTLNAMNGYSMSQPMMNSGYHSNHGYMNQTPQYPMQMQMGMMGTQPYAQQPMQTPPHGNMMYTAPGHHGYMNTGMSKQSLNGSYMRR

SEQ ID NO: 7012 - protein, 2948 aa, Homo sapiens [sequence omitted]

SEQ ID NO: 7013 - protein, 441 aa, Homo sapiens
KMFTLLDVVNCKARFIHDGPEDTSDQLVLEVSVMAWLPMPSCLRRGQTDLLPIQVNPVNDPPHIIFPHGSLMVILEHTQKPLGPEVLQAYDLDSACEGLTFQLLGTPSGLPVEHRDQPGEPVTEFSCWELEAGSLVYVHCGGPTQDLTFRVSNGLQASPPAMLKVVAVQLAIQIHRSTGLHLAQGSAMPILPTNLLVETSAVGQDVTVLFRVTGGLPFRELQKQGAGGVEDAEWWVTQAFHQQDVEQGHVRYLSTDPQHYTEDTVENLDLQVQVSWEILSNLSFLVTIQRATVWMLQLEPLHTQNTQQEALTTAHLEATLEEAGPSPPTFHCEVVQAPRKGNFQLQGTMLSDGQGFTQDDVQAAEVTYGAMAHASVAVEDTFCFHVTAPPYFSPLCTFSIHIGGDPDMPVLVVPEGGGCVLSADQLFIKSLNSARYLYEVM

SEQ ID NO: 7014 - protein, 445 aa, Homo sapiens
KMFTLLDVVNCKARFIHDGPEDTSDQLVLEVSVMAWLPMPSCLRRGQTDLLPIQVNPVNDPPHIIFPHGSLMVILEHTQKPLGPEVLQAYDLDSACEGLAFQLLGTPSGLPVDHRDQPGEPVTEFSCWELEAGSLVYVHCGGPTQDLTFRVSNGLQASPPAMLKVVAVQLAIQIHRSTGLHLAQGSAMPILPTNLLVETSAVGQDVTVLFHVTGGLPFRELQKQGAGGVEDAEWWVTQAFHQQDVEQGHVRYRSTDPQHYTEDTVENLDLQVQVSWEILSNLSFLVTIQRATVWMLQLEPLHTQNTQQEALTTAHLEATLEEAGPSPPTFHCEVVQAPRKGNFQLQGTMLSDGQGFTQDDVQAAEVTYGAMARASVAVEDTFCFHVTAPPYFSPLCTFSIHIGGDPDMPVLTNVLVVPEGGGCVLSADQLFVKSLNSARYLYEVM

SEQ ID NO: 7015 - protein, 391 aa, Homo sapiens
MSREPTPPLPGDMSTGPIAESWCYTQVKVVKFSYMWTINNFSFCREEMGEVLKSSTFSSGPSDKMKWCLRVNPKGLDDESKDYLSLYLLLVSCPKSEVRAKFKFSLLNAKREETKAMESQRAYRFVQGKDWGFKKFIRRDFLLDEANGLLPDDKLTLFCEVSVVQDSVNISGHTNTNTLKVPECRLAEDLGNLWENTRFTDCSFFVRGQEFKAHKSVLAARSPVFNAMFEHEMEESKKNRVEINDLDPEVFKEMMRFIYTGRAPNLDKMADNLLAAADKYALERLKVMCEEALCSNLSVENVADTLVLADLHSAEQLKAQAIDFINRCSVLRQLGCKDGKNWNSNQATDIMESERDRQHFDKEVMKAYIEDLKERESVPSYTTKVSFSLQL

SEQ ID NO: 7016 - protein, 239 aa, Homo sapiens
MPKSCAARQCCNRYSSRRKQLTFHRFPFSRPELLKEWVLNIGRGNFKPKQHTVICSEHFRPECFSAFGNRKNLKHNAVPTVFAFQDPTQQVRENTDPASERGNASSSQKEKVLPEAGAGEDSPGRNMDTALEELQLPPNAEGHVKQVSPRRPQATEAVGRPTGPAGLRRTPNKQPSDHSYALLDLDSLKKKLFLTLKENEKLRKRLQAQRLVMRRMSSRLRACKGHQGLQARLGPEQQS

SEQ ID NO: 7017 - protein, 434 aa, Homo sapiens
MSSFEGQMAEYPTISIDRFDRENLRARAYFLSHCHKDHMKGLRAPTLKRRLECSLKVYLYCSPVTKELLLTSPKYRFWKKRIISIEIETPTQISLVDEASGEKEEIVVTLLPAGHCPGSVMFLFQGNNGTVLYTGDFRLAQGEAARMELLHSGGRVKDIQSVYLDTTFCDPRFYQIPSREECLSGVLELVRSWITRSPYHVVWLNCKAAYGYEYLFTNLSEELGVQVHVNKLDMFRNMPEILRHLTTDRNTQIHACRHPKAEEYFQWSKLPCGITSRNRIPLHIISIKPSTMWFGERSRKTNVIVRTGESSYRACFSFHSSYSEIKDFLSYLCPVNAYPNVIPVGTTMDKVVEILKPLCRSSQSTEPKYKPLGKLKRARTVHRDSGSHSVTQARMRWCHHDSLYPLTPGIKRSSCLSLLTSWITGAYRHAQLMI

SEQ ID NO: 7018 - protein, 692 aa, Homo sapiens [sequence omitted]

SEQ ID NO: 7019 - protein, 213 aa, Homo sapiens
MPATPPPPKLKEAGKESVVSRLVCPNTNPNDTPTYVLEMEEAGSIFACNMEGRSNSSGEVKYTTCPDKTGSPRKPYIKGKVHAHSVKIGWKPSKDNGGTYISSYSLEVSENSDDNYLANGNPEELVYVKKANGNQDDTQGHPGSDVKYRLSKLIPIPVCNGAEITDYRLECGQIEKSVHLIYTGPCLSYEVKGLIPATTYFCRVQVNLTVPPM

SEQ ID NO: 7020 - protein, 1379 aa, Homo sapiens
HLCVLAFSFFKISFHDSEVSGIKTVRMSSPMPDCTSKCRSLKHALDVLSVVTKGSENQIKAFLSSHCYNAATIKDVFGRNALHLVSSCGKKGVLDWLIQKGVDLLVKDKESGWTALHRSIFYGHIDCVWSLLKHGVSLYIQDKEGLSALDLVMKDRPTHVVFKNTDPTDVYTWGDNTNFTLGHGSQNSKHHPELVDLFSRSGIYIKQVVLCKFHSVFLSQKGQVYTCGHGPGGRLGHGDEQTCLVPRLVEGLNGHNCSQVAAAKDHTVVLTEDGCVYTFGLNIFHQLGIIPPPSSCNVPRQIQAKYLKGRTIIGVAAGRFHTVLWTREAVYTMGLNGGQLGCLLDPNGEKCVTAPRQVSALHHKDIALSLVAASDGATVCVTTRGDIYLLADYQCKKMASKQLNLKKVLVSGGHMEYKVDPEHLKENGGQKICILAMDGAGRVFCWRSVNSSLKQCRWAYPRQVFISDIALNRNEILFVTQDGEGFRGRWFEEKRKSSEKKEILSNLHNSSSDVSYVSDINSVYERIRLEKLTFAHRAVSVSTDPSGCNFAILQSDPKTSLYEIPAVSSSSFFEEFGKLLREADEMDSIHDVTFQVGNRLFPAHKYILAVHSDFFQKLFLSDGNTSEFTDIYQKDEDSAGCHLFVVEKVHPDMFEYLLQFIYTDTCDFLTHGFKPRIHLNKNPEEYQGTLNSHLNKVNFHEDDNQKSAFEVYKSNQAQTVSERQKSKPKSCKKGKNIREDDPVRMLQTVAKKFDFSNLSSRLDGVRFENEKINVIAKNTGNKLKLSQKKCSFLCDVTMKSVDGKEFPCHKCVLCARLEYFHSMLSSSWIEASSCAALEMPIHSDILKVILDYLYTDEAVVIKESQNVDFICSVLVVADQLLITRLKEICEVALTEKLTLKNAAMLLEFAAMYSAKQLKLSCLQFIGLNMAALLEARSLDVLSDGVLKDLSEFYRKMIPAMDRRVITPYQDGPDISYLEVEDGDIFLKEEINMEQNHSETMFKKAKTKAKKKPRKRSDSSGGYNLSDIIQSPSSTGLLKSGKTNSVESLPELLTSDSEGSYAGVGSPRDLQSPDFTTGFHSDKIEAKVKPYVNGTSPVYSREDLKPWEKSPILKISAPQPIPSNRIDTTSSASWVAGSFSPVSPPVVDLRTIMEIEESRQKCGATPKSHLGKTVSHGVKLSQKQRKMIALTTKENNSGMNSMETVLFTPSKAPKPVNAWASSLHSVSSKSFRDFLLEEKKSVTSHSSGDHVKKVSFKGIENSQAPKIVRCSTHGTPGPEGNHISDLPLLDSPNPWLSSSVTAPSMVAPVTFASIVEEELQQEAALIRSREKPLALIQIEEHAIQDLLVFYEAFGNPEEFVIVERTPQGPLAVPMWNKHGC

SEQ ID NO: 7021 - protein, 536 aa, Homo sapiens
MKKSETYAPLFCLPSFHKFCKGLLANILVEDVNICLQACSSLPALSSSLPDDLLQRCVDVCHVQLVHCGTRIRQAFGKLLKSIPLDVILSNNNHTEIQEISLALRSHMSKAPSNTFHPQDFSDVISFILYGNSHRTGKDNWLERLFYSCQRLDKHDQSTIPRNLLKTDAILWQWAVWEAAQFTVLSKLRTPLGRAQDTFQTIEGIIRSLAAHTLNPDQDVSQWTTADSDEGHGNNQLRLVLLLQYLEYLEKLMYNAYEGCANALTSPPKVIRTFFYTNRQTCQDWLTRIRLSIMRVGLLAGQPAVTVRHGFDLLTEMKTTSLSQGNELEVTIMMVVEALCELHCPEAIQGIAVWSSSIVGKNLLWINSVAQQAEGRFEKASVEYQEHLCAMIGVHCCISSFDKSVLTLANAGCNSASPKHCLNGESRKTVLSKPTDSSPEVINYLGNKACECYISIADWAAVQEWQNAIHDLKKSTSSTSFNLKADFNYIKSLSSFESGKFVKCTEQLELLPGENINLLAGGSKEKIDMKKLLRNM

SEQ ID NO: 7022 - protein, 285 aa, Homo sapiens
MLYLIGLGLGDAKDITVKGLEVVRRCSRVYLEAYTSVLTVGKEALEEFYGRKLVVADREEVEQEADNILKDADISDVAFLVVGDPFGATTHSDLVLRATKLGIPYRVIHNASIMNAEAAGGYRYISLERQVLLVFGQTLGGPESFFDKVKKNRQNGMHTLCLLDIKVKEQSLENLIKGRKIYEPPRYMSVNQAAQQLLEIVQNQRIRGEEPAVTEETLCVGLARVGADDQKIAAGTLRQMCTVDLGEPLHSLIITGGSIHPMEMEMLSLFSIPENSSESQSINGL

SEQ ID NO: 7023 - protein, 1134 aa, Homo sapiens
GLEMDPIDCTPPEYILPGSRERPLCPLQPQNRDWKPLQCLKVLTMSGWNPPPGNRKMHGDLMYLFVITAEDRQVSITASTRGFYLNQSTAYHFNPKPASPRFLSHSLVELLNQISPTFKKNFAVLQKKRVQRHPFERIATPFQVYSWTAPQAEHAMDCVRAEDAYTSRLGYEEHIPGQTRDWNEELQTTRELPRKNLPERLLRERAIFKVHSDFTAAATRGAMAVIDGNVMAINPSEETKMQMFIWNNIFFSLGFDVRDHYKDFGGDVAAYVAPTNDLNGVRTYNAVDVEGLYTLGTVVVDYRGYRVTAQSIIPGILERDQEQSVIYGSIDFGKTVVSHPRYLELLERTSRPLKILRHQVLNDRDEEVELCSSVECKGIIGNDGRHYILDLLRTFPPDLNFLPVPGEELPEECARAGFPRAHRHKLCCLRQELVDAFVEHRYLLFMKLAALQLMQQNASQLETPSSLENGGPSSLESKSEDPPGQEAGSEEEGSSASGLAKVKELAETIAADDGTDPRSREVIRNACKAVGSISSTAFDIRFNPDIFSPGVRFPESCQDEVRDQKQLLKDAAAFLLSCQIPGLVKDCMEHAVLPVDGATLAEVMRQRGINMRYLGKVLELVLRSPARHQLDHVFKIGIGELITRSAKHIFKTYLQGVELSGLSAAISHFLNCFLSSYPNPVAHLPADELVSKKRNKRRKNRPPGAADNTAWAVMTPQELWKNICQEAKNYFDFDLECETVDQAVETYGLQKITLLREISLKTGIQVLLKEYSFDSRHKPAFTEEDVLNIFPVVKHVNPKASDAFHFFQSGQAKVQQGFLKEGCELINEALNLFNNVYGAMHVETCACLRLLARLHYIMGDYAEALSNQQKAVLMSERVMGTEHPNTIQEYMHLALYCFASSQLSTALSLLYRARYLMLLVFGEDHPEMALLDNNIGLVLHGVMEYDLSLRFLENALAVSTKYHGPKALKVALSHHLVARVYESKAEFRSALQHEKEGYTIYKTQLGEDHEKTKESSEYLKCLTQQAVALQRTMNEIYRNGSSANIPPLKFTAPSMASVLEQLNVINGILFIPLSQKDLENLKAEVARRHQLQEASRNRDRAEEPMATEPAPAGAPGDLGSQPPAAKDPSPSVQG

SEQ ID NO: 7024 - protein, 296 aa, Homo sapiens
CCGSAARWEFGFGWLQPASRVKTPTPGAAGSTHGDPRGADWYYHVPVKRSEKAVDAPPASQIPGLSNLGDSHSENLPGTRRYWIKETDSEYVKLAKQGGRPDLLKHFAPGTRKGSPVAYSLPDWYIHHSKPPTASQQEVRAVSMLDYMVHEEFNPNQANGSYASRRGPFDFDTKTVWQREAEELEKEKKKLRLPAIDSKYLSKAGTPLGPKNPAGSRLSFPHVNGYKDEWLQQQQRADSDKRTPKTSRASVLSQSPRDLEGPQDAARLQDAEASEGPEDTPGPEESVSASTPAELK

SEQ ID NO: 7025 - protein, 128 aa, Homo sapiens
MQIPHMVSETHTVWLEDSTVTSQAQPSASPPLAALGCWPSSDGSRAQSAVSQEKPASSLRGLEEPFSLSLVFDASAPAHCGVRVGLSAQPCPNKSSKALFHLQSLESFVACVIEHLSSPQLFTLKFRK

SEQ ID NO: 7026 - protein, 2548 aa, Homo sapiens
MNINDGGRRRFEDNEHTLRIYPGAISEGTIYCPIPARKNSTAAEVIESLINKLHLDKTKCYVLAEVKEFGGEEWILNPTDCPVQQMMLWPRMALENRLSGEDYRFLLREKNLDGSIHYGSLQSWLRVTEERRRMMERGFLPQPQQKDFDDLCSLPDLNEKTLLENLRDRFKHEKIYTYVGSILIVINPFKFLPIYNPKYVKMYDNHQLGKPEPHIYAVADVAYHAMLQRKKNQCIVISGESGSGKTQSTNFLIHHLTALSQKGFASGVEQIILGAGPVLEAFGNAKTAHNNNSSRFGKFIQVNYQETGTVLGAYVEKYLLEKSRLVYQEHNERNYHVFYYLLAGASEDERSAFHLKQPEEYHYLNQITKKPLRQSWDDYCYDSEPDCFTVEGEDLRHDFERLQLAMEMVGFLPKTRRQIFSLLSAILHLGNICYKKKTYRDDSIDICNPEVLPIVSELLEVKEEMLFEALVTRKTVTVGEKLILPYKLAEAVTVRNSMAKSLYSALFDWIVFRINHALLNSKDLEHNTKTLSIGVLDIFGFEDYENNSFEQFCINFANERLQHYFNQHIFKLEQEEYRTEGISWHNIDYIDNTCCINLISKKPTGLLHLLDEESNFPQATNQTLLDKFKHQHEDNSYIEFPAVMEPAFIIKHYAGKVKYGVKDFREKNTDHMRPDIVALLRSSKNAFISGMIGIDPVAVFRWAILRAFFRAMVAFREAGKRNIHRKTGHDDTAPCAILKSMDSFSFLQHPVHQRSLEILQRCKEEKYSITRKNPRTPLSDLQGMNALNEKNQHDTFDIAWNGRTGIRQSRLSSGTSLLDKDGIFANSTSSKLLERAHGILTRNKNFKSKPALPKHLLEVNSLKHLTRLTLQDRITKSLLHLHKKKKPPSISAQFQASLSKLMETLGQAEPYFVKCIRSNAEKLPLRFSDVLVLRQLRYTGMLETVQIRQSGYSSKYSFQDFVSHFHVLLPRNIIPSKFNIQDFFRKINLNPDNYQVGKTMVFLKEQERQHLQDLLHQEVLRRIILLQRWFRVLLCRQHFLHLRQASVIIQRFWRNYLNQKQVRDAAVQKDAFVMASAAALLQASWRAHLERQRYLELRAAAIVIQQKWRDYYRRRHMAAICIQARWKAYRESKRYQEQRKKIILLQSTCRGFRARQRFKALKEQRLRETKPEVGLVNIKGYGSLEIQGSDPSEWEDCSFDNRIKAIEECKSVIESNRISRESSVDCLKESPNKQQERAQSQSGVDLQEDVLVRERPRSLEDLHQKKVGRAKRESRRMRELEQAIFSLELLKVRSLGGISPSEDRRWSTELVPEGLQSPRGTPDSESSQGSLELLSYEESQKSKLESVISDEGDLQFPSPKISSSPKFDSRDNALSASNETSSAEHLKDGTMKEMVVCSSESITCKPQLKDSFISNSLPTFFYIPQQDPLKTNSQLDTSIQRNKLLENEDTAGEALTLDINRETRRYHCSGKDQIVPSLNTESSNPVLKKLEKLNTEKEERQKQLQQQNEKEMMEQIRQQTDILEKERKAFKTIEKPRIGECLVAPSSYQSKQRVERPSSLLSLNTSNKGELNVLGSLSLKDAALAQKDSSSAHLPPKDRPVTVFFERKGSPCQSSTVKELSKTDRMGTQLNVACKLSNNRISKREHFRPTQSYSHNSDDLSREGNARPIFFTPKDNMSIPLVSKEALNSKNPQLHKEDEPAWKPVKLAGPGQRETSQRFSSVDEQAKLHKTMSQGEITKLAVRQKASDSDIRPQRAKMRFWAKGKQGEKKTTRVKPTTQSEVSPLFAGTDVIPAHQFPDELAAYHPTPPLSPELPGSCRKEFKENKEPSPKAKRKRSVKISNVALDSMHWQNDSVQIIASVSDLKSMDEFLLKKVNDLDNEDSKKDTLVDVVFKKALKEFRQNIFSFYSSALAMDDGKSIRYKDLYALFEQILEKTMRLEQRDSLGESPVRVWVNTFKVFLDEYMNEFKTSDCTATKVPKTERKKRRKKETDLVEEHNGHIFKATQYSIPTYCEYCSSLIWIMDRASVCKLCKYACHKKCCLKTTAKCSKKYDPELSSRQFGVELSRLTSEDRTVPLVVEKLINYIEMHGLYTEGIYRKSGSTNKIKELRQGLDTDAESVNLDDYNIHVIASVFKQWLRDLPNPLMTFELYEEFLRAMGLQERKETIRGVYSVIDQLSRTHLNTLERLIFHLVRIALQEDTNRMSANALAIVFAPCILRCPDTTDPLQSVQDISKTTTCVELIVVEQMNKYKARLKDISSLEFAENKAKTRLSLIRRSMGKGRIRRGNYPGPSSPVVVRLPSVSDVSEETLTSEAAMETDITEQQQAAMQQEERVLTEQIENLQKEKEELTFEMLVLEPRASDDETLESEASIGTADSSENLNMESEYAISEKSERSLALSSLKTAGKSEPSSKLRKQLKKQQDSLDVVDSSVSSLCLSNTASSHGTRKLFQIYSKSPFYRAASGNEALGMEGPLGQTKFLEDKPQFISRGTFNPEKGKQKLKNVKNSPQKTKETPEGTVMSGRRKTVDPDCTSNQQLALFGNNEFMV

SEQ ID NO: 7027 - protein, 1397 aa, Homo sapiens
SVDCLKESPNKQQERAQSQSGVDLQEDVLVRERPRSLEDLHQKKVGRAKRESRRMRELEQAIFSLELLKVRSLGGISPSEDRRWSTELVPEGLQSPRGTPDSESSQGSLELLSYEESQKSKLESVISDEGDLQFPSPKISSSPKFDSRDNALSASNETSSAEHLKDGTMKEMVVCSSESITCKPQLKDSFISNSLPTFFYIPQQDPLKTNSQLDTSIQRNKLLENEDTAGEALTLDINRETRRYHCSGKDQIVPSLNTESSNPVLKKLEKLNTEKEERQKQLQQQNEKEMMEQIRQQTDILEKERKAFKTIEKPRIGECLVAPSSYQSKQRVERPSSLLSLNTSNKGELNVLGSLSLKDAALAQKDSSSAHLPPKDRPVTVFFERKGSPCQSSTVKELSKTDRMGTQLNVACKLSNNRISKREHFRPTQSYSHNSDDLSREGNARPIFFTPKDNMSIPLVSKEALNSKNPQLHKEDEPAWKPVKLAGPGQREVARPAHKKKARMARTRSDFLTRGTFADGEGDTEEDDYDDIIEPLLSLDQASHCELGPAPSLGQASHSDSEMTSQRFSSVDEQAKLHKTMSQGEITKLAVRQKASDSDIRPQRAKMRFWAKGKQGEKKTTRVKPTTQSEVSPLFAGTDVIPAHQFPDELAAYHPTPPLSPELPGSCRKEFKENKEPSPKAKRKRSVKISNVALDSMHWQNDSVQIIASVSDLKSMDEFLLKKVNDLDNEDSKKDTLVDVVFKKALKEFRQNIFSFYSSALAMDDGKSIRYKDLYALFEQILEKTMRLEQRDSLGESPVRVWVNTFKVFLDEYMNEFKTSDCTATKVPKTERKKRRKKETDLVEEHNGHIFKATQYSIPTYCEYCSSLIWIMDRASVCKLCKYACHKKCCLKTTAKCSKKYDPELSSRQFGVELSRLTSEDRTVPLVVEKLINYIEMHGLYTEGIYRKSGSTNKIKELRQGLDTDAESVNLDDYNIHVIASVFKQWLRDLPNPLMTFELYEEFLRAMGLQERKETIRGVYSVIDQLSRTHLNTLERLIFHLVRIALQEDTNRMSANALAIVFAPCILRCPDTTDPLQSVQDISKTTTCVELIVVEQMNKYKARLKDISSLEFAENKAKTRLSLIRRSMGKGRIRRGNYPGPSSPVVVRLPSVSDVSEETLTSEAAMETDITEQQQAAMQQEERVLTEQIENLQKEKEELTFEMLVLEPRASDDETLESEASIGTADSSENLNMESEYAISEKSERSLALSSLKTAGKSEPSSKLRKQLKKQQDSLDVVDSSVSSLCLSNTASSHGTRKLFQIYSKSPFYRAASGNEALGMEGPLGQTKFLEDKPQFISRGTFNPEKGKQKLKNVKNSPQKTKETPEGTVMSGRRKTVDPDCTSNQQLALFGNNEFMV

SEQ ID NO: 7028 - protein, 1324 aa, Homo sapiens
MASPPRHGPPGPASGDGPNLNNNNNNNNHSVRKCGYLRKQKHGHKRFFVLRGPGAGGDKATAGGGSAPQPPRLEYYESEKNWRSKAGAPKRVIALDCCLNINKRADPKHKYLIALYTKDEYFAVAAENEQEQEGWYRALTDLVSEGRAAAGDAPPAAAPAASCSASLPGAVGGSAGAAGAEDSYGLVAPATAAYREVWQVNLKPKGLGQSKNLTGVYRLCLSARTIGFVKLNCEQPSVTLQLMNIRRCGHSDSFFFIEVGRSAVTGPGELWMQADDSVVAQNIHETILEAMKALKELFEFRPRSKSQSSGSSATHPISVPGARRHHHLVNLPPSQTGLVRRSRTDSLAATPPAAKCSSCRVRTASEGDGGAAAGAAAAGARPVSVAGSPLSPGPVRAPLSRSHTLIGGCRAAGTKWHCFPAGGGLQHSRSMSMPVEHLPPAATSPGSLSSSSDHGWGSYPPPPGPHPLLPHPLHHGPGQRPSSGSASASGSPSDPGFMSLDEYGSSPGDLRAFCSHRSNTPESIAETPPARDGGGGGEFYGYMTMDRPLSHCGRSYRRVSGDAAQDLDRGLRKRTYSLTTPARQRPVPQPSSASLDEYTLMRATFSGSAGRLCPSCPASSPKVAYHPYPEDYGDIEIGSHRSSSSNLGADDGYMPMTPGAALAGSGSGSCRSDDYMPMSPASVSAPKQILQPRAAAAAAAAVPFAGPAGPAPTFAAGRTFPASGGGYKASSPAESSPEDSGYMRMWCGSKLSMEHADGKLLPNGDYLNVSPSDAVTTGTPPDFFSAALHPGGEPLRGVPGCCYSSLPRSYKAPYTCGGDSDQYVLMSSPVGRILEEERLEPQATPGPTQAASAFGAGPTQPPHPVVPSPVRPSGGRPEGFLGQRGRAVRPTRLSLEGLPSLPSMHEYPLPPEPKSPGEYINIDFGEPGARLSPPAPPLLASAASSSSLLSASSPALSLGSGTPGTSSDSRQRSPLSDYMNLDFSSPKSPKPGAPSGHPVGSLDGLLSPEASSPYPPLPPRPSASPSSSLQPPPPPPAPGELYRLPPASAVATAQGPGAASSLSSDTGDNGDYTEMAFGVAATPPQPIAAPPKPEAARVASPTSGVKRLSLMEQVSGVEAFLQASQPPDPHRGAKVIRADPQGGRRRHSSETFSSTTTVTPVSPSFAHNPKRHNSASVENVSLRKSSEGGVGVGPGGGDEPPTSPRQLQPAPPLAPQGRPWTPGQPGGLVGCPGSGGSPMRRETSAGFQNGLKYIAIDVREEPGLPPQPQPPPPPLPQPGDKSSWGRTRSLGGLISAVGVGSTRGGCGGPGPGAPAPCPTTYAQH

SEQ ID NO: 7029 - protein, 1338 aa, Homo sapiens
MASPPRHGPPGPASGDGPNLNNNNNNNNHSVRKCGYLRKQKHGHKRFFVLRGPGAGGDEATAGGGSAPQPPRLEYYESEKKWRSKAGAPKRVIALDCCLNINKRADAKHKYLIALYTKDEYFAVAAENEQEQEGWYRALTDLVSEGRAAAGDAPPAAAPAASCSASLPGALGGSAGAAGAEDSYGLVAPATAAYREVWQVNLKPKGLGQSKNLTGVYRLCLSARTIGFVKLNCEQPSVTLQLMNIRRCGHSDSFFFIEVGRSAVTGPGELWMQADDSVVAQNIHETILEAMKALKELFEFRPRSKSQSSGSSATHPISVPGARRHHHLVNLPPSQTGLVRRSRTDSLAATPPAAKCSSCRVRTASEGDGGAAAGAAAAGARPVSVAGSPLSPGPVRAPLSRSHTLSGGCGGRGSKVALLPAGGALQHSRSMSMPVAHSPPAATSPGSLSSSSGHGSGSYPPPPGPHPPLPHPLHHGPGQRPSSGSASASGSPSDPGFMSLDEYGSSPGDLRAFCSHRSNTPESIAETPPARDGGGGGEFYGYMTMDRPLSHCGRSYRRVSGDAAQDLDRGLRKRTYSLTTPARQRPVPQPSSASLDEYTLMRATFSGSAGRLCPSCPASSPKVAYHPYPEDYGDIEIGSHRSSSSNLGADDGYMPMTPGAALAGSGSGSCRSDDYMPMSPASVSAPKQILQPRAAAAAAAAVPSAGPAGPAPTSAAGRTFPASGGGYKASSPAESSPEDSGYMRMWCGSKLSMEHADGKLLPNGDYLNVSPSDAVTTGTPPDFFSAALHPGGEPLRGVPGCCYSSLPRSYKAPYTCGGDSDQYVLMSSPVGRILEEERLEPQATPGPSQAASAFGAGPTQPPHPVVPSPVRPSGGRPEGFLGQRGRAVRPTRLSLEGLPSLPSMHEYPLPPEPKSPGEYINIDFGEPGARLSPPAPPLLASAASSSSLLSASSPASSLGSGTPGTSSDSRQRSPLSDYMNLDFSSPKSPKPGAPSGHPVGSLDGLLSPEASSPYPPLPPRPSASPSSSLQPPPPPPAPGELYRLPPASAVATAQGPGAASSLSSDTGDNGDYTEMAFGVAATPPQPIAAPPKPEAARVASPTSGVKRLSLMEQVSGVEAFLQASQPPDPHRGAKVIRADPQGGRRRHSSETFSSTTTVTPVSPSFAHNPKRHNSASVENVSLRKSSEGGVGVGPGGGDEPPTSPRQLQPAPPLAPQGRPWTPGQPGGLVGCPGSGGSPMRRETSAGFQNGLNYIAIDVREEPGLPPQPQPPPPPLPQPGDKSSWGRTRSLGGLISAVGVGSTGGGCGGPGPGALPPANTYASIDFLSHHLKEATIVKE

SEQ ID NO: 7030 - protein, 3957 aa, Homo sapiens
MMNEDAAQKSDSGEKFNGSSQRRKRPKKSDSNASFLRAARAGNLDKVVEYLKGGIDINTCNQNGLNALHLAAKEGHVGLVQELLGRGSSVDSATKKGNTALHIASLAGQAEVVKVLVKEGANINAQSQNGFTPLYMAAQENHIDVVKYLLENGANQSTATEDGFTPLAVALQQGHNQAVAILLENDTKGKVRLPALHIAARKDDTKSAALLLQNDHNADVQSKMMVNRTTESGFTPLHIAAHYGNVNVATLLLNRGAAVDFTARNGITPLHVASKRGNTNMVKLLLDRGGQIDAKTRDGLTPLHCAARSGHDQVVELLLERGAPLLARTKNGLSPLHMAAQGDHVECVKHLLQHKAPVDDVTLDYLTALHVAAHCGHYRVTKLLLDKRANPNARALNGFTPLHIACKKNRIKVMELLVKYGASIQAITESGLTPIHVAAFMGHLNIVLLLLQNGASPDVTNIRGETALHMAARAGQVEVVRCLLRNGALVDARAREEQTPLHIASRLGKTEIVQLLLQHMAHPDAATTNGYTPLHISAREGQVDVASVLLEAGAAHSLATKKGFTPLHVAAKYGSLDVAKLLLQRRAAADSAGKNGLTPLHVAAHYDNQKVALLLLEKGASPHATAKNGYTPLHIAAKKNQMQIASTLLNYGAETNIVTKQGVTPLHLASQEGHTDMVTLLLDKGANIHMSTKSGLTSLHLAAQEDKVNVADILTKHGADQDAHTKLGYTPLIVACHYGNVKMVNFLLKQGANVNAKTKNGYTPLHQAAQQGHTHIINVLLQHGAKPNATTANGNTALAIAKRLGYISVVDTLKVVTEEVTTTTTTITEKHKLNVPETMTEVLDVSDEEGDDTMTGDGGEYLRPEDLKELGDDSLPSSQFLDGMNYLRYSLEGGRSDSLRSFSSDRSHTLSHASYLRDSAVMDDSVVIPSHQVSTLAKEAERNSYRLSWGTENLDNVALSSSPIHSGFLVSFMVDARGGAMRGCRHNGLRIIIPPRKCTAPTRVTCRLVKRHRLATMPPMVEGEGLASRLIEVGPSGAQFLGKLHLPTAPPPLNEGESLVSRILQLGPPGTKFLGPVIVEIPHFAALRGKERELVVLRSENGDSWKEHFCDYTEDELNEILNGMDEVLDSPEDLEKKRICRIITRDFPQYFAVVSRIKQDSNLIGPEGGVLSSTVVPQVQAVFPEGALTKRIRVGLQAQPMHSELVKKILGNKATFSPIVTLEPRRRKFHKPITMTIPVPKASSDVMLNGFGGDAPTLRLLCSITGGTTPAQWEDITGTTPLTFVNECVSFTTNVSARFWLIDCRQIQESVTFASQVYREIICVPYMAKFVVFAKSHDPIEARLRCFCMTDDKVDKTLEQQENFAEVARSRDVEVLEGKPIYVDCFGNLVPLTKSGQHHIFSFFAFKENRLPLFVKVRDTTQEPCGRLSFMKEPKSTRGLVHQAICNLNITLPIYTKESESDQEQEEEIDMTSEKNDETESTETSVLKSHLVNEVPVLASPDLLSEVSEMKQDLIKMTAILTTDVSDKAGSIKVKELVKAAEEEPGEPFEIVERVKEDLEKVNEILRSGTCTRDESSVQSSRSERGLVEEEWVIVSDEEIEEARQKAPLEITEYPCVEVRIDKEIKGKVEKDSTGLVNYLTDDLNTCVPLPKEQLQTVQDKAGKKCEALAVGRSSEKEGKDIPPDETQSTQKQHKPSLGIKKPVRRKLKEKQKQKEEGLQASAEKAELKKGSSEESLGEDPGLAPEPLPTVKATSPLIEETPIGSIKDKVKALQKRVEDEQKGRSKLPIRVKGKEDVPKKTTHRPHPAASPSLKSERHAPGSPSPKTERHSTLSSSAKTERHPPVSPSSKTEKHSPVSPSAKTERHSPASSSSKTEKHSPVSPSTKTERHSPVSSTKTERHPPVSPSGKTDKRPPVSPSGRTEKHPPVSPGRTEKRLPVSPSGRTDKHQPVSTAGKTEKHLPVSPSGKTEKQPPVSPTSKTERIEETMSVRELMKAFQSGQDPSKHKTGLFEHKSAKQKQPQEKGKVRVEKEKGPILTQREAQKTENQTIKRGQRLPVTGTAESKRGVRVSSIGVKKEDAAGGKEKVLSHKIPEPVQSVPEEESHRESEVPKEKMADEQGDMDLQISPDRKTSTDFSEVIKQELEDNDKYQQFRLSEETEKAQLHLDQVLTSPFNTTFPLDYMKDEFLPALSLQSGALDGSSESLKNEGVAGSPCGSLMEGTPQISSEESYKHEGLAETPETSPESLSFSPKKSEEQTGETKESTKTETTTEIRSEKEHPTTKDITGGSEERGATVTEDSETSTESFQKEATLGSPKDTSPKRQDDCTGSCSVALAKETPTGLTEEAACDEGQRTFGSSAHKTQTDSEAQESTATSDETKALPLPEASVKTDTGTESKPQGVIRSPQGLELALPSRDSEVLSAVADDSLAVSHKDSLEASPVLEDNSSHKTPDSLEPSPLKESPCRDSLESSPVEPKMKAGIFPSHFPLPAAVAKTELLTEVASVRSRLLRDPDGSAEDDSLEQTSLMESSGKSPLSPDTPSSEEVSYEVTPKTTDVSTPKPAVIHECAEEDDSENGEKKRFTPEEEMFKMVTKIKMFDELEQEAKQKRDYKKEPKQEESSSSSDPDADCSVDVDEPKHTGSGEDESGVPVLVTSESRKVSSSSESEPELAQLKKGADSGLLPEPVIRVQPPSPLPSSMDSNSSPEEVQFQPVVSKQYTFKMNEDTQEEPGKSEEEKDSESHLAEDRHAVSTEAEDRSYDKLNRDTDQPKICDGHGCEAMSPSSSARPVSSGLQSPTGDDVDEQPVIYKESLALQGTHEKDTEGEELDVSRAESPQADCPSESFSSSSSLPHCLVSEGKELDEDISATSSIQKTEVTKTDETFENLPKDCPSQDSSITTQTDRFSMDVPVSDLAENDEIYDPQITSPYENVPSQSFFSSEESKTQTDANHTTSFHSSEVYSVTITSPVEDVVVASSSSGTVLSKESNFEGQDIKMESQLESTLWEMQSDSVSSSFEPTMSATTTVVGEQISKVIITKTDVDSDSWSEIREDDEAFEARVKEEEQKIFGLMVDRQSQGTTPDTTPARTPTEEGTPTSEQNPFLFQEGKLFEMTRSGAIDMTKRSYADESFHFFQIGQESREETLSEDVKEGATGADPLPLETSAESLALSESKETVDDEADLLPDSVSEEVEEIPASDAQLNSQMGISASTETPTKEAVSVGTKDLPTVQTGDIPPLSGVKQISCPDSSEPAVQVQLDFSTLTRSVYSDRGDDSPDSSPEEQKSVIEIPTAPMENVPFTESKSKIPVRTMPTSTPAPPSAEYESSVSEDFLSSVDEENKADEAKPKSKLPVKVPLQRVEQQLSDLDTSVQKTVAPQGQDMASIAPDNRSKSESDASSLDSKTKCPVKTRSYTETETESRERAEELELESEEGATRPKILTSRLPVKSRSTTSSCRGGTSPTKESKEHFFDLYRNSIEFFEEISDEASKLVDRLTQSEREQEIVSDDESSSALEVSVIENLPPVETEHSVPEDIFDTRPIWDESIETLIERIPDENGHDHAEDPQDEQERIEERLAYIADHLGFSWTELARELDFTEEQIHQIRIENPNSLQDQSHALLKYWLERDGKHATDTNLVECLTKINRMDIVHLMETNTEPLQERISHSYAEIEQTITLDHSEGFSVLQEELCTAQHKQKEEQAVSKESETCDHPPIVSEEDISVGYSTFQDGVPKTEGDSSSTALFPQTHKEQVQQDFSGKMQDLPEESSLEYQQEYFVTTPGTETSETQKAMIVPSSPSKTPEEVSTPAEEEKLYLQTPTSSERGGSPIIQEPEEPSEHREESSPRKTSLVIVESADNQPETCERLDEDAAFEKGDDMPEIPPETVTEEEYIDEHGHTVVKKVTRKIIRRYVSSEGTEKEEIMVQGMPQEPVNIEEGDGYSKVIKRVVLKSDTEQSEDNNE

SEQ ID NO: 7031 - protein, 3924 aa, Homo sapiens [sequence omitted]

SEQ ID NO: 7032 - protein, 466 aa, Homo sapiens
VHSSMGAPEIRMSKPLEAEKQGLDSPSEHTDTERNGPDTNHQNPQNKTSPFSVSPTGPSTKIKAEDPSGDSAPAAPLPPQPAQPHLPQAQLMLTGSQLAGDIQQLLQLQQLVLVPGHHLQPPAQFLLPQAQQSQPGLLPTPNLFQLPQQTQGALLTSQPRAGLPTQAVTRPTLPDPHLSHPQPPKCLEPPSHPEEPSDLEELEQFARTFKQRRIKLGFTQGDVGLAMGKLYGNDFSQTTISRFEALNLSFKNMCKLKPLLEKWLNDAETMSVDSSLPSPNQLSSPSLGFDGLPGRRRKKRTSIETNVRFALEKSFLANQKPTSEEILLIAEQLHMEKEVIRVWFCNRRQKEKRINPCSAAPMLPSPGKPASYSPHMVTPQGGAGTLPLSQASSSLSTTVTTLSSAVGTLHPSRTAGGGGGGGGAAPPLNSIPSVTPPPPATTNSTNPSPQGSHSAIGLSGLNPSTG

SEQ ID NO: 7033 - protein, 463 aa, Homo sapiens
MVHSSMGAPEIRMSKPLEAEKQGLDSPSEHTDTERNGPDTNHQNPQNKTSPFSVSPTGPSTKIKAEDPSGDSAPAAPLPPQPAQPHLPQAQLMLTGSQLAGDIQQLLQLQQLVLVPGHHLQPPAQFLLPQAQQSQPGLLPTPNLFQLPQQTQGALLTSQPRAGLPTQPPKCLEPPSHPEEPSDLEELEQFARTFKQRRIKLGFTQGDVGLAMGKLYGNDFSQTTISRFEALNLSFKNMCKLKPLLEKWLNDAETMSVDSSLPSPNQLSSPSLGFDGLPGRRRKKRTSIETNVRFALEKSFLANQKPTSEEILLIAEQLHMEKEVIRVWFCNRRQKEKRINPCSAAPMLPSPGKPASYSPHMVTPQGGAGTLPLSQASSSLSTTVTTLSSAVGTLHPSRTAGGGGGGGGAAPPLNSIPSVTPPPPATTNSTNPSPQGSHSAIGLSGLNPSTGPGLWWNPAPYQP

SEQ ID NO: 7034 - protein, 478 aa, Homo sapiens
VHSSMGAPEIRMSKPLEAEKQGLDSPSEHTDTERNGPDTNHQNPQNKTSPFSVSPTGPSTKIKAEDPSGDSAPAAPLPPQPAQPHLPQAQLMLTGSQLAGDIQQLLQLQQLVLVPGHHLQPPAQFLLPQAQQSQPGLLPTPNLFQLPQQTQGALLTSQPRAGLPTQAVTRPTLPDPHLSHPQPPKCLEPPSHPEEPSDLEELEQFARTFKQRRIKLGFTQGDVGLAMGKLYGNDFSQTTISRFEALNLSFKNMCKLKPLLEKWLNDAETMSVDSSLPSPNQLSSPSLGFDGLPGRRRKKRTSIETNVRFALEKSFLANQKPTSEEILLIAEQLHMEKEVIRVWFCNRRQKEKRINPCSAAPMLPSPGKPASYSPHMVTPQGGAGTLPLSQASSSLSTTVTTLSSAVGTLHPSRTAGGGGGGGGAAPPLNSIPSVTPPPPATTNSTNPSPQGSHSAIGLSGLNPSTGPGLWWNPAPYQP

SEQ ID NO: 7035 - protein, 914 aa, Homo sapiens
MSQSQNAIFTSPTGEENLMNSNHRDSESITDVCSNEDLPEVELVSLLEEQLPQYRLKVDTLFLYENQDWTQSPHQRQHASDALSPVLAEETFRYMILGTDRVEQMTKTYNDIDMVTHLLAERDRDLELAARIGQALLKRNHVLSEQNESLEEQLGQAFDQVNQLQHELCKKDELLRIVSIASEESETDSSCSTPLRFNESFSLSQGLLQLEMLQEKLKELEEENMALRSKACHIKTETVTYEEKEQQLVSDCVKELRETNAQMSRMTEELSGKSDELIRYQEELSSLLSQIVDLQHKLKEHVIEKEELKLHLQASKDAQRQLTMELHELQDRNMECLGMLHESQEEIKELRSRSGPTAHLYFSQSYGAFTGESLAAEIEGTMRKKLSLDEESSLFKQKAQQKRVFDTVRIANDTRGRSISFPALLPIPGSNRSSVIMTAKPFESGLQQTEDKSLLNQGSSSEEVAGSSQKMGQPGPSGDSDLATALHRLSLRRQNYLSEKQFFAEEWQRKIQVLADQKEGVSGCVTPTESLASLCTTQSEITDLSSASCLRGFMPEKLQIVKPLEGSQTLYHWQQLAQPNLGTILDPRPGVITKGFTQLPGDAIYHISDLEEDEEEGITFQVQQPLEVEEKLSTSKPVTGIFLPPITSAGGPVTVATANPGKCLSCTNSTFTFTTCRILHPSDITQVTPSSGFPSLSCGSSGSSSSNTAVNSPALSYRLSIGESITNRRDSTTTFSSTMSLAKLLQERGISAKVYHSPISENPLQPLPKSLAIPSTPPNSPSHSPCPSPLPFEPRVHLSENFLASRPAETFLQEMYGLRPSRNPPDVGQLKMNLVDRLKRLGIARVVKNPGAQENGRCQEAEIGPQKPDSAVYLNSGSSLLGGLRRNQSLPVIMGSFAAPVCTSSPKMGVLKED

SEQ ID NO: 7036 - protein, 260 aa, Homo sapiens
MMDPCSVGVQLRTTNECHKTYYTRHTGFKTLQELSSNDMLLLQLRTGMTLSGNNTICFHHVKIYIDRFEDLQKSCCDPFNIHKKLAKKNLHVIDLDDATFLSAKFGRQLVPGWKLCPKCTQIINGSVDVDTEDRQKRKPESDGRTAKALRSLQFTNPGRQTEFAPETGKREKRRLTKNATAGSDRQVIPAKSKVYDSQGLLIFSGMDLCDCLDEDCLGCFYACPACGSTKCGAECRCDRKWLYEQIEIEGGEIIHNKHAG

SEQ ID NO: 7037 - protein, 848 aa, Homo sapiens
MAKPLTDQEKRRQISIRGIVGVENVAELKKSFNRHLHFTLVKDRNVATTRDYYFALAHTVRDHLVGRWIRTQQHYYDKCPKRVYYLSLEFYMGRTLQNTMINLGLQNACDEAIYQLGLDIEELEEIEEDAGLGNGGLGRLAACFLDSMATLGLAAYGYGIRYEYGIFNQKIRDGWQVEEADDWLRYGNPWEKSRPEFMLPVHFYGKVEHTNTGTKWIDTQVVLALPYDTPVPGYMNNTVNTMRLWSARAPNDFNLRDFNVGDYIQAVLDRNLAENISRVLYPNDNFFEGKELRLKQEYFVVAATLQDIIRRFKASKFGSTRGAGTVFDAFPDQASAIQLNDTHPALAIPELMRIFVDIEKLPWSKAWELTQKTFAYTNHTVLPEALERWPVDLVEKLLPRHLEIIYEINQKHLDRIVALFPKDVDRLRRMSLIEEEGSKRINMAHLCIVGSHAVNGVAKIHSDIVKTKVFKDFSELEPDKFQNKTNGITPRRWLLLCNPGLAELIAEKIGEDYVKDLSQLTKLHSFLGDDVFLRELAKVKQENKLKFSQFLETEYKVKINPSSMFDVQVKRIHEYKRQLLNCLHVITMYNRIKKDPKKLFVPRTVIIGGKAAPGYHMAKMIIKLITSVADVVNNDPMVGSKLKVIFLENYRVSLAEKVIPATDLSEQISTAGTEASGTGNMKFMLNGALTIGTMDGANVEMAEEAGEENLFIFGMRIDDVAALDKKGYEAKEYYEALPELKLVIDQIDNGFFSPKQPDLFKDIINMLFYHDRFKVFADYEAYVKCQDKVSQLYMNPKAWNTMVLKNIAASGKFSSDRTIKEYAQNIWNVEPSDLKISLSNESNKVNGN

SEQ ID NO: 7038 - protein, 1332 aa, Homo sapiens [sequence omitted]

SEQ ID NO: 7039 - protein, 1339 aa, Homo sapiens
MTGEVGSEVHLEINDPNVISQEEADSPSDSGQGSYETIGPLSEGDSDEEIFVSKKLKNRKVLQDSDSETEDTNASPEKTTYDSAEEENKENLYAGKNTKIKRIYKTVADSDESYMEKSLYQENLEAQVKPCLELSLQSGNSTDFTTDRKSSKKHIHDKEGTAGKAKVKSKRRLEKEERKMEKIRQLKKKETKNQEDDVEQPFNDSGCLLVDKDLFETGLEDENNSPLEDEESLESIRAAVKNKVKKHKKKEPSLESGVHSFEEGSELSKGTTRKERKAARLSKEALKQLHSETQRLIRESALNLPYHMPENKTIHDFFKRKPRPTCHGNAMALLKSSKYQSSHHKEIIDTANTTEMNSDHHSKGSEQTTGAENEVETNALPVVSKETQIITGSDESCRKDLVKNEELEIQEKQKQSDIRPSPGDSSVLQQESNFLGNNHSEECQVGGLVAFEPHALEGEGPQNPEETDEKVEEPEQQNKSSAVGPPEKVRRFTLDRLKQLGVDVSIKPRLGADEDSFVILEPETNRELEALKQRFWKHANPAAKPRAGQTVNVNVIVKDMGTDGKEELKADVVPVTLAPKKLDGASHTKPGEKLQVLKAKLQEAMKLRRFEERQKRQALFKLDNEDGFEEEEEEEEEMTDESEEDGEEKVEKEEKEEELEEEEEKEEEEEEEGNQETAEFLLSSEEIETKDEKEMDKENNDGSSEIGKAVGFLSVPKSLSSDSTLLLFKDSSSKMGYFPTEEKSETDENSGKQPSKLDEDDSCSLLTKESSHNSSFELIGSTIPSYQPCNRQTGRGTSFFPTAGGFRSPSPGLFRASLVSSASKSSGKLSEPSLPIEDSQDLYNASPEPKTLFLGAGDFQFCLEDDTQSQLLDADGFLNVRNHRNQYQALKPRLPLASMDENAMDANMDELLDLCTGKFTSQAEKHLPRKSDKKENMEELLNLCSGKFTSQDASTPASSELNKQEKESSMGDPMEEALALCSGSFPTDKEEEDEEEEFGDFRLVSNDNEFDSDEDEHSDSGNDLALEDHEDDDEEELLKRSEKLKRQMRLRKYLEDEAEVSGSDVGSEDEYDGEEIDEYEEDVIDEVLPSDEELQSQIKKIHMKTMLDDDKRQLRLYQERYLADGDLHSDGPGRMRKFRWKNIDDASQMDLFHRDSDDDQTEEQLDESEARWRKERIEREQWLRDMAQQGKITAEEEEEIGEDSQFMILAKKVTAKALQKNASRPMVIQESKSLLRNPFEAIRPGSAQQVKTGSLLNQPKAVLQKLAALSDHNPSAPRNSRNFVFHTLSPVKAEAAKESSKSQVKKRGPSFMTSPSPKHLKTDDSTSGLTRSIFKYLES

SEQ ID NO: 7040 - protein, 1631 aa, Homo sapiens
LVTPRVLRVGSPESIHIQAHSDSRQPLTRTLKVNLTVWDFPMRKTVLARSQLILSPGNNFMDQAPVTVPESLMYLPKPGQQYVIIRATWAPTSGSSFMEKMVLVALHAGYIFIQTEKTIYTPEYLVHYRVFTVNHKMDPVTRTFTLDIKVVFPDEGCPCQVWEPEGWQRRLSFSVSISLNFLCLSLGTWTIEASYQSTPKQKFEAAFDVKEYVLPSFEVQLVPNKTFFYLKDEALGVDIQARQWNCPPSPTYIFNKPVDGHALVIFGVKLDSCRIPIQSSLQRVEISEGLGHVSLQKDTLMAAFQGPGEDFIGGSIFVNVTMFSSGGEMVQAETSGVKIIQSPYNIKFTRTPQYFKPGMPFHFRVFISNPDGSPASRVLVHSQDQKVYTSAEGLATLTINTDANLDKLPIEVKTEESLQPEEQASAKMTAWPYLTQDGSGNFLHIEVKTLGTEVGSSIQLSLNTRHQDPKTKDKITHFTILVLSKGQTVSAKHQSKSQGSVYTSAIIDVTSAMLPSFRILAFYLLPRGASQDPELVADSIWIDVNDRCIGMLKVGLKNDRFFQSLEPNSQVELKVTGDAEATVGLVAVDKAVYVLNSKHKLTQKKVWNVVEEHDIGCTGGSGKDRFAVFKDAGLDLKISTGMDSLASSGTGFGGWGKRRAEMVNKFKTELEQKCCEAGLRESPVGLSCEERTWHVRHGPACVAAFLDCCHLSETLTREAREDQLHLWTKDFDDLFLDDMPVRTLFPESWLWRKFTLPKSKSGISHYPISVKVPDSITTWQFVVVSLKAGQGLCVSDPFELTVMKSFFVDLKLPSSVIRNEQVQIQAMLYNFRDRQAKVRVEFPHKETLCSASKPGAPSHQVVVVPPTSSKIVHFVLLPLETGKVDVEVKAVGYGVQDHVKKTLLVRVMGTPNSLAAGQTQTKLVPRQEFLNMVPDTEAEVFISVQGDILGETIVGSLTPSEIQQLLRVPTGCPEQTLSSLTPVIILSRYLDTTGQWGKVGVEHRDQVMKNIVSGYTQMLTHRSSDGTYHTSKGNPGSTWLTSYVFRVFALAYSMMTTQVLSLSSLCDMANWIIIDRQAEDGHFLEKGPVVMTSMQDGYQGSEEDVSLTALVLIALNEGKELCRQKVGPQRGGQDLIERARGFLERKLPDIQTTFAVAIASYALALANSSQANDCLDSFASPNKTHWPVDEQNLGSLYTIEATAYGLMQKLELGRYNETHAIAKWLLEKQELGGGFRSTQTTVVALEALTRFREAVPFKGIQDLHVQIRAPKTALNVNWYIDHSNAYQQRSAKFLAQDDLEIKASGNGRGTISVALCCEWQRGHGETWKEATALVQARDNSSGEHGERGGRIVGKDWGCELPGSRTIATMTIMEVSLLTGFYPNQDDLKQLTSDVERYAFQYKTKTSTSDSTVVLYLEKLSHEKNTVLGFRVHRMLQAEFLQAALVTIYDYYEPSRRCSTFYNLPTEQSSLRKICHKDICRCAEAKLESVEVSASNPYVYYNTQLEDIIKSGMSQVTKKESQCGVTLGAHPGGPIVWEGQTCVCAHTGFSPGTDPATPLAMKKFVSHATCHDSLGLQEQESYLIMGQTSDLWRIKSDYSYVLGKETFLILWPADGDASKKELRDQLEEFLEY

SEQ ID NO: 7041 - protein, 1250 aa, Homo sapiens
YILVTPRVLRVGSPESIHIQAHSDSRQPLTRTLKVNLTVWDFPMRKTVLARSQLILSPGNNFMDQAPVTVPESLMYLPKPGQQYVIIRATWAPTSGSSFMEKMVLVALHAGYIFIQTEKTIYTPEYLVHYRVFTVNHKMDPVTRTFTLDIKNPKGITVISQSLMAKDGFFFSSFHLPELVSLGTWTIEASYQSTPKQKFEAAFDVKEYVLPSFEVQLVPNKTFFYLKDEALGVDIQARQWNCPPSPTYIFNKPVDGHALVIFGVKLDSCRIPIQSSLQRVEISEGLGHVSLQKDTLMAAFQGPGEDFIGGSIFVNVTMFSSGGEMVQAETSGVKIIQSPYNIKFTRTPQYFKPGMPFHFRVFISNPDGSPASRVLVHSQDQKVYTSAEGLATLTINTDANLDKLPIEVKTEESLQPEEQASAKMTAWPYLTQDGSGNFLHIEVKTLGTEVGSSIQLSLNTRHQDPKTKDKITHFTILVLSKGQTVSAKHQSKSQGSVYTSAIIDVTSAMLPSFRILAFYLLPRGASQDPELVADSIWIDVNDRCIGMLKVGLKNDRFFQSLEPNSQVELKVTGDAEATVGLVAVDKAVYVLNSKHKLTQKKVWNVVEEHDIGCTGGSGKDRFAVFKDAGLDLKISTGMDSLASSGTGFGGWGKRRAEMVNKFKTELEQKCCEAGLRESPVGLSCEERTWHVRHGPACVAAFLDCCHLSETLTREAREDQLHLWTKDFDDLFLDDMPVRTLFPESWLWRKFTLPKSKSGISHYPISVKVPDSITTWQFVVVSLKAGQGLCVSDPFELTVMKSFFVDLKLPSSVIRNEQVQIQAMLYNFRDRQAKVRVEFPHKETLCSASKPGAPSHQVVVVPPTSSKIVHFVLLPLETGKVDVEVKAVGYGVQDHVKKTLLVRVMGTPNSLALVQTAGLPPGPGWAGQTQTKLVPRQEFLNMVPDTEAEVFISVQGDILGETIVGSLTPSEIQQLLRVPTGCPEQTLSSLTPVIILSRYLDTTGQWGKVGVEHRDQVMKNIVSGYTQMLTHRSSDGTYHTSKGNPGSTWLTSYVFRVFALAYSMMTTQVLSLSSLCDMANWIIIDRQAEDGHFLEKGPVVMTSMQDGYQGSEEDVSLTALVLIALNEGKELCRQKVGPQRGGQDLIERARGFLERKLPDIQTTFAVAIASYALALANSSQANDCLDSFASPSGYKTHWPVDEQNLGSLYTIEATAYGLMQKLELGRYNETHAIAKWLLEKQELGGGFRSTQ

SEQ ID NO: 7042 - protein, 1629 aa, Homo sapiens
ILLLLGSPLIHAEPLYILVTPRVLRVGSPESIHIQAHSDSRQPLTRTLKVNLTVWDFPMRKTVLARSQLILSPGNNFMDQAPVTVPESLMYLPKPGQQYVIIRATWAPTSGSSFMEKMVLVALHAGYIFIQTEKTIYTPEYLVHYRVFTVNHKMDPVTRTFTLDIKNPKGITVISQSLMAKDGFFFSSFHLPELVSLGTWTIEASYQSTPKQKFEAAFDVKEYVLPSFEVQLVPNKTFFYLKDEALGVDIQARQWNCPPSPTYIFNKPVDGHALVIFGVKLDSCRIPIQSSLQRVEISEGLGHVSLQKDTLMAAFQGPGEDFIGGSIFVNVTMFSSGGEMVQAETSGVKIIQSPYNIKFTRTPQYFKPGMPFHFRVFISNPDGSPASRVLVHSQDQKVYTSAEGLATLTINTDANLDKLPIEVKTEESLQPEEQASAKMTAWPYLTQDGSGNFLHIEVKTLGTEVGSSIQLSLNTRHQDPKTKDKITHFTILVLSKGQTVSAKHQSKSQGSVYTSAIIDVTSAMLPSFRILAFYLLPRGASQDPELVADSIWIDVNDRCIGMLKVGLKNDRFFQSLEPNSQVELKVTGDAEATVGLVAVDKAVYVLNSKHKLTQKKVWNVVEEHDIGCTGGSGKDRFAVFKDAGLDLKISTGMDSLASSGTGFGGWGKRRAEMVNKFKTELEQKCCEAGLRESPVGLSCEERTWHVRHGPACVAAFLDCCHLSETLTREAREDQLHLWTKEDFDDLFLDDMPVRTLFPESWLWRKFTLPKSKSGISHYPISVKVPDSITTWQFVVVSLKAGQGLCVSDPFELTVMKSFFVDLKLPSSVIRNEQVQIQAMLYNFRDRQAKVRVEFPHKETLCSASKPGAPSHQVVVVPPTSSKIVHFVLLPLETGKVDVEVKAVGYGVQDHVKKTLLVRVMGTPNSLAAGADSGASTRSRLGRQEFLNMVPDTEAEVFISVQGDILGETIVGSLTPSEIQQLLRVPTGCPEQTLSSLTPVIILSRYLDTTGQWGKVGVEHRDQVMKNIVSGYTQMLTHRSSDGTYHTSKGNPGSTWLTSYVFRVFALAYSMMTTQVLSLSSLCDMANWIIIDRQAEDGHFLEKGPVVMTSMQDGYQGSEEDVSLTALVLIALNEGKELCRQKVGPQRGGQDLIERARGFLERKLPDIQTTFAVAIASYALALANSSQANDCLDSFASPMDEQNLGSLYTIEATAYGLMQKLELGRYNETHAIAKWLLEKQELGGGFRSTQTTVVALEALTRFREAVPFKGIQDLHVQIRAPKTALNVNWYIDHSNAYQQREMENESPGPRLGKTEALVSVQAPHPPTLDPHFAASSTLKSSSLFSSVPCPGRPRDQSQWQRERHHLEATMTIMEVSLLTGFYPNQDDLKQLTSDVERYAFQYKTKTSTSDSTVVLYLEKLSHEKNTVLGFRVHRMLQAEFLQAALVTIYDYYEPSRRCSTFYNLPTEQSSLRKICHKDICRCAEGQCPSLQKPSGQLRQEELQTTACEAGVDFVYKTKLESVEVSASNPYVYYNTQLEDIIKSGTDPATPLAMKKFVSHATCHDSLGLQEQESYLIMGQTSDLWRIKSDYSYVLGKETFLILWPADGDASKKELRDQLEEFLEYMRTHGC

SEQ ID NO: 7043 - protein, 1510 aa, Homo sapiens
QQYVIIRATWAPTSGSSFMEKMVLVALHAGYIFIQTEKTIYTPEYLEGSHQPHPLSPQNPKGITVISQSLMAKDGFFFSSFHLPELVSLGTWTIEASYQSTPKQKFEAAFDVKEYVLPSFEVQLVPNKTFFYLKDEALGVDIQARQWNCPPSPTYIFNKPVDGHALVIFGVKLDSCRIPIQSSLQRVEISEGLGHVSLQKDTLMAAFQGPGEDFIGGSIFVNVTMFSSGGEMVQAETSGVKIIQSPYNIKFTRTPQYFKPGMPFHFRVFISNPDGSPASRVLVHSQDQKVYTSAEGLATLTINTDANLDKLPIEVKTEESLQPEEQASAKMTAWPYLTQDGSGNFLHIEVKTLGTEVGSSIQLSLNTRHQDPKTKDKITHFTILVLSKGQTVSAKHQSKSQGSVYTSAIIDVTSAMLPSFRILAFYLLPRGASQDPELVADSIWIDVNDRCIGMLKVGLKNDRFFQSLEPNSQVELKVTGDAEATVGLVAVDKAVYVLNSKHKLTQKKVWNVVEEHDIGCTGGSGKDRFAVFKDAGLDLKISTGMDSLASSGTGFGGWGKRRAEMVNKFKTELEQKCCEAGLRESPVGLSCEERTWHVRHGPACVAAFLDCCHLSETLTREAREDQLHLWTTDEEEDFDDLFLDDMPVRTLFPESWLWRKFTLPKSKSGISHYPISVKVPDSITTWQFVVVSLKAGQGLCVSDPFELTVMKSFFVDLKLPSSVIRNEQVQIQAMLYNFRDRQAKVRVEFPHKETLCSASKPGAPSHQVVVVPPTSSKIVHFVLLPLETGKVDVEVKAVGYGVQDHVKKTLLVRVMGTPNSLAAGADSGASTRSRLGRQEFLNMVPDTEAEVFISVQGDILGETIVGSLTPSEIQQLLRVPTGCPEQTLSSLTPVIILSRYLDTTGQWGKVGVEHRDQVMKNIVSGYTQMLTHRSSDGTYHTSKGNPGSTWLTSYVFRVFALAYSMMTTQVLSLSSLCDMANWIIIDRQAEDGHFLEKGPVVMTSMQDGYQGSEEDVSLTALVLIALNEGKELCRQKNLMASIERARGFLERKLPDIQTTFAVAIASYALALANSSQANDCLDSFASPSGYKTHWPVDEQNLGSLYTIEATAYGLMQKLELGRYNETHAIAKWLLEKQELGGGFRSTQVMGTPGRLQTLLWPLHLGIDGVGGGNLAVNSPHGQRPGKSRIGVQRKGSGWGRALTAPLARQILTMYHKSPESREDNCNLFLLAKALCCEWQRGHGETWKEATALVQARDNSKATMTIMEVSLLTGFYPNQDDLKQLTSDVERYAFQYKTKTSTSDSTVVLYLEKLSHEKNTVLGFRVHRMLQAEFLQAALVTIYDYYEPSRRCSTFYNLPTEQSSLRKICHKDICRCAEGQCPSLQKPSGQLRQEELQTTACEAGVDFVYKTKLESVEVSASNPYVYYNTQLEDIIKSGTDPATPLAMKKFVSHATCHDSLGLQEQESYLIMGQTSDLWRIKSDYSYVLGKETFLILWPADGDASKKELRDQ

SEQ ID NO: 7044 - protein, 1644 aa, Homo sapiens
ILLLLGSPLIHAEPLYILVTPRVLRVGSPESIHIQAHSDSRQPLTRTLKVNLTVWDFPMRKTVLARSQLILSPGNNFMDQAPVTVPESLMYLPKPGQQYVIIRATWAPTSGSSFMEKMVLVALHAGYIFIQTEKTIYTPEYLVHYRVFTVNHKMDPVTRTFTLDIKNPKGITVISQSLMAKDGFFFSSFHLPELVSLGTWTIEASYQSTPKQKFEAAFDVKEYVLPSFEVQLVPNKTFFYLKDEALGVDIQARQWNCPPSPTYIFNKPVDGHALVIFGVKLDSCRIPIQSSLQRVEISEGLGHVSLQKDTLMAAFQGPGEDFIGGSIFVNVTMFSSGGEMVQAETSGVKIIQSPYNIKFTRTPQYFKPGMPFHFRVFISNPDGSPASRVLVHSQDQKVYTSAEGLATLTINTDANLDKLPIEVKTEESLQPEEQASAKMTAWPYLTQDGSGNFLHIEVKTLGTEVGSSIQLSLNTRHQDPKTKDKITHFTILVLSKGQTVSAKHQSKSQGSVYTSAIIDVTSAMLPSFRILAFYLLPRGASQDPELVADSIWIDVNDRCIGMLKVGLKNDRFFQSLEPNSQVELKVTGDAEATVGLVAVDKAVYVLNSKHKLTQKKVWNVVEEHDIGCTGGSGKDRFAVFKDAGLDLKISTGMDSLASSGTGFGGWGKRRAEMVNKFKTELEQKCCEAGLRESPVGLSCEERTWHVRHGPACVAAFLDCCHLSETLTREAREDQLHLWTTDEEEDFDDLFLDDMPVRTLFPESWLWRKFTLPKSKSGISHYPISVKVPDSITTWQFVVVSLKAGQGLCVSDPFELTVMKSFFVDLKLPSSVIRNEQVQIQAMLYNFRDRQAKVRVEFPHKETLCSASKPGAPSHQVVVVPPTSSKIVHFVLLPLETGKVDVEVKAVGYGVQDHVKKTLLVRVMGTPNSLAAGADSGASTSPLVTEGCGYSGQTQTKLVPRQEFLNMVPDTEAEVFISVQGDILGETIVGSLTPSEIQQLLRVPTGCPEQTLSSLTPVIILSRYLDTTGQWGKVGVEHRDQVMKNIVSGYTQMLTHRSSDGTYHTSKGNPGSTWLTSYVFRVFALAYSMMTTQVLSLSSLCDMANWIIIDRQAEDGHFLEKGPVVMTSMQDGYQGSEEDVSLTALVLIALNEGKELCRQKVGPQRGGQDLIERARGFLERKLPDIQTTFAVAIASYALALANSSQANDCLDSFASPSGYKTHWPVDEQNLGSLYTIEATAYGLMQKLELGRYNETHAIAKWLLEKQELGGGFRSTQVMGTPGRLHIPLHLTLTLLLPPPLNLPLCSLQFLAQDDLEIKASGNGRGTISVALCCEWQRGHGETWKEATALVQARDNSSGEHGERGGRIVGKDWGCELPGSRTIATMTIMEVSLLTGFYPNQDDLKQLTSDVERYAFQYKTKTSTSDSTVVLYLEKLSHEKNTVLGFRVHRMLQAEFLQAALVTIYDYYEPSRRCSTFYNLPTEQSSLRKICHKDICRCAEGQCPSLQKPSGQLRQEELQTTACEAGVDFVYKTKLESVEVSASNPYVYYNTQLEDIIKSGTDPATPLAMKKFVSHATCHDSLGLQEQESYLIMGQTSDLWRIKSDYSYVLGKETFLILWPADGDASKKELRDQLEEFLEYMRTHGC

SEQ ID NO: 7045 - protein, 1252 aa, Homo sapiens
ILVTPRVLRVGSPESIHIQAHSDSRQPLTRTLKVNLTVWDFPMRKTVLARSQLILSPGNNFMDQAPVTVPESLMYLPKPGQQYVIIRATWAPTSGSSFMEKMVLVALHAGYIFIQTEKTIYTPEYLVHYRVFTVNHKMDPVTRTFTLDIKVVFPDEGCPCQVWEPEGWQRRLSFSVSISLNFLCLSLGTWTIEASYQSTPKQKFEAAFDVKEYVLPSFEVQLVPNKTFFYLKDEALGVDIQARQWNCPPSPTYIFNKPVDGHALVIFGVKLDSCRIPIQSSLQRVEISEGLGHVSLQKDTLMAAFQGPGEDFIGGSIFVNVTMFSSGGEMVQAETSGVKIIQSPYNIKFTRTPQYFKPGMPFHFRVFISNPDGSPASRVLVHSQDQKVYTSAEGLATLTINTDANLDKLPIEVKTEESLQPEEQASAKMTAWPYLTQDGSGNFLHIEVKTLGTEVGSSIQLSLNTRHQDPKTKDKITHFTILVLSKGQTVSAKHQSKSQGSVYTSAIIDVTSAMLPSFRILAFYLLPRGASQDPELVADSIWIDVNDRCIGMLKVGLKNDRFFQSLEPNSQVELKVTGDAEATVGLVAVDKAVYVLNSKHKLTQKKVWNVVEEHDIGCTGGSGKDRFAVFKDAGLDLKISTGMDSLASSGTGFGGWGKRRAEMVNKFKTELEQKCCEAGLRESPVGLSCEERTWHVRHGPACVAAFLDCCHLSETLTREAREDQLHLWTKDFDDLFLDDMPVRTLFPESWLWRKFTLPKSKSGISHYPISVKVPDSITTWQFVVVSLKAGQGLCVSDPFELTVMKSFFVDLKLPSSVIRNEQVQIQAMLYNFRDRQAKVRVEFPHKETLCSASKPGAPSHQVVVVPPTSSKIVHFVLLPLETGKVDVEVKAVGYGVQDHVKKTLLVRVMGTPNSLAAGADSGASTRSRLGRRSRVGRSVNHCGLSIATPRVTQLTHLTGDILGETIVGSLTPSEIQQLLRVPTGCPEQTLSSLTPVIILSRYLDTTGQWGKVGVEHRDQVMKNIVSGYTQMLTHRSSDGTYHTSKGNPGSTWLTSYVFRVFALAYSMMTTQVLSLSSLCDMANWIIIDRQAEDGHFLEKGPVVMTSMQDGYQGSEEDVSLTALVLIALNEGKELCRQKVGPQRGGQDLIERARGFLERKLPDIQTTFAVAIASYALALANSSQANDCLDSFASPNKTHWPVDEQNLGSLYTIEATAYGLMQKLELGRYNETHAIAKWLLEKQELGGGFRSTQ

SEQ ID NO: 7046 - protein, 1511 aa, Homo sapiens
QQYVIIRATWAPTSGSSFMEKMVLVALHAGYIFIQTEKTIYTPEYLVHYRVFTVNHKMDPVTRTFTLDIKNPKGITVISQSLMAKDGFFFSSFHLPELVSLGTWTIEASYQSTPKQKFEAAFDVKEYVLPSFEVQLVPNKTFFYLKDEALGVDIQARQWNCPPSPTYIFNKPVDGHALVIFGVKLDSCRIPIQSSLQRVEISEGLGHVSLQKDTLMAAFQGPGEDFIGGSIFVNVTMFSSGGEMVQAETSGVKIIQSPYNIKFTRTPQYFKPGMPFHFRVFISNPDGSPASRVLVHSQDQKVYTSAEGLATLTINTDANLDKLPIEVKTEESLQPEEQASAKMTAWPYLTQDGSGNFLHIEVKTLGTEVGSSIQLSLNTRHQDPKTKDKITHFTILVLSKGQTVSAKHQSKSQGSVYTSAIIDVTSAMLPSFRILAFYLLPRGASQDPELVADSIWIDVNDRCIGMLKVGLKNDRFFQSLEPNSQVELKVTGDAEATVGLVAVDKAVYVLNSKHKLTQKKVWNVVEEHDIGCTGGSGKDRFAVFKDAGLDLKISTGMDSLASSGTGFGGWGKRRAEMVNKFKTELEQKCCEAGLRESPVGLSCEERTWHVRHGPACVAAFLDCCHLSETLTREAREDQLHLWTTDEEEDFDDLFLDDMPVRTLFPESWLWRKFTLPKSKSGISHYPISVKVPDSITTWQFVVVSLKAGQGLCVSDPFELTVMKSFFVDLKLPSSVIRNEQVQIQAMLYNFRDRQAKVRVEFPHKETLCSASKPGAPSHQVVVVPPTSSKIVHFVLLPLETGKVDVEVKAVGYGVQDHVKKTLLVRVMGTPNSLAAGADSGASTRSRLGRVTQLTHLTGDILGETIVGSLTPSEIQQLLRVPTGCPEQTLSSLTPVIILSRYLDTTGQWGKVGVEHRDQVMKNIVSGYTQMLTHRSSDGTYHTSKGNPGSTWLTSYVFRVFALAYSMMTTQVLSLSSLCDMANWIIIDRQAEDGHFLEKGPVVMTSMQDGYQGSEEDVSLTALVLIALNEGKELCRQKVGPQRGGQDLIERARGFLERKLPDIQTTFAVAIASYALALANSSQANDCLDSFASPSGYKTHWPVDEQNLGSLYTIEATAYGLMQKLELGRYNETHAIAKWLLEKQELGGGFRSTQTTVVALEALTRFREAVPFKGIQDLHVQIRAPKTALNVNWYIDHSNAYQQRFLLAKALCCEWQRGHGETWKEATALVQARDNSSGEHGERGGRIVGKDWGCELPGSRTEATMTIMEVSLLTGFYPNQDDLKQLTSDVERYAFQYKTKTSTSDSTVVLYLEKLSHEKNTVLGFRVHRMLQAEFLQAALVTIYDYYEPSRRCSTFYNLPTEQSSLRKICHKDICRCAEGQCPSLQKPSGQLRQEELQTTACEAGVDFVYKTKLESVEVSASNPYVYYNTQLEDIIKSGTDPATPLAMKKFVSHATCHDSLGLQEQESYLIMGQTSDLWRIKSDYSYVLGKETFLILWPADGDASKKELRDQ

SEQ ID NO: 7047 - protein, 1216 aa, Homo sapiens
MEKMVLVALHAGYIFIQTEKTIYTPEYLVHYRVFTVNHKMDPVTRTFTLDIKNPKGITVISQSLMAKDGFFFSSFHLPELVRCPCQVWEPEGWQRRLSFSVSISLNFLCLSLGTWTIEASYQSTPKQKFEAAFDVKEYVLPSFEVQLVPNKTFFYLKDEALGVDIQARQWNCPPSPTYIFNKPVDGHALVIFGVKLDSCRIPIQSSLQRVEISEGLGHVSLQKDTLMAAFQGPGEDFIGGSIFVNVTMFSSGGEMVQAETSGVKIIQSPYNIKFTRTPQYFKPGMPFHFRVFISNPDGSPASRVLVHSQDQKVYTSAEGLATLTINTDANLDKLPIEVKTEESLQPEEQASAKMTAWPYLTQDGSGNFLHIEVKTLGTEVGSSIQLSLNTRHQDPKTKDKITHFTILVLSKGQTVSAKHQSKSQGSVYTSAIIDVTSAMLPSFRILAFYLLPRGASQDPELVADSIWIDVNDRCIGMVSQTPCSWKRRRICGLKSSTQGVAVMQVNKYTELGLSGVPRCSTRAVGNVSLCSCVVYDSLFLTSLFFLAQLKVGLKNDRFFQSLEPNSQVELKVTGDAEATVGLVAVDKAVYVLNSKHKLTQKKVWNVVEEHDIGCTGGSGKDRFAVFKDAGLDLKISTGMDSLASSGTGFGGWGKRRAEMVNKFKTELEQKCCEAGLRESPVGLSCEERTWHVRHGPACVAAFLDCCHLSETLTREAREDQLHLWTKEDFDDLFLDDMPVRTLFPESWLWRKFTLPKSKSGISHYPISVKVPDSITTWQFVVVSLKAGQGLCVSDPFELTVMKSFFVDLKLPSSVIRNEQVQIQAMLYNFRDRQAKVRVEFPHKETLCSASKPGAPSHQVVVVPPTSSKIVHFVLLPLETGKVDVEVKAVGYGVQDHVKKTLLVRVMGTPNSLAAGADSGASTRSRLGRVTQLTHLTGDILGETIVGSLTPSEIQQLLRVPTGCPEQTLSSLTPVIILSRYLDTTGQWGKVGVEHRDQVMKNIVSGYTQMLTHRSSDGTYHTSKGNPGSTWLTSYVFRVFALAYSMMTTQVLSLSSLCDMANWIIIDRQAEDGHFLEKGPVVMTSMQDGYQGSEEDVSLTALVLIALNEGKELCRQKVGPQRGGQDLIERARGFLERKLPDIQTTFAVAIASYALALANSSQANDCLDSFASPNKTHWPVDEQNLGSLYTIEATAYGLMQKLELGRYNETHAIAKWL

SEQ ID NO: 7048 - protein, 1587 aa, Homo sapiens
ILLLLGSPLIHAEPLYILVTPRVLRVGSPESIHIQAHSDSRQPLTRTLKVNLTVWDFPMRKTVLARSQLILSPGNNFMDQAPVTVPESLMYLPKPGQQYVIIRATWAPTSGSSFMEKMVLVALHAGYIFIQTEKTIYTPEYLVHYRVFTVNHKMDPVTRTFTLDIKNPKGITVISQSLMAKDGFFFSSFHLPELVSLGTWTIEASYQSTPKQKFEAAFDVKEYVLPSFEVQLVPNKTFFYLKDEALGVDIQARQWNCPPSPTYIFNKPVDGHALVIFGVKLDSCRIPIQSSLQRVEISEGLGHVSLQKDTLMAAFQGPGEDFIGGSIFVNVTMFSSGGEMVQAETSGVKIIQSPYNIKFTRTPQYFKPGMPFHFRVFISNPDGSPASRVLVHSQDQKVYTSAEGLATLTINTDANLDKLPIEVKTEESLQPEEQASAKMTAWPYLTQDGSGNFLHIEVKTLGTEVGSSIQLSLNTRHQDPKTKDKITHFTILVLSKGQTVSAKHQSKSQGSVYTSAIIDVTSAMLPSFRILAFYLLPRGASQDPELVADSIWIDVNDRCIGMLKVGLKNDRFFQSLEPNSQVELKVTGDAEATVGLVAVDKAVYVLNSKHKLTQKKVWNVVEEHDIGCTGGSGKDRFAVFKDAGLDLKISTGMDSLASSGTGFGGWGKRRAEMVNKFKTELEQKCCEAGLRESPVGLSCEERTWHVRHGPACVAAFLDCCHLSETLTREAREDQLHLWTKDFDDLFLDDMPVRTLFPESWLWRKFTLPKSKSGISHYPISVKVPDSITTWQFVVVSLKAGQGLCVSDPFELTVMKSFFVDLKLPSSVIRNEQVQIQAMLYNFRDRQAKVRVEFPHKETLCSASKPGAPSHQVVVVPPTSSKIVHFVLLPLETGKVDVEVKAVGYGVQDHVKKTLLVRVMGTPNSLAAGADSGASTSPLVTEGCGYSGQTQTKLVPRQEFLNMVPDTEAEVFISVQGDILGETIVGSLTPSEIQQLLRVPTGCPEQTLSSLTPVIILSRYLDTTGQWGKVGVEHRDQVMKNIVSGESGDPPGASKRVSLLPSPDRLTSYVFRVFALAYSMMTTQVLSLSSLCDMANWIIIDRQAEDGHFLEKGPVVMTSMQDGYQGSEEDVSLTALVLIALNEGKELCRQKVGPQRGGQDLIERARGFLERKLPDIQTTFAVAIASYALALANSSQANDCLDSFASPMDEQNLGSLYTIEATAYGLMQKLELGRYNETHAIAKWLLEKQELGGGFRSTQVMGTPGRFLLAKALCCEWQRGHGETWKEATALVQARDNSSGEHGERGGRIVGKDWGCELPGSRTIEATMTIMEVSLLTGFYPNQDDLKQLTSDVERYAFQYKTKTSTSDSTVVLYLEKLSHEKNTVLGFRVHRMLQAEFLQAALVTIYDYYEPSRRCSTFYNLPTEQSSLRKICHKDICRCAEGQCPSLQKPSGQLRQEELQTTACEAGVDFVYKTKLESVEVSASNPYVYYNTQLEDIIKSGTDPATPLAMKKFVSHATCHDSLGLQEQESYLIMGQTSDLWRIKSDYSYVLGKETFLILWPADGDASKKELRDQLEEFLEYMRTHGC

SEQ ID NO: 7049 - protein, 1314 aa, Homo sapiens
MGDYEISVENALRKYILVTPRVLRVGSPESIHIQAHSDSRQPLTRTLKVNLTVWDFPMRKTVLARSQLILSPGNNFMDQAPVTVPESLMYLPKPGQQYVIIRATWAPTSGSSFMEKMVLVALHAGYIFIQTEKTIYTPEYLVHYRVFTVNHKMDPVTRTFTLDIKVVFPDEGWGVVVDPGHWGYMNPKGITVISQSLMAKDGFFFSSFHLPELVSLGTWTIEASYQSTPKQKFEAAFDVKEYGEKEQISEGLGHVSLQKDTLMAAFQGPGEDFIGGSIFVNVTMFSSGGEMVQAETSGVKIIQSPYNIKFTRTPQYFKPGMPFHFRVFISNPDGSPASRVLVHSQDQKVYTSAEGLATLTINTDANLDKLPIEVKTEESLQPEEQASAKMTAWPYLTQDGSGNFLHIEVKTLGTEVGSSIQLSLNTRHQDPKTKDKITHFTILVLSKGQTVSAKHQSKSQGSVYTSAIIDVTSAMLPSFRILAFYLLPRGASQDPELVADSIWIDVNDRCIGMLKVGLKNDRFFQSLEPNSQVELKVTGDAEATVGLVAVDKAVYVLNSKHKLTQKKVWNVVEEHDIGCTGGSGKDRFAVFKDAGLDLKISTGMDSLASSGTGFGVNKFKTELEQKCCEAGLRESPVGLSCEERTWHVRHGPACVAAFLDCCHLSETLTREAREDQLHLWTTDEEEDFDDLFLDDMPVRTLFPESWLWRKFTLPKSKSGISHYPISVKVPDSITTWQFVVVSLKAGQGLCVSDPFELTVMKSFFVDLKLPSSVIRNEQVQIQAMLYNFRDRQAKVRVEFPHKETLCSASKPGAPSHQVVVVPPTSSKIVHFVLLPLETGKVDVEVKAVGYGVQDHVKKTLLVRAGVQIQQTSYSIVLEPQGDILGETIVGSLTPSEIQQLLRVPTGCPEQTLSSLTPVIILSRYLDTTGQWGKVGVEHRDQVMKNIVSVPARQVIPDNTDCPSKPCSVSPGYTQMLTHRSSDGTYHTSKGNPGSTWLTSYVFRVFALAYSMMTTQVLSLSSLCDMANWIIIDRQAEDGHFLEKGPVVMTSMQDGYQGSEEDVSLTALVLIALNEGKELCRQKNLMASIERARGFLERKLPDIQTTFAVAIASYALALANSSQANDCLDSFASPNKTHWPVDEQNLGSLYTIEATAYGLMQKLELGRYNETHAIAKWLLEKQELGGGFRSTQTTVVALEALTRFREAVPFKGIQDLHVQIRAPKTALNVNWYIDHSNAYQQRSAKFLAQDDLEIKASGNGRGTISILTMYHKSPESREDNCNLYHLNATLHSALEENKKGGETFRLRMETRLYLS

SEQ ID NO: 7050 - protein, 795 aa, Homo sapiens [sequence omitted]

SEQ ID NO: 7051 - protein, 793 aa, Homo sapiens
MLSQVYRCGFQPFNQHLLPWVKCTTVFRSHCIQPSVIRHVRSWSNIPFITVPLSRTHGKSFAHRSELKHAKRIVVKLGSAVVTRGDECGLALGRLASIVEQVSVLQNQGREMMLVTSGAVAFGKQRLRHEILLSQSVRQALHSGQNQLKEMAIPVLEARACAAAGQSGLMALYEAMFTQYSICAAQILVTNLDFHDEQKRRNLNGTLHELLRMNIVPIVNTNDAVVPPAEPNSDLQGVISVKDNDSLAARLAVEMKTDLLIVLSDVEGLFDSPPGSDDAKLIDIFYPGDQQSVTFGTKSRVGMGGMEAKVKAALWALQGGTSVVIANGTHPKVSGHVITDIVEGKKVGTFFSEVKPAGPTVEQQGEMARSGGRMLATLEPEQRAEIIHHLADLLTDQRDEILLANKKDLEEAEGRLAAPLLKRLSLSTSKLNSLAIGLRQIAASSQDSVGRVLRRTRIAKNLELEQVTVPIGVLLVIFESRPDCLPQVAALAIASGNGLLLKGGKEAAHSNRILHLLTQEALSIHGVKEAVQLVNTREEVEDLCRLDKMIDLIIPRGSSQLVRDIQKAAKGIPVMGHSEGICHMYVDSEASVDKVTRLVRDSKCEYPAACNALETLLIHRDLLRTPLFDQIIDMLRVEQVKIHAGPKFASYLTFSPSEVKSLRTEYGDLELCIEVVDNVQDAIDHIHKYGSSHTDVIVTEDENTAEFFLQHVDSACVFWNASTRFSDGYRFGLGAEVGISTSRIHARGPVGLEGLLTTKWLLRGKDHVVSDFSEHGSLKYLHENLPIPQRNTN

SEQ ID NO: 7052 - protein, 365 aa, Homo sapiens
MELDFGHFDERDKTSRNMRGSRMNGLPSPTHSAHCSFYRTRTLQALSNEKKAKKVRFYRNGDRYFKGIVYAVSSDRFRSFDALLADLTRSLSDNINLPQGVRYIYTIDGSRKIGSMDELEEGESYVCSSDNFFKKVEYTKNVNPNWSVNVKTSANMKAPQSLASSNSAQARENKDFVRPKLVTIIRSGVKPRKAVRVLLNKKTAHSFEQVLTDITEAIKLETGVVKKLYTLDGKQVTCLHDFFGDDDVFIACGPEKFRYAQDDFSLDENECRVMKGNPSATAGPKASPTPQKTSAKSPGPMRRSKSPADSGNDQDANGTSSSQLSTPKSKQSPISTPTSPGSLRKHKDLYLPLSLDDSDSLGDSM

SEQ ID NO: 7053 - protein, 361 aa, Homo sapiens
MELDFGHFDERDKTSRNMRGSRMNGLPSPTHSAHCSFYRTRTLQALSNEKKAKKVRFYRNGDRYFKGIVYAVSSDRFRSFDALLADLTRSLSDNINLPQGVRYIYTIDGSRKIGSMDELEEGESYVCSSDNFFKKVEYTKNVNPNWSVNVKTSANMKAPQSLASSNSAQARENKDFVRPKLVTIIRSGVKPRKAVRVLLNKKTAHSFEQVLTDITEAIKLETGVVKKLYTLDGKQVTCLHDFFGDDDVFIACGPEKFRYAQDDFSLDENECRVMKGNPSATAGPKASPTPQKTSAKSPGPMRRSKSPADSANGTSSSQLSTPKSVKQSPISTPTSPGSLRKHKDLYLPLSLDDSDSLGDSM

SEQ ID NO: 7054 - protein, 729 aa, Homo sapiens
MSFGRDMELEHFDERDKAQRYSRGSRVNGLPSPTHSAHCSFYRTRTLQTLSSEKKAKKVRFYRNGDRYFKGIVYAISPDRFRSFEALLADLTRTLSDNVNLPQGVRTIYTIDGLKKISSLDQLVEGESYVCGSIEPFKKLEYTKNVNPNWSVNVKTTSASRAVSSLATAKGSPSEVRENKDFIRPKLVTIIRSGVKPRKAVRILLNKKTAHSFEQVLTDITDAIKLDSGVVKRLYTLDGKQVMCLQDFFGDDDIFIACGPEKFRYQDDFLLDESECRVVKSTSYTKIASSSRRSTTKSPGPSRRSKSPASTSSVNGTPGSQLSTPRSGKSPSPSPTSPGSLRKQRSSQHGGSSTSLASTKVCSSMDENDGPGEEVSEEGFQIPATITERYKVGRTIGDGNFAVVKECVERSTAREYALKIIKKSKCRGKEHMIQNEVSILRRVKHPNIVLLIEEMDVPTELYLVMELVKGGDLFDAITSTNKYTERDASGMLYNLASAIKYLHSLNIVHRDIKPENLLVYEHQDGSKSLKLGDFGLATIVDGPLYTVCGTPTYVAPEIIAETGYGLKVDIWAAGVITYILLCGFPPFRGSGDDQEVLFDQILMGQVDFPSPYWDNVSDSAKELITMMLLVDVDQRFSAVQVLEHPWVNDDGLPENEHQLSVAGKIKKHFNTGPKPNSTAAGVSVIALDHGFTIKRSGSLDYYQQPGMYWIRPPLLIRRGRFSDEDATRM

SEQ ID NO: 7055 - protein, 740 aa, Homo sapiens
MSFGRDMELEHFDERDKAQRYSRGSRVNGLPSPTHSAHCSFYRTRTLQTLSSEKKAKKVRFYRNGDRYFKGIVYAISPDRFRSFEALLADLTRTLSDNVNLPQGVRTIYTIDGLKKISSLDQLVEGESYVCGSIEPFKKLEYTKNVNPNWSVNVKTTSASRAVSSLATAKGSPSEVRENKDFIRPKLVTIIRSGVKPRKAVRILLNKKTAHSFEQVLTDITDAIKLDSGVVKRLYTLDGKQVMCLQDFFGDDDIFIACGPEKFRYQDDFLLDESECRVVKSTSYTKIASSSRRSTTKSPGPSRRSKSPASTSSVNGTPGSQLSTPRSGKSPSPSPTSPGSLRKQRSSQHGGSSTSLASTKVCSSMDENDGPGEEVSEEGFQIPATITERYKVGRTIGDGNFAVVKECVERSTAREYALKIIKKSKCRGKEHMIQNEVSILRRVKHPNIVLLIEEMDVPTELYLVMELVKGGDLFDAITSTNKYTERDASGMLYNLASAIKYLHSLNIVHRDIKPENLLVYEHQDGSKSLKLGDFGLATIVDGPLYTVCGTPTYVAPEIIAETGYGLKVDIWAAGVITYILLCGFPPFRGSGDDQEVLFDQILMGQVDFPSPYWDNVSDSAKELITMMLLVDVDQRFSAVQVLEHPWVNDDGLPENEHQLSVAGKIKKHFNTGPKPNSTAAGVSVIATTALDKERQVFRRRRNQDVRSRYKAQPAPPELNSESEDYSPSSSETVRSPNSPF

SEQ ID NO: 7056 - protein, 942 aa, Homo sapiens
MAAAAEPGARAWLGGGSPRPGSPACSPVLGSGGRARPGPGPGPGRDRAGGVRARARAAPGHSFRKVTLTKPTFCHLCSDFIWGLAGFLCDVCNFMSHEKCLKHVRIPCTSVAPSLVRVPVAHCFGPRGLHKRKFCAVCRKVLEAPALHCEVCELHLHPDCVPFACSDCRQCHQDGHQDHDTHHHHWREGNLPSGARCEVCRKTCGSSDVLAGVRCEWCGVQAHSLCSAALAPECGFGRLRSLVLPPACVRLLPGGFSKTQSFRIVEAAEPGEGGDGADGSAAVGPGRETQATPESGKQTLKIFDGDDAVRRSQFRLVTVSRLAGAEEVLEAALRAHHIPEDPGHLELCRLPPSSQACDAWAGGKAGSAVISEEGRSPGSGEATPEAWVIRALPRAQEVLKIYPGWLKVGVAYVSVRVTPKSTARSVVLEVLPLLGRQAESPESFQLVEVAMGCRHVQRTMLMDEQPLLDRLQDIRQMSVRQVSQTRFYVAESRDVAPHVSLFVGGLPPGLSPEEYSSLLHEAGATKATVVSVSHIYSSQGAVVLDVACFAEAERLYMLLKDMAVRGRLLTALVLPDLLHAKLPPDSCPLLVFVNPKSGGLKGRDLLCSFRKLLNPHQVFDLTNGGPLPGLHLFSQVPCFRVLVCGGDGTVGWVLGALEETRYRLACPEPSVAILPLGTGNDLGRVLRWGAGYSGEDPFSVLLSVDEADAVLMDRWTILLDAHEAGSAENDTADAEPPKIVQMSNYCGIGIDAELSLDFHQAREEEPGKFTSRLHNKGVYVRVGLQKISHSRSLHKQIRLQVERQEVELPSIEGLIFINIPSWGSGADLWGSDSDTRFEKPRMDDGLLEVVGVTGVVHMGQVQGGLRSGIRIAQGSYFRVTLLKATPVQVDGEPWVQAPGHMIISAAGPKVHMLRKAKQKPRRAGTTRDARADRAPAPESDPR

SEQ ID NO: 7057 - protein, 409 aa, Homo sapiens
MMKKNNSAKRGPQDGNQQPAPPEKVGWVRKFCGKGIFREIWKNRYVVLKGDQLYISEKEVKDEKNIQEVFDLSDYEKCEELRKSKSRSKKNHSKFTLAHSKQPGNTAPNLIFLAVSPEEKESWINALNSAITRAKNRILDEVTVEEDSYLAHPTRDRAKIQHSRRPPTRGHLMAVASTSTSDGMLTLDLIQEEDPSPEEPTSCAESFRVDLDKSVAQLAGSRRRADSDRIQPSADRASSLSRPWEKTDKGATYTPQAPKKLTPTEKGRCASLEEILSQRDAASARTLQLRAEEPPTPALPNPGQLSRIQDLVARKLEETQELLAEVQGLGDGKRKAKDPPRSPPDSESEQLLLETERLLGEASSNWSQAKRVLQEVRELRDLYRQMDLQTPDSHLRQTTPHSQYRKSLM

SEQ ID NO: 7058 - protein, 438 aa, Homo sapiens
GTRVRRCCRGWRSPVFTNPHVSPLSTAPAHWAPGRPAAGSLGLRVSPEPPPERGSLPPGERSPAASKPPSSPSGPQDGNQQPAPPEKVGWVRKFCGKGIFREIWKNRYVVLKGDQLYISEKEVKDEKNIQEVFDLSDYEKCEELRKSKSRSKKNHSKFTLAHSKQPGNTAPNLIFLAVSPEEKESWINALNSAITRAKNRILDEASTSTSDGMLTLDLIQEEDPSPEEPTSCAESFRVDLDKSVAQLAGSRRRADSDRIQPSADRASSLSRPWEKTDKGATYTPQAPKKLTPTEKGRCASLEEILSQRDAASARTLQLRAEEPPTPALPNPGQLSRIQDLVARKLEETQELLAEVQGLGDGKRKAKDPPRSPPDSESEQLLLETERLLGEASSNWSQAKRVLQEVRELRDLYRQMDLQTPDSHLRQTTPHSQYRKSLM

SEQ ID NO: 7059 - protein, 514 aa, Homo sapiens
MSSPISKSRSLAAFLQQLRSPRQPPRLVTSTAYTSPQPREVPVCPLTAGGETQNAAALPGPTSWPLLGSLLQILWKGGLKKQHDTLVEYHKKYGKIFRMKLGSFESVHLGSPCLLEALYRTESAYPQRLEIKPWKAYRDYRKEGYGLLILEGEDWQRVRSAFQKKLMKPGEVMKLDNKINEVLADFMGRIDELCDERGHVEDLYSELNKWSFESICLVLYEKRFGLLQKNAGDEAVNFIMAIKTMMSTFGRMMVTPVELHKSLNTKVWQDHTLAWDTIFKSVKACIDNRLEKYSQQPSADFLCDIYHQNRLSKKELYAAVTELQLAAVETTANSLMWILYNLSRNPQVQQKLLKEIQSVLPENQVPRAEDLRNMPYLKACLKESMRLTPSVPFTTRTLDKATVLGEYALPKGTVLMLNTQVLGSSEDNFEDSSQFRPERWLQEKEKINPFAHLPFGVGKRMCIGRRLAELQLHLALCWIVRKYDIQATDNEPVEMLHSGTLVPSRELPIAFCQR

SEQ ID NO: 7060 - protein, 707 aa, Homo sapiens
MQTSETGSDTGSTVTLQTSVASQAAVPTQVVQQVPVQQQVQQVQTVQQVQHVYPAQVQYVEGSDTVYTNGAIRTTTYPYTETQMYSQNTGGNYFDTQGSSAQVTTVVSSHSMVGTGGIQMGVTGGQLISSSGGTYLIGNSMENSGHSVTHTTRASPATIEMAIETLQKSDGLSTHRSSLLNSHLQWLLDNYETAEGVSLPRSTLYNHYLRHCQEHKLDPVNAASFGKLIRSIFMGLRTRRLGTRGNSKYHYYGIRVKPDSPLNRLQEDMQYMAMRQQPMQQKQRYKPMQKVDGVADGFTGSGQQTGTSVEQTVIAQSQHHQQFLDASRALPEFGEVEISSLPDGTTFEDIKSLQSLYREHCEAILDVVVNLQFSLIEKLWQTFWRYSPSTPTDGTTITESSNLSEIESRLPKAKLITLCKHESILKWMCNCDHGMYQALVEILIPDVLRPIPSALTQAIRNFAKSLEGWLSNAMNNIPQRMIQTKVAAVSAFAQTLRRYTSLNHLAQAARAVLQNTSQINQMLSDLNRVDFANVQEQASWVCQCDDNMVQRLETDFKMTLQQQSTLEQWAAWLDNVMMQALKPYEGRPSFPKAARQFLLKWSFYSSMVIRDLTLRSAASFGSFHLIRLLYDEYMFYLVEHRVAQATGETPIAVMGEVREAERAVTHWVIKNKPELHFSLNTLLIKTMVPNQVSLRARRDCGVIARVP

SEQ ID NO: 7061 - protein, 749 aa, Homo sapiens
MQTSETGSDTGSTVTLQTSVASQAAVPTQVVQQVPVQQQVQQVQTVQQVQHVYPAQVQYVEGSDTVYTNGAIRTTTYPYTETQMYSQNTGGNYFDTQGSSAQVTTVVSSHSMVGTGGIQMGVTGGQLISSSGGTYLIGNSMENSGHSVTHTTRASPATIEMAIETLQKSDGLSTHRSSLLNSHLQWLLDNYETAEGVSLPRSTLYNHYLRHCQEHKLDPVNAASFGKLIRSIFMGLRTRRLGTRGNSKYHYYGIRVKPDSPLNRLQEDMQYMAMRQQPMQQKQRYKPMQKVDGVADGFTGSGQQTGTSVEQTVIAQSQHHQQFLDASRALPEFGEVEISSLPDGTTFEDIKSLQSLYREHCEAILDVVVNLQFSLIEKLWQTFWRYSPSTPTDGTTITESSNLSEIESRLPKAKLITLCKHESILKWMCNCDHGMYQALVEILIPDVLRPIPSALTQAIRNFAKSLEGWLSNAMNNIPQRMIQTKVAAVSAFAQTLRRYTSLNHLAQAARAVLQNTSQINQMLSDLNRVDFANVQEQASWVCQCDDNMVQRLETDFKMTLQQQSTLEQWAAWLDNVMMQALKPYEGRPSFPKAARQFLLKWSFYSSMVIRDLTLRSAASFGSFHLIRLLYDEYMFYLVEHRVAQATGETPIAVMGEFGDLNAVSPGNLDKDEGSEVESEMDEELDDSSEPQAKREKTELSQAFPVGCMQPVLETGVQPSLLNPIHSEHIVTSTQTIRQCSATGNTYTAV

SEQ ID NO: 7062 - protein, 463 aa, Homo sapiens
  VARIANT 251: Xaa = Any Amino Acid
MLVGSWSSVSGLRKRECRSSAKPESCPLVLFPGQHELHHSLHLFHLLPFPGLCPGAQLHARPVSSTASVYAGAGGSGSGNSVSCSTSFRGGLGSGALAAGMAGGLAGMGSIQNKETMQSLNNRLASYLDRMRSLETENWKLESKIRKHLEKKGPQIRHWSHYFKTIQDLRAQNLANTVDNARIVLQTDNACLAADDFRVKYETELTMCQSVESDIHGLRKVTDDTNVTWLQLETEIEALKEELLLMKKNHXEELKGLQVQIASSGLTVEVDAPKSQDHSKIMADIQAQYNELSRKNREELDKYWSQQIEESSTVVTTQSTEVGAAEMTLTKLRRTVQSLEIDLDSMRNLKASLENSLREVEARYALQMEQLNGILLHLESELAQTRAEGQHQAQEYEALLNIKVKLEAEIATYNNLLEDGKNFNLLNALDSSTSMQTIQKTNSRWIVDGKVVSETNHTKVLRH

SEQ ID NO: 7063 - protein, 1484 aa, Homo sapiens
IMPSEQKQLFCDEKQTTLKKDYDVKNEIVDRSAPKPKISGSIHYALKNVKIDLPKINIPNEVLLKHEVDKYRKLFQSKQQTARKSISIKTVSCVEECTLLHKSERAEEEGVKMSAKILNFSCLKCRDNTRYSPNDLQKHFQMWHHGELPSYPCEMCNFSANDFQVFKQHRRTHRSTLVKCDICNNESVYTLLNLTKHFTSTHCVNGNFQCEKCKFSTQDVGTFVQHIHRHNEIHYKCGKCHHVCFTKGELQKHLHIHSGTFPFTCQYCSYGATRREHLVRHVITLHKEHLYAKEKLEKDKYEKRMAKTSAGLKLILKRYKIGASRKTFWKRKKINSGSDRSIEKNTQVLKKMNKTQTKSEDQSHVVQEHLSEEKDERLHCENNDKAPESESEKPTPLSTGQGNRAEEGPNASSGFMKTAVLGPTLKNVMMKNNKLAVSPNYNATFMGFKMMDGKQHIVLKLVPIKQNVCSPGSQSGAAKDGTANLQPQTLDTNGFLTGVTTELNDTVYMKAATPFSCSSSILSGKASSEKEMTLISQRNNMLQTMDYEKSVSSLSATSELVTASVNLTTKFETRDNVDFWGNHLTQSHPEVLGTTIKSPDKVNCVAKPNAYNSGDMHNYCINYGNCELPVESSNQGSLPFHNYSKVNNSNKRRRFSGTAVYENPQRESSSSKTVVQQPISESFLSLVRQESSKPDSLLASISLLNDKDGTLKAKSEIEEQYVLEKGQNIDGQNLYSNENQNLECATEKSKWEDFSNVDSPMMPRITSVFSLQSQQASEFLPPEVNQLLQDVLKIKPDVKQDSSNTPNKGLPLHCDQSFQKHEREGKIVESSKDFKVQGIFPVPPGSVGINVPTNDLNLKFGKEKQVSSIPQDVRDSEKMPRISGFGTLLKTQSDAIITQQLVKDKLRATTQNLGSFYMQSPLLNSEQKKTIIVQTSKGFLIPLNITNKPGLPVIPGNALPLVNSQGIPASLFVNKKPGMVLTLNNGKLEGVSAVKTEGAPARGTVTKEPCKTPILKVEPNNNCLTPGLCSSIGSCLSMKSSSENTLPLKGPYILKPTSSVKAVLIPNMLSEQQSTKLNISDSVKQQNEIFPKPPLYTFLPDGKQAVFLKCVMPNKTELLKPKLVQNSTYQNIQPKKPEGTPQRILLKIFNPVLNVTAANNLSVSNSASSLQKDNVPSNQIIGGEQKEPESRDALPFLLDDLMPANEIVITSTATCPESSEEPICVSDCSESRVLRCKTNCRIERNFNRKKTSKKIFSKTKTHGSKDSETAFVSRNRNCKRKCRDSYQEPPRRKATLHRKCKEKAKPEDVRETFGFSRPRLSKDSIRTLRLFPFSSKQLVKCPRRNQPVVVLNHPDADAPEVVSVMKTIAKFNGHVLKVSLSKRTINALLKPVCYNPPKTTYDDFSKRHKTFKPVSSVKERFVLKLTLKKTSKNNYQIVKTTSENILKAKFNCWFCGRVFDNQDTWAGHGQRHLMEATRDWNMLE

SEQ ID NO: 7064 - protein, 514 aa, Homo sapiens
MADSGLDKKSTKCPDCSSASQKDVLCVCSSKTRVPPVLVVEMSQTSSIGSAESLISLERKKEKNINRDITSRKDLPSRTSNVERKASQQQWGRGNFTEGKVPHIRIENGAAIEEIYTFGRILGKGSFGIVIEATDKETETKWAIKKVNKEKAGSSAVKLLEREVNILKSVKHEHIIHLEQVFETPKKMYLVMELCEDGELKEILDRKGHFSENETRWIIQSLASAIAYLHNNDIVHRDLKLENIMVKSSLIDDNNEINLNIKVTDFGLAVKKQSRSEAMLQATCGTPIYMAPEVISAHDYSQQCDIWSIGVVMYMLLRGEPPFLASSEEKLFELIRKGELHFENAVWNSISDCAKSVLKQLMKVDPAHRITAKELLDNQWLTGNKLSSVRPTNVLEMMKEWKNNPESVEENTTEEKNKPSTEEKLKSYQPWGNVPDANYTSDEEEEKQSTAYEKQFPATSKDNFDMCSSSFTSSKLLPAEIKGEMEKTPVTPSQGTATKYPAKSGALSRTKKKL

SEQ ID NO: 7065 - protein, 706 aa, Homo sapiens [sequence omitted]

SEQ ID NO: 7066 - protein, 253 aa, Homo sapiens
MGELPGSEGMWENCPLGWVKKKASGTLAPLDFLLQRKRLWLWASEPVRPQPQGIHRFREARRQFCRMRGSRLTGGRKGFGSSGLRFGRDGFSEEVMPQPVLKAMRCAEGAWWFSPDGPAGSAASIWPAEGAERLPGQLGRDRLEVVYSVPDNVPGQNGSRRPLVCKITGKCLSVCSEENAKAGGCSAFPLLLSQLGARMTGREHAHKGPELTTPDSGLPRPPNPALAGFRALAQHSPPLGTSTPSAVLLSAAT

SEQ ID NO: 7067 - protein, 510 aa, Homo sapiens
MAAELVEAKNMVMSFRVSDLQMLLGFVGRSKSGLKHELVTRALQLVQFDCSPELFKKIKELYETRYAKKNSEPAPQPHRPLDPLTMHSTYDRAGAVPRTPLAGPNIDYPVLYGKYLNGLGRLPAKTLKPEVRLVKLPFFNMLDELLKPTELVPQNNEKLQESPCIFALTPRQVELIRNSRELQPGVKAVQVVLRICYSDTSCPQEDQYPPNIAVKVNHSYCSVPGYYPSNKPGVEPKRPCRPINLTHLMYLSSATNRITVTWGNYGKSYSVALYLVRQLTSSELLQRLKTIGVKHPELCKALVKEKLRLDPDSEIATTGVRVSLICPLVKMRLSVPCRAETCAHLQCFDAVFYLQMNEKKPTWMCPVCDKPAPYDQLIIDGLLSKILSECEDADEIEYLVDGSWCPIRAEKERSCSPQGAILVLGPSDANGLLPAPSVNGSGALGSTGGGGPVGSMENGKPGADVVDLTLDSSSSSEDEEEEEEEEEDEDEEGPRPKRRCPFQKGLVPAC

SEQ ID NO: 7068 - protein, 826 aa, Homo sapiens
MNIQEQGFPLDLGASFTEDAPRPPVPGEEGELVSTDPRPASYSFCSGKGVGIKGETSTATPRRSDLDLGYEPEGSASPTPPYLKWAESLHSLLDDQDGISLFRTFLKQEGCADLLDFWFACTGFRKLEPCDSNEEKRLKLARAIYRKYILDNNGIVSRQTKPATKSFIKGCIMKQLIDPAMFDQAQTEIQATMEENTYPSFLKSDIYLEYTRTGSESPKVCSDQSSGSGTGKGISGYLPTLNEDEEWKCDQDMDEDDGRDAAPPGRLPQKLLLETAAPRVSSSRRYSEGREFRYGSWREPVNPYYVNAGYALAPATSANDSEQQSLSSDADTLSLTDSSVDGIPPYRIRKQHRREMQESVQVNGRVPLPHIPRTYRVPKEVRVEPQKFAEELIHRLEAVQRTREAEEKLEERLKRVRMEEEGEDGDPSSGPPGPCHKLPPAPAWHHFPPRCVDMGCAGLRDAHEENPESILDEHVQRVLRTPGRQSPGPGHRSPDSGHVAKMPVALGGAASGHGKHVPKSGAKLDAAGLHHHRHVHHHVHHSTARPKEQVEAEATRRAQSSFAWGLEPHSHGARSRGYSESVGAAPNASDGLAHSGKVGVACKRNAKKAESGKSASTEVPGASEDAEKNQKIMQWIIEGEKEISRHRRTGHGSSGTRKPQPHENSRPLSLEHPWAGPQLRTSVQPSHLFIQDPTMPPHPAPNPLTQLEEARRRLEEEEKRASRAPSKQRTRSQRKVGGGSAQPCDSIVVAYYFCGEPIPYRTLVRGRAVTLGQFKELLTKKGSYRYYFKKVSDEFDCGVVFEEVREDEAVLPVFEEKIIGKVEKVD

SEQ ID NO: 7069 - protein, 862 aa, Homo sapiens
MNIQEQGFPLDLGASFTEDAPRPPVPGEEGELVSTDPRPASYSFCSGKGVGIKGETSTATPRRSDLDLGYEPEGSASPTPPYLKWAESLHSLLDDQDGISLFRTFLKQEGCADLLDFWFACTGFRKLEPCDSNEEKRLKLARAIYRKYILDNNGIVSRQTKPATKSFIKGCIMKQLIDPAMFDQAQTEIQATMEENTYPSFLKSDIYLEYTRTGSESPKVCSDQSSGSGTGKGISGYLPTLNEDEEWKCDQDMDEDDGRDAAPPGRLPQKLLLETAAPRVSSSRRYSEGREFRYGSWREPVNPYYVNAGYALAPATSANDSEQQSLSSDADTLSLTDSSVDGIPPYRIRKQHRREMQESVQVNGRVPLPHIPRTYRVPKEVRVEPQKFAEELIHRLEAVQRTREAEEKLEERLKRVRMEEEGEDGDPSSGPPGPCHKLPPAPAWHHFPPRCVDMGCAGLRDAHEENPESILDEHVQRVLRTPGRQSPGPGHRSPDSGHVAKMPVALGGAASGHGKHVPKSGAKLDAAGLHHHRHVHHHVHHSTARPKEQVEAEATRRAQSSFAWGLEPHSHGARSRGYSESVGAAPNASDGLAHSGKVGVACKRNAKKAESGKSASTEVPGASEDAEKNQKIMQWIIEGEKEISRHRRTGHGSSGTRKPQPHENSRPLSLEHPWAGPQLRTSVQPSHLFIQDPTMPPHPAPNPLTQLEEARRRLEEEEKRASRAPSKQRYVQEVMRRGRACVRPACAPVLHVVPAVSDMELSETETRSQRKVGGGSAQPCDSIVVAYYFCGEPIPYRTLVRGRAVTLGQFKELLTKKGSYRYYFKKVSDEFDCGVVFEEVREDEAVLPVFEEKIIGKVEKVD

SEQ ID NO: 7070 - protein, 131 aa, Homo sapiens
MAPEENAGSELLLQSFKRRFLAARALRSFRWQSLEAKLRDSSDSELLRDILQKTCCIAQKPSCRWSGSCGGWLPAGSTSGLLNSTWPLPSATQRCASCSPPSYAGLGSDGKRKLIMTRNCFPTESTWRWQS

SEQ ID NO: 7071 - protein, 165 aa, Homo sapiens
MAPEENSGSELLLQSFKRRFLAARALRSFPWQSLEAKLRDSSDSELLRDILQKHEAVHTEPLDELYEVLAETLMAKESTQGHRSYLLTCCIAQKPSCRWSGSCGGWLPAGSTSGLLNSTWPLPSATQRCASCSPPSYAGLGSDGKRKLIMTRNCFPTESTWRWQS

SEQ ID NO: 7072 - protein, 3664 aa, Homo sapiens
MVRETRHLWVGNLPENVREEKIIEHFKRYGRVESVKILPKRGSEGGVAAFVDFVDIKSAQKAHNSVNKMGDRDLRTDYNEPGTIPSAARGLDDTVSIASRSREVSGFRGGGGGPAYGPPPSLHAREGRYERRLDGASDNRERAYEHSAYGHHERGTGGFDRTRHYDQDYYRDPRERTLQHGLYYASRSRSPNRFDAHDPRYEPRAREQFTLPSVVHRDIYRDDITREVRGRRPERNYQHSRSRSPHSSQSRNQSPQRLASQASRPTRSPSGSGSRSRSSSSDSISSSSSTSSDSSDSSSSSSDDSPARSVQSAAVPAPTSQLLSSLEKDEPRKSFGIKVQNLPVRSTDTSLKDGLFHEFKKFGKVTSVQIHGTSEERYGLVFFRQQEDQEKALTASKGKLFFGMQIEVTAWIGPETESENEFRPLDERIDEFHPKATRTLFIGNLEKTTTYHDLRNIFQRFGEIVDIDIKKVNGVPQYAFLQYCDIASVCKAIKKMDGEYLGNNRLKLGFGKSMPTNCVWLDGLSSNVSDQYLTRHFCRYGPVVKVVFDRLKGMALVLYNEIEYAQAAVKETKGRKIGGNKIKVDFANRESQLAFYHCMEKSGQDIRDFYEMLAERREERRASYDYNQDRTYYESVRTPGTYPEDSRRDYPARGREFYSEWETYQGDYYESRYYDDPREYRDYRNDPYEQDIREYSYRQRERERERERFESDRDRDHERRPIERSQSPVHLRRPQSPGASPSQAERLPSDSERRLYSRSSDRSGSCSSLSPPRYEKLDKSRLERYTKNEKTDKERTFDPERVERERRLIRKEKVEKDKTDKQKRKGKVHSPSSQSSETDQENEREQSPEKPRSCNKLSREKADKEGIAKNRLELMPCVVLTRVKEKEGKVIDHTPVEKLKAKLDNDTVKSSALDQKLQVSQTEPAKSDLSKLESVRMKVPKEKGLSSHVEVVEKEGRLKARKHLKPEQPADGVSAVDLEKLEARKRRFADSNLKAEKQKPEVKKSSPEMEDARVLSKKQPDVSSREVILLREGEAERKPVRKEILKRESKKIKLDRLNTVASPKDCQELASISVGSGSRPSSDLQARLGELAGESVENQEVQSKKPIPSKPQLKQLQVLDDQGPEREDVRKNYCSLRDETPERKSGQEKSHSVNTEEKIGIDIDHTQSYRKQMEQSRRKQQMEMEIAKSEKFGSPKKDVDEYERRSLVHEVGKPPQDVTDDSPPSKKKRMDHVDFDICTKRERNYRSSRQISEDSERTGGSPSVRHGSFHEDEDPIGSPRLLSVKGSPKVDEKVLPYSNITVREESLKFNPYDSSRREQMADMAKIKLSVLNSEDELNRWDSQMKQDAGRFDVSFPNSIIKRDSLRKRSVRDLEPGEVPSDSDEDGEHKSHSPRASALYESSRLSFLLRDREDKLRERDERLSSSLERNKFYSFALDKTITPDTKALLERAKSLSSSREENWSFLDWDSRFANFRNNKDKEKVDSAPRPIPSWYMKKKKIRTDSEGKMDDKKEDHKEEEQERQELFASRFLHSSIFEQDSKRLQHLERKEEDSDFISGRIYGKQTSEGANSTTDSIQEPVVLFHSRFMELTRMQQKEKEKDQKPKEVEKQEDTENHPKTPESAPENKDSELKTPPSVGPPSVTVVTLESAPSALEKTTGDKTVEAPLVTEEKTVEPATVSEEAKPASEPAPAPVEQLEQVDLPPGADPDKEAAMMPAGVEEGSSGDQPPYLDAKPPTPGASFSQAESNVDPEPDSTQPLSKPAQKSEEANEPKAEKPDATADAEPDANQKAEAAPESQPPASEDLEVDPPVAAKDKKPNKSKRSKTPVQAAAVSIVEKPVTRKSERIDREKLKRSNSPRGEAQKLLELKMEAEKITRTASKNSAADLEHPEPSLPLSRTRRRNVRSVYATMGDHENRSPVKEPVEQPRVTRKRLERELQEAAAVPTTPRRGRPPKTRRRADEEEENEAKEPAETLKPPEGWRSPRSQKTAAGGGPQGKKGKNEPKVDATRPEATTEVGPQIGVKESSMEPKAAEEEAGSEQKRDRKDAGTDKNPPETAPVEVVEKKPAPEKNSKSKRGRSRNSRLAVDKSASLKNVDAAVSPRGAAAQAGERESGVVAVSPEKSESPQKEDGLSSQLKSDPVDPDKEPEKEDVSASGPSPEATQLAKQMELEQAVEHIAKLAEASASAAYKADAPEGLAPEDRDKPAHQASETELAAAIGSIINDISGEPENFPAPPPYPGESQTDLQPPAGAQALQPSEEGMETDEAVSGILETEAATESSRPPVNAPDPSAGPTDTKEARGNSSETSHSVPEAKGSKEVEVTLVRKDKGRQKTTRSRRKRNTNKKVVAPVESHVPESNQAQGESPAANEGTTVQHPEAPQEEKQSEKPHSTPPQSCTSDLSKIPSTENSSQEISVEERTPTKASVPPDLPPPPQPAPVDEEPQARFRVHSIIESDPVTPPSDPSIPIPTLPSVTAAKLSPPVASGGIPHQSPPTKVTEWITRQEEPRAQSTPSPALPPDTKASDVDTSSSTLRKILMDPKYVSATSVTSTSVTTAIAEPVSAAPCLHEAPPPPVDSKKPLEEKTAPPVTNNSEIQASEVLVAADKEKVAPVIAPKITSVISRMPVSIDLENSQKITLAKPAPQTLTGLVSALTGLVNVSLVPVNALKGPVKGSVTTLKSLVSTPAGPVNVLKGPVNVLTGPVNVLTTPVNATVGTVNAAPGTVNAAASAVNATASAVTVTAGAVTAASGGVTATTGTVTMAGAVIAPSTKCKQRASANENSRFHPGSMPVIDDRPADAGSGAGLRVNTSEGVVLLSYSGQKTEGPQRISAKISQIPPASAMDIEFQQSVSKSQVKPDSVTASQPPSKGPQAPAGYANVATHSTLVLTAQTYNASPVISSVKADRPSLEKPEPIHLSVSTPVTQGGTVKVLTQGINTPPVLVHNQLVLTPSIVTTNKKLADPVTLKIETKVLQPANLGSTLTPHHPPALPSKLPTEVNHVPSGPSIPADRTVSHLAAAKLDAHSPRPSGPGPSSFPRASHPSSTASTALSTNATVMLAAGIPVPQFISSIHPEQSVIMPPHSITQTVSLSHLSQGEVRMNTPTLPSITYSIRPEALHSPRAPLQPQQIEVRAPQRASTPQPAPAGVPALASQHPPEEEVHYHLPVARATAPVQSEVLVMQSEYRLHPYTVPRDVRIMVHPHVTAVSEQPRAADGVVKVPPASKAPQQPGKEAAKTPDAKAAPTPTPAPVPVPVPLPAPAPAPHGEARILTVTPSNQLQGLPLTPPVVVTHGVQIVHSSGELFQEYRYGDIRTYHPPAQLTHTQFPAASSVGLPSRTKTAAQGPPPEGEPLQPPQPVQSTQPAQPAPPCPPSQLGQPGQPPSSKMPQVSQEAKGTQTGVEQPRLPAGPANRPPEPHTQVQRAQAETGPTSFPSPVSVSMKPDLPVSLPTQTAPKQPLFVPTTSGPSTPPGLVLPHTEFQPAPKQDSSPHLTSQRPVDMVQLLKKYPIVWQGLLALKNDTAAVQLHFVSGNNVLAHRSLPLSEGGPPLRIAQRMRLEATQLEGVARRMTVETDYCLLLALPCGRDQEDVVSQTESLKAAFITYLQAKQAAGIINVPNPGSNQPAYVLQIFPPCEFSESHLSRLAPDLLASISNISPHLMIVIASV

SEQ ID NO: 7073 - protein, 258 aa, Homo sapiens
MLVLYGHSTQDLPETNARVVGGTEAGRNSWPSQISLQYRSGGSRYHTCGGTLIRQNWVMTAAHCVDYQKTFRVVAGDHNLSQNDGTEQYVSVQKIVVHPYWNSDNVAAGYDIALLRLAQSVTLNSYVQLGVLPQEGAILANNSPCYITGWGKTKTNGQLAQTLQQAYLPSVDYAICSSSSYWGSTVKNTMVCAGGDGVRSGCQGDSGGPLHCLVNGKYSLHGVTSFVSSRGCNVSRKPTVFTQVSAYISWINNVIASN

SEQ ID NO: 7074 - protein, 3224 aa, Homo sapiens
MRRSKADVERYIASVQGSTPSPRQKSMKGFYFAKLYYEAKEYDLAKKYICTYINVQERDPKAHRFLGLLYELEENTDKAVECYRRSVELNPTQKDLVLKIAELLCKNDVTDGRAKYWLERAAKLFPGSPAIYKLKEQLLDCEGEDGWNKLFDLIQSELYVRPDDVHVNIRLVEVYRSTKRLKDAVAHCHEAERNIALRSSLEWNSCVVQTLKEYLESLQCLESDKSDWRATNTDLLLAYANLMLLTLSTRDVQESRELLQSFDSALQSVKSLGGNDELSATFLEMKGHFYMHAGSLLLKMGQHSSNVQWRALSELAALCYLIAFQVPRPKIKLIKGEAGQNLLEMMACDRLSQSGHMLLNLSRGKQDFLKEIVETFANKSGQSALYDALFSSQSPKDTSFLGSDDIGNIDVREPELEDLTRYDVGAIRAHNGSLQHLTWLGLQWNSLPALPGIRKWLKQLFHHLPHETSRLETNAPESICILDLEVFLLGVVYTSHLQLKEKCNSHHSSYQPLCLPLPVCKQLCTERQKSWWDAVCTLIHRKAVPGNVAKLRLLVQHEINTLRAQEKHGLQPALLVHWAECLQKTGSGLNSFYDQREYIGRSVHYWKKVLPLLKIIKKKNSIPEPIDPLFKHFHSVDIQASEIVEYEEDAHITFAILDAVNGNIEDAVTAFESIKSVVSYWNLALIFHRKAEDIENDALSPEEQEECKNYLRKTRDYLIKIIDDSDSNLSVVKKLPVPLESVKEMLNSVMQELEDYSEGGPLYKNGSLRNADSEIKRSTPSPTRYSLSPSKSYKYSPKTPPRWAEDQNSLLKMICQQVEAIKKEMQELKLNSSNSASPHRWPTENYGPDSVPDGYQGSQTFHGAPLTVATTGPSVYYSQSPAYNSQYLLRPAANVTPTKGPVYGMNRLPPQQHIYAYPQQMHTPPVQSSSACMFSQEMYGPPALRFESPATGILSPRGDDYFNYNVQQTSTNPPLPEPGYFTKPPIAAHASRSAESKTIEFGKTNFVQPMPGEGLRPSLPTQAHTTQPTPFKFNSNFKSNDGDFTFSSPQVVTQPPPAAYSNSESLLGLLTSDKPLQGDGYSGAKPIPGGQTIGPRNTFNFGSKNVSGISFTENMGSSQQKNSGFRRSDDMFTFHGPGKSVFGTPTLETANKNHETDGGSAHGDDDDDGPHFEPVVPLPDKIEVKTGEEDEEEFFCNRAKLFRFDVESKEWKERGIGNVKILRHKTSGKIRLLMRREQVLKICANHYISPDMKLTPNAGSDRSFVWHALDYADELPKPEQLAIRFKTPEEAALFKCKFEEAQSILKAPGTNVAMASNQAVRIVKEPTSHDNKDICKSDAGNLNFEFQVAKKEGSWWHCNSCSLKNASTAKKCVSCQNLNPSNKELVGPPLAETVFTPKTSPENVQDRFALVTPKKEGHWDCSICLVRNEPTVSRCIACQNTKSANKSGSSFVHQASFKFGQGDLPKPINSDFRSVFSTKEGQWDCSACLVQNEGSSTKCAACQNPRKQSLPATSIPTPASFKFGTSETSKTLKSGFEDMFAKKEGQWDCSSCLVRNEANATRCVACQNPDKPSPSTSVPAPASFKFGTSETSKAPKSGFEGMFTKKEGQWDCSVCLVRNEASATKCIACQNPGKQNQTTSAVSTPASSETSKAPKSGFEGMFTKKEGQWDCSVCLVRNEASATKCIACQNPGKQNQTTSAVSTPASSETSKAPKSGFEGMFTKKEGQWDCSVCLVRNEASATKCIACQCPSKQNQTTAISTPASSEISKAPKSGFEGMFIRKGQWDCSVCCVQNESSSLKCVACDASKPTHKPIAEAPSAFTLGSEMKLHDSSGSQVGTGFKSNFSEKASKFGNTEQGFKFGHVDQENSPSFMFQGSSNTEFKSTKEGFSIPVSADGFKFGISEPGNQEKKSEKPLENGTGFQAQDISGQKNGRGVIFGQTSSTFTFADLAKSTSGEGFQFGKKDPNFKGFSGAGEKLFSSQYGKMANKANTSGDFEKDDDAYKTEDSDDIHFEPVVQMPEKVELVTGEEDEKVLYSQRVKLFRFDAEVSQWKERGLGNLKILKNEVNGKLRMLMRREQVLKVCANHWITTTMNLKPLSGSDRAWMWLASDFSDGDAKLEQLAAKFKTPELAEEFKQKFEECQRLLLDIPLQTPHKLVDTGRAAKLIQRAEEMKSGLKDFKTFLTNDQTKVTEEENKGSGTGAAGASDTTIKPNPENTGPTLEWDNYDLREDALDDSVSSSSVHASPLASSPVRKNLFRFGESTTGFNFSFKSALSPSKSPAKLNQSGTSVGTDEESDVTQEEERDGQYFEPVVPLPDLVEVSSGEENEQVVFSHRAKLYRYDKDVGQWKERGIGDIKILQNYDNKQVRIVMRRDQVLKLCANHRITPDMTLQNMKGTERVWLWTACDFADGERKVEHLAVRFKLQDVADSFKKIFDEAKTAQEKDSLITPHVSRSSTPRESPCGKIAVAVLEETTRERTDVIQGDDVADATSEVEVSSTSETTPKAVVSPPKFVFGSESVKSIFSSEKSKPFAFGNSSATGSLFGFSFNAPLKSNNSETSSVAQSGSESKVEPKKCELSKNSDIEQSSDSKVKNLFASFPTEESSINYTFKTPEKAKEKKKPEDSPSDDDVLIVYELTPTAEQKALATKLKLPPTFFCYKNRPDYVSEEEEDDEDFETAVKKLNGKLYLDGSEKCRPLEENTADNEKECIIVWEKKPTVEEKAKADTLKLPPTFFCGVCSDTDEDNGNGEDFQSELQKVQEAQKSQTEEITSTTDSVYTGGTEVMVPSFCKSEEPDSITKSISSPSVSSETMDKPVDLSTRKEIDTDSTSQGESKIVSFGFGSSTGLSFADLASSNSGDFAFGSKDKNFQWANTGAAVFGTQSVGTQSAGKVGEDEDGSDEEVVHNEDIHFEPIVSLPEVEVKSGEEDEEILFKERAKLYRWDRDVSQWKERGVGDIKILWHTMKNYYRILMRRDQVFKVCANHVITKTMELKPLNVSNNALVWTASDYADGEAKVEQLAVRFKTKEVADCFKKTFEECQQNLMKLQKGHVSLAAELSKETNPVVFFDVCADGEPLGRITMELFSNIVPRTAENFRALCTGEKGFGFKNSIFHRVIPDFVCQGGDITKHDGTGGQSIYGDKFEDENFDVKHTGPGLLSMANQGQNTNNSQFVITLKKAEHLDFKHVVFGFVKDGMDTVKKIESFGSPKGSVCRRITITECGQI

SEQ ID NO: 7075 - protein, 2620 aa, Homo sapiens
MTNFYEERTTMIAARDLQEFVPFGGDHCKHHPNALNLQLRQLQPASELWSSDGAAGLVGSLQEVTIHEKQKENWQLRKGVSEIGEDVDYDEELYVAGNMVIWSKGSKSQALAVYKAFTVDSPVQQVGKVFIPGLPAPSLTMSNTMPRPSTPLDGVSAPKPLSKLLGSLDEDTSSSQWSSAGYAAASVAFRRFPLGIGDCCGAERWSHASREPGWWRDELQQGLRGAVRRLGAGLRPVASKGVMAPDERCSLARSVEAAASTWPCGGLDGSGVMAPDRRCSLARSVEAPASTWPCGGLDGSGVMAPDGRCSLARSVEAPASTWPCGGLDGSGVMAPDGRCSLARSVEAAASTWPGGCLDGSGVMAPDGRCSLARSVEAAASTWPGGCLDGSGVMAPDGRCSLARSVEAAASTRPGGCLDGSGIMAPDGRCSLARSVEAAASTRPSGGLDGSGVMAPDGRCSLARSVEAAASTRPGGGLDGSGVMAPDGRCSLARSVEAAASTWPCGGLDGSGVMAPDGRCSLARSVEAAASTRPGGGLDGSGVMAPDGRCSLARSVEAAASMAQASWLPTGAAPWRALLRRRPRPGPAAASMAQASWLPTGAVTWRALLRRRRRPRPGQAAAASTWPCGGLDGSGVMAPDGRCSLARSVEAAASTRPGGGLDGSGVMAPDGRCSLARSVEAAASTRPCGGLDGSGVMAPDGRCSLARSVEAAASTRPGGGLDGSGKSTRGFYFAKLYYEAKEYDLAKKYICTYINVREMDPRAHRFLGLLYELEENTEKAVECYRRSVELNPTQKDLVLKIAELLCKNDVTDGRAEYWVERAAKLFPGSPAIYKLKEQLLDCEGEDGWNKLFDLIQSELYVRPDDVHVNIRLVELYRSTKRLKDAVARCHEAERNIALRSSLEWNSCVVQTLKEYLESLQCLESDKSDWRATNTDLLLAYANLMLLTLSTRDVQESRELLESFDSALQSAKSSLGGNDELSATFLEMKGHFYMHAGSLLLKMGQHGNNVQWRALSELAALCYLIAFQVPRPKIKLIKGEAGQNLLEMMACDRLSQSGHMLLNLSRGKQDFLKVVVETFANKSGQSALYDALFSSQSPKDTSFLGSDDIGNIDVQEPELEDLARYDVGAIRAHNGSLQHLTWLGLQWNSLPALPGIRKWLKQLFHHLPQETSRLETNAPESICILDLEVFLLGVVYTSHLQLKEKCNSHHSSYQPLCLPLPVCKQLCTERQKSWWDAVCTLIHRKAVPGNSAKLRLLVQHEINTLRAQEKHGLQPALLVHWAKCLQKMGSGLNSFYDQREYIGRSVHYWKKVLPLLKIIKKKNSIPEPIDPLFKHFHSVDIQASEIVEYEEDAHVTFAILDAVNGNIEDAMTAFESIKSVVSYWNLALIFHRKAEDIANDALSPEEQEECKNYLRKTRGYLIKILDDSDSNLSVVKKLPVPLESVKEMLKSVMQELENYSEGGPLYKNGSLRNADSEIKHSTPSPTKYSLSPSKSYKYSPKTPPRWAEDQNSLLKMIRQEVKAIKEEMQELKLNSSKSASHHRWPTENYGPDSVPDGYQGSQTFHGAPLTVATTGPSVYYSQSPAYNSQYLLRPAANVTPTKGSSNTEFKSTKEGFSIPVSADGFKFGISEPGNQEKKSEKPLENDTGLQAQDISGRKKGRGVIFGQTSSTFTFADVAKSTSGEGFQFGKKDLNFKGFSGAGEKLFSSQYGKMANKANTSGDFEKDDDAYKTEDSDDIHFEPVVQMPEKVELVTGEEGEKVLYSQGVKLFRFDAEVSQWKERGLGNLKILKNEVNGKVRMLMQREQVLKVCANHWITTTMNLKPLSGSDRAWMWSASDFSDGDAKLERLAAKFKTPELAEEFKQKFEECQRLLLDIPLQTPHKLVDTGRAAKLIQRAEEMKSGLKDFKTFLTNDQTKVAEEENKGSGTGAAGASDTTIKPNAENTGPTLEWDNYDLREDALDDSVSSSSVHASPLASSPVRKNLFHFDESTTGSNFSFKSALSLSKSPAKLNQSGTSVGTDEESDVTQEEERDGQYFEPVVPLPDLVEVSSGEENEQVVFSHRAEFYRYDKDVGQWKERGIGDIKILQNYDNKHVRILMRRDQVLKLCANHRITPDMSLQNMKGTERVWVWTACDFADGERKVEHLAVRFKLQDVADSFKKIFDEAKTAQEKDSLITPHVSRSSTPRESPCGKIAVAVLEETTRERTDVIQGDDVADAASEVEVSSTSETTTKAVVSPPKFVFGSESVKRIFSSEKSKPFAFGNSSATGSLFGFSFNAPLKSNNSETSSVAQSGSESKVEPKKCELSKNSDIEQSSDSKVKNLSASFPTEESSINYTFKTPEKGPVSSQQSLKNLRERRNTDLPLLDMHTVTREEGEGMETTDTESVSSASTYTQSLEQLLNSPETKLEPPLWYAEFTKEELVQKLSSTTKSADHLNGLLREIEATNAVLMEQIKLLKSEIRRLERNQEQEVSAANVEHLKNVLLQFIFLKPGSERERLLPVINTMLQLSLEEKGKLAAVAQVLHSERYTEGKSTQRSKSFTRHHVKGTRKGFKQRSYISSRSGVQLQVALTSGDRFLDSVKAVWLVASGRSKCDLTLTVPGKTLAGFIQTLGPKDHGHPAE

SEQ ID NO: 7076 - protein, 1411 aa, Homo sapiens
MACDRLSQSGHMLLNLSRGKQDFLKEVVETFANKSGQSVLYNALFSSQSSKDTSFLGSDDIGNIDVQEPELEDLARYDVGAIQAHNGSLQHLTWLGLQWNSLPALPGIRKWLKQLFHHLPQETSRLETNAPESICILDLEVFLLGVVYTSHLQLKEKCNSHHSSYQPLCLPLPVCKRLCTERQKSWWDAVCTLIHRKAVPGNSAELRLVVQHEINTLRAQEKHGLQPALLVHWAKCLQKMGRGLNSSYDQQEYIGRSVHYWKKVLPLLKIIKKNSIPEPIDPLFKHFHSVDIQASEIVEYEEDAHITFAILDAVHGNIEDAVTAFESIKSVVSYWNLALIFHRKAEDIENDAVFPEEQEECKNYLRKTRDYLIKIIDDSDSNLSVVKKLPVPLESVKEMLKSVMQELEDYSEGGPLYKNGSLRNADSEIKHSTPSPTKYSLSPSKSYKYSPKTPPRWAEDQNSLRKMICQEVKAITKLNSSKSASRHRWPTENYGPDSVPDGYQGSQTFHGAPLTVATTGPSVYYSQSPAYNSQYLLRPAANVTPTKGSSNTEFKSTKEGFSIAVSADGFKFGISEPGNQEKKSEKPLENDTGFQAQDISGQKNGRGVIFGQTSSTFTFADVAKSTSGEGFQFGKKDPNFKGFSGAGEKLFSSQCGKMANKANTSGDFEKDDDACKTEDSDDIHFEPVVQMPEKVELVTGEEGEKVLYSQGVKLFRFDAEISQWKERGLGNLKILKNEVNGKPRMLMRRDQVLKVCANHWITTTMNLKPLSGSDRAWMWLASDFSDGDAKLERLAAQFKTPELAEEFKQKFEECQRLLLDIPLQTPHKLVDTGRAAKLIQRAEEMKSGLKDFKTFLTNDQTKVTEEENKGSGTGAAGASDTTIKPNPENTGPTLEWDNYDLREDALDDNVSSSSVHDSPLASSPVRKNIFRFDESTTGFNFSFKSALSLSKSPAKLNQSGTSVGTDEESDVTQEEERDGQYFEPVVPLPDLVEVSSGEENEQVVFSHMAELYRYDKDVGQWKERGIGDIKILQNYDNKQVRIVMRRDQVLKLCANHRITPDMSLQNMKGTERVWVWTACDFADGERKVEHLAVRFKLQDVADSFKKIFDEAKTAQEKDSLITPHVSRSSTPRESPCGKIAVAVLEETTRERTDVIQGDDVADAASEVEVSSTSETTTKAVVSPPKFVFGSESVKRIFSSEKSNPFAFGNSSATGSLFGFSFNAPLKSNDSETSSVAQSGSESKVEPKKCELSKNSDIEQSSDSKVKNLSASFPMEESSINYTFKTPEKEPPLWHAEFTKEELVQKLSSTTKSADQLNGLLRETEATSAVLMEQIKLLKSEIRRLERNQEESAANVEHLKNVLLQFIFLKPGSERESLLPVINTMLQLSPEEKGKLAAVAQGLQETSIPKKK

SEQ ID NO: 7077 - protein, 2617 aa, Homo sapiens
MLTDSGGGGTSFEEDLDSVAPRSAPAGASEPPPPGGVGLGIRTVRLFGEAGPASGVGSSGGGGSGSGTGGGDAALDFKLAAAVLRTGGGGGASGSDEDEVSEVESFILDQEDLDNPVLKTTSEIFLSSTAEGADLRTVDPETQARLEALLEAAGIGKLSTADGKAFADPEVLRRLTSSVSCALDEAAAALTRMKAENSHNAGQVDTRSLAEACSDGDVNAVRKLLDEGRSVNEHTEEGESLLCLACSAGYYELAQVLLAMHANVEDRGNKGDITPLMAASSGGYLDIVKLLLLHDADVNSQSATGNTALTYACAGGFVDIVKVLLNEGANIEDHNENGHTPLMEAASAGHVEVARVLLDHGAGINTHSNEFKESALTLACYKGHLDMVRFLLEAGADQEHKTDEMHTALMEACMDGHVEVARLLLDSGAQVNMPADSFESPLTLAACGGHVELAALLIERGANLEEVNDEGYTPLMEAAREGHEEMVALLLAQGANINAQTEETQETALTLACCGGFSEVADFLIKAGADIELGCSTPLMEASQEGHLELVKYLLASGANVHATTATGDTALTYACENGHTDVADVLLQAGADLEHESEGGRTPLMKAARAGHLCTVQFLISKGANVNRATANNDHTVVSLACAGGHLAVVELLLAHGADPTHRLKDGSTMLIEAAKGGHTNVVSYLLDYPNNVLSVPTTDVSQLPPPSQDQSQVPRVPTHTLAMVVPPQEPDRTSQENSPALLGVQKGTSKQKSSSLQVADQDLLPSFHPYQPLECIVEETEGKLNELGQRISAIEKAQLKSLELIQGEPLNKDKIEELKKNREEQVQKKKKILKELQKVERQLQMKTQQQFTKEYLETKGQKDTVSLHQQCSHRGVFPEGEGDGSLPEDHFSELPQVDTILFKDNDVDDEQQSPPSAEQIDFVPVQPLSSPQCNFSSDLGSNGTNSLELQKVSGNQQIVGQPQIAITGHDQGLLVQEPDGLMVATPAQTLTDTLDDLIAAVSTRVPTGSNSSSQTTECLTPESCSQTTSNVASQSMPPVYPSVDIDAHTESNHDTALTLACAGGHEELVSVLIARDAKIEHRDKKGFTPLILAATAGHVGVVEILLDKGGDIEAQSERTKDTPLSLACSGGRQEVVDLLLARGANKEHRNVSDYTPLSLAASGGYVNIIKILLNAGAEINSRTGSKLGISPLMLAAMNGHVPAVKLLLDMGSDINAQIETNRNTALTLACFQGRAEVVSLLLDRKANVEHRAKTGLTPLMEAASGGYAEVGRVLLDKGADVNAPPVPSSRDTALTIAADKGHYKFCELLIHRGAHIDVRNKKGNTPLWLASNGGHFDVVQLLVQAGADVDAADNRKITPLMSAFRKGHVKVVQYLVKEVNQFPSDIECMRYIATITDKELLKKCHQCVETIVKAKDQQAAEANKNASILLKELDLEKSREESRKQALAAKREKRKEKRKKKKEEQKRKQEEDEENKPKENSELPEDEDEEENDEDVEQEVPIEPPSATTTTTIGISATSATFTNVFGKKRANVVTTPSTNRKNKKNKTKETPPTAHLILPEQHMSLAQQKADKNKINGEPRGGGAGGNSDSDNLDSTDCNSESSSGGKSQELNFVMDVNSSKYPSLLLHSQEEKTSTATSKTQTRLEGEVTPNSLSTSYKTVSLPLSSPNIKLNLTSPKRGQKREEGWKEVVRRSKKLSVPASVVSRIMGRGGCNITAIQDVTGAHIDVDKQKDKNGERMITIRGGTESTRYAVQLINALIQDPAKELEDLIPKNHIRTPASTKSIHANFSSGVGTTAASSKNAFPLGAPTLVTSQATTLSTFQPANKLNKNVPTNVRSSFPVSLPLAYPHPHFALLAAQTMQQIRHPRLPMAQFGGTFSPSPNTWGPFPVRPVNPGNTNSSPKHNNTSRLPNQNGTVLPSESAGLATASCPITVSSVVAASQQLCVTNTRTPSSVRKQLFACVPKTSPPATVISSVTSTCSSLPSVSSAPITSGQAPTTFLPASTSQAQLSSQKMESFSAVPPTKEKVSTQDQPMANLCTPSSTANSCSSSASNTPGAPETHPSSSPTPTSSNTQEEAQPSSVSDLSPMSMPFASNSEPAPLTLTSPRMVAADNQDTSNLPQLAVPAPRVSHRMQPRGSFYSMVPNATIHQDPQSIFVTNPVTLTPPQGPPAAVQLSSAVNIMNGSQMHINPANKSLPPTFGPATLFNHFSSLFDSSQVPANQGWGDGPLSSRVATDASFTVQSAFLGNSVLGHLENMHPDNSKAPGFRPPSQRVSTSPVGLPSIDPSGSSPSSSSAPLASFSGIPGTRVFLQGPAPVGTPSFNRQHFSPHPWTSASNSSTSAPPTLGQPKGVSASQDRKIPPPIGTERLARIRQGGSVAQAPAGTSFVAPVGHSGIWSFGVNAVSEGLSGWSQSVMGNHPMHQQLSDPSTFSQHQPMERDDSGMVAPSNIFHQPMASGFVDFSKGLPISMYGGTIIPSHPQLADVPGGPLFNGLHNPDPAWNPMIKVIQNSTECTDAQQASLLPSVPALKGEIPSPQLTRPKKRIGRPMVASPNQRHQDHLRPKVPAGVQELTHCPDTPLLPPSDSRGHNSSNSPSLQAGGAEGAGDRGRDTR

SEQ ID NO: 7078 - protein, 655 aa, Homo sapiens
MPEDRNSGGCPAGALASTPFIPKTTYRRIKRCFSFRKGIFGQKLEDTVRYEKRYGNRLAPMLVEQCVDFIRQRGLKEEGLFRLPGQANLVKELQDAFDCGEKPSFDSNTDVHTVASLLKLYLRELPEPVIPYAKYEDFLSCAKLLSKEEEAGVKELAKQVKSLPVVNYNLLKYICRFLDEVQSYSGVNKMSVQNLATVFGPNILRPKVEDPLTIMEGTVVVQQLMSVMISKHDCLFPKDAELQSKPQDGVSNNNEIQKKATMGLLQNKENNNTKDSPSRQCSWDKSESPQRSSMNNGSPTALSGSKTNSPKNSVHKLDVSRSPPLMVKKNPAFNKGSGIVTNGSFSSSNAEGLEKTQTTPNGSLQARRSSSLKVSGTKMGTHSVQNGTVRMGILNSDTLGNPTNVRNMSWLPNGYVTLRDNKQKEQAGELGQHNRLSTYDNVHQQFSMMNLDDKQSIDSATWSTSSCEISLPENSNSCRSSTTTCPEQDFFGGNFEDPVLDGPPQDDLSHPRDYESKSDHRSVGGRSSRATSSSDNSETFVGNSSSNHSALHSLVSSLKQEMTKQKIEYESRIKSLEQRNLTLETEMMSLHDELDQERKKFTMIEIKMRNAERAKEDAEKRNDMLQKEMEQFFSTFGELTVEPRRTERGNTIWIQ

SEQ ID NO: 7079 - protein, 748 aa, Homo sapiens
MEENNDSTENPQQGQGRQNAIKCGWLRKQGGFVKTWHTRWFVLKGDQLYYFKDEDETKPLGTIFLPGNKVSEHPCNEENPGKFLFEVVPGGDRDRMTANHESYLLMASTQNDMEDWVKSIRRVIWGPFGGGIFGQKLEDAVRYEKRYGNRLAPMLVEQCVDFIRQRGLKEEGLFRLPGQANLVKELQDAFDCGEKPSFDSNTDVHTVASLLKLYLRELPEPVIPYAKYEDFLSCAKLLSKEEEAGVKELAKQVKSLPVVNYNLLKYICRFLDEVQSYSGVNKMSVQNLATVFGPNILRPKVEDPLTIMEGTVVVQQLMSVMISKHDCLFPKDAELQSKPQDGVSNNNEIQKKATMGQLQNKENNNTKDSPSRQCSWDKSESPQRSSMNNGSPTALSGSKTNSPKNSVHKLDVSRSPPLMVKKNPAFNKGSGIVTNGSFSSSNAEGLEKTQTTPNGSLQARRSSSLKVSGTKMGTHSVQNGTVRMGILNSDTLGNPTNVRNMSWLPNGYVTLRDNKQKEQAGELGQHNRLSTYDNVHQQFSMMNLDDKQSIDSATWSTSSCEISLPENSNSCRSSTTTCPEQDFFGGNFEDPVLDGPPQDDLSHPRDYESKSDHRSVGGRSSRATSSSDNSETFVGNSSSNHSALHSLVSSLKQEMTKQKIEYESRIKSLEQRNLTLETEMMSLHDELDQERKKFTMIEIKMRNAERAKEDAEKRNDMLQKEVEQFFSTFGELTVEPRRTERGNTIWIQ

SEQ ID NO: 7080 - protein, 473 aa, Homo sapiens
MALKDTGSGGSTILPISEMVSSSSSPGASAAAAPGPCAPSPFPEVVELNVGGQVYVTKHSTLLSVPDSTLASMFSPSSPRGGARRRGELPRDSRARFFIDRDGFLFRYVLDYLRDKQLALPEHFPEKERLLREAEYFQLTDLVKLLSPKVTKQNSLNDEGCQSDLEDNVSQGSSDALLLRGAAAAVPSGPGAHGGGGGGGAQDKRSGFLTLGYRGSYTTVRDNQADAKFRRVARIMVCGRIALAKEVFGDTLNESRDPDRQPEKYTSRFYLKFTYLEQAFDRLSEAGFHMVACNSSGTAAFVNQYRDDKIWSSYTEYIFFRPPQKIVSPKQEHEDRKHDKVTDKGSESGTSCNELSTSSCDSHSEASTPQDNPSSAQQATAHQPNTLTLDRPSKKAPVQWIPPPDKRRNSELFQTLISKSRETNLSKKKVCEKLSVEEEMKKCIQDFKKIHIPDYFPERKRQWQSELLQKYGL

SEQ ID NO: 7081 - protein, 1542 aa, Homo sapiens
MEPEEEDELGSGRDVDSNSNADSEKWVAGDGLEEQEFSIKEANFTEGSLKLKIQTTKRAKKPPKNLENYICPPEIKITIKQSGDQKVSRAGKNSKATKEEERSHSKKKLLTASDLAASDLKGFQPQAYERPQKHSTLHYDTGLPQDFTGDTLKPKHQQKSSSQNHMDWSTNSDSGPVTQNCFISPESGRETASTSKIPALEPVASFAKAQGKKGSAGNTWSQLSNNNKDLLLGGVAPSPSSHSSPAPPSSSAECNGLQPLVDQDGGGTKEPPEPPTVGSKKKSSKKDVISQTIPNPDLDWVKNAQKAFDNTEGKREGYSADSAQEASPARQNVSSASNPENDSSHVRITIPIKAPSLDPTNHKRKKRQSIKAVVEKIMPEKALASGITMSSEVVNRILSNSEGNKKDPRVPKLSKMIENESPSVGLETGGNAEKVIPGGVSKPRKPPMVMTPPTCTDHSPSRKLPEIQHPKFAAKRRWTCSKPKPSTMLREAVMATSDKLMLEPPSAYPITPSSPLYTNTDSLTVITPVKKKRGRPKKQPLLTVETIHEGTSTSPVSPISREFPGTKKRKRRRNLAKLAQLVPGEDKPMSEMKFHKKVGKLGVLDKKTIKTINKMKTLKRKNILNQILSCSSSVALKAKAPPETSPGAAAIESKLGKQINVSKRGTIYIGKKRGRKPRAELPPPSEEPKTAIKHPRPVSSQPDVPAVPSNFQSLVASSPAAMHPLSTQLGGSNGNLSPASTETNFSELKTMPNLQPISALPTKTQKGIHSGTWKLSPPRLMANSPSHLCEIGSLKEITLSPVSESHSEETIPSDSGIGTDNNSTSDQAEKSSESRRRYSFDFCSLDNPEAIPSDTSTKNRHGHRQKHLIVDNFLAHESLKKPKHKRKRKSLQNRDDLQFLADLEELITKFQVFRISHRSYTFYHENPYPSIFRINFDHYYPVPYIQYDPLLYLRRTSDLKSKKKRGRPAKTNDTMTKVPFLQGFSYPIPSGSYYAPYGMPYTSMPMMNLGYYGQYPAPLYLSHTLGAASPFMRPTVPPPQFHTNSHIKMSGAAKHKAKHGVHLQGPVSMGLGDMQPSLNPPKVGSASLSSGRLHKRKHKHKHKHKEDRILGTHDNLSGLFAGKATGFSSHILSERLSSADKELPLVSEKNKHKEKQKHQHSEAGHKASKNNFEVDTLSTLSLSDAQHWTQAKEKGDLSSEPVDSCTKRYSGSGGDGGSTRSENLDVFSEMNPSNDKWDSDVSGSKRRSYEGFGTYREKDIQAFKMNRKERSSYDSSMSPGMPSPHLKVDQTAVHSKNEGSVPTMMTRKKPAAVDSVTIPPAPVLSLLAASAATSDAVGSSLKKRFKRREIEAIQCEVRKMCNYTKILSTKKNLDHVNKILKAKRLQRQSKTGNNFVKKRRGRPRKQPTQFDEDSRDQMPVLEKCIDLPSKRGQKPSLSPLVLEPAASQDTIMATIEAVIHMAREAPPLPPPPPPPLPPPPPPPLPPPPPLPKTPRGGKRKHKPQAPAQPPQQSPPQQPLPQEEEVKAKRQRKSRGSESEVLP

SEQ ID NO: 7082 - protein, 2144 aa, Homo sapiens [sequence omitted]

SEQ ID NO: 7083 - protein, 2116 aa, Homo sapiens
MDEVEQDQHEARLKELFDSFDTTGTGSLGQEELTDLCHMLSLEEVAPVLQQTLLQDNLLGRVHFDQFKEALILILSRTLSNEEHFQEPDCSLEAQPKYVRGGKRYGRRSLPEFQESVEEFPEVTVIEPLDEEARPSHIPAGDCSEHWKTQRSEEYEAEGQLRFWNPDDLNASQSGSSPPQDWIEEKLQEVCEDLGITRDGHLNRKKLVSICEQYGLQNVDGEMLEEVFHNLDPDGTMSVEDFFYGLFKNGKSLTPSASTPYRQLKRHLSMQSFDESGRRTTTSSAMTSTIGFRVFSCLDDGMGHASVERILDTWQEEGIENSQEILKALDFSLDGNINLTELTLALENELLVTKNSIHQAALASFKAEIRHLLERVDQVVREKEKLRSDLDKAEKLKSLMASEVDDHHAAIERRNEYNLRKLDEEYKERIAALKNELRKEREQILQQAGKQRLELEQEIEKAKTEENYIRDRLALSLKENSRLENELLENAENVLAEKFGDLDPSSAEFFLQEERLTQMRNEYERQCRVLQDQVDELQSELEEYRAQGRVLRLPLKNSPSEEVEANSGGIEPEHGLGSEECNPLNMSIEAELVIEQMKEQHHRDICCLRLELEDKVRHYEKQLDETVVSCKKAQENMKQRHENETHTLEKQISDLKNEIAELQGQAAVLKEAHHEATCRHEEEKKQLQVKLEEEKTHLQEKLRLQHEMELKARLTQAQASFEREREGLQSSAWTEEKVRGLTQELEQFHQEQLTSLVEKHTLEKEELRKELLEKHQRELQEGREKMETECNRRTSQIEAQFQSDCQKVTERCESALQSLEGRYRQELKDLQEQQREEKSQWEFEKDELTQECAEAQELLKETLKREKTTSLVLTQEREMLEKTYKEHLNSMVVERQQLLQDLEDLRNVSETQQSLLSDQILELKSSHKRELREREEVLCQAGASEQLASQRLERLEMEHDQERQEMMSKLLAMENIHKATCETADRERAEMSTEISRLQSKIKEMQQATSPLSMLQSGCQVIGEEEVEGDGALSLLQQGEQLLEENGDVLLSLQRAHEQAVKENVKMATEISRLQQRLQKLEPGLVMSSCLDEPATEFFGNTAEQTEPFLQQNRTKQVEGVTRRHVLSDLEDDEVRDLGSTGTSSVQRQEVKIEESEASVEGFSELENSEETRTESWELKNQISQLQEQLMMLCADCDRASEKKQDLLFDVSVLKKKLKMLERIPEASPKYKLLYEDVSRENDCLQEELRMMETRYDEALENNKELTAEVFRLQDELKKMEEVTETFLSLEKSYDEVKIENEELNVLVLRLQGKIEKLQESVVQRCDCCLWEASLENLEIEPDGNILQLNQTLEECVPRVRSVHHVIEECKQENQYLEGNTQLLEKVKAHEIAWLHGTIQTHQERPRVQNQVILEENTTLLGFQDKHFQHQATIAELELEKTKLQELTRKLKERVTILVKQKDVLSHGEKEEELKAMMHDLQITCSEMQQKVELLRYESEKLQQENSILRNEITTLNEEDSISNLKLGTLNGSQEEMWQKTETVKQENAAVQKMVENLKKQISELKIKNQQLDLENTELSQKNSQNQEKLQELNQRLTEMLCQKEKEPGNSALEEREQEKFNLKEELERCKVQSSTLVSSLEAELSEVKIQTHIVQQENHLLKDELEKMKQLHRCPDLSDFQQKISSVLSYNEKLLKEKEALSEELNSCVDKLAKSSLLEHRIATMKQEQKSWEHQSASLKSQLVASQEKVQNLEDTVQNVNLQMSRMKSDLRVTQQEKEALKQEVMSLHKQLQNAGGKSWAPEIATHPSGLHNQQKRLSWDKLDHLMNEEQQLLWQENERLQTMVQNTKAELTHSREKVRQLESNLLPKHQKHLNPSGTMNPTEQEKLSLKRECDQFQKEQSPANRKVSQMNSLEQELETIHLENEGLKKKQVKLDEQLMEMQHLRSTATPSPSPHAWDLQLLQQQACPMVPREQFLQLQRQLLQAERINQHLQEELENRTSETNTPQGNQEQLVTVMEERMIEVEQKLKLVKRLLQEKVNQLKEQLCKNTKADAMVKDLYVENAQLLKALEVTEQRQKTAEKKNYLLEEKIASLSNIVRNLTPAPLTSTPPLRS

SEQ ID NO: 7084 - protein, 195 aa, Homo sapiens
LRGNSIGPQGAKALADALKINRTLTSLSLQGNTVRDDGARSMAEALASNRTLSMLHLQKNSIGPMGAQRMADALKQNRSLKELMFSSNSIGDGGAKALAEALKVNQGLESLDLQSNSISDAGVAALMGALCTNQTLLSLSLRENSISPEGAQAIAHALCANSTLKNLDLQWNFIQAGAAQALGQALQLNRSLTSL

SEQ ID NO: 7085 - protein, 1112 aa, Homo sapiens
MEMDAPRPPSLAVPGAASRPGRLLDGGHGRQQVQALSSQLLEVIPDSMRKQEVRTGREAGQGHGTGSPAEQVKALMDLLAGKGSQGSHAPQALDRTPDAPLGPCSNDSRIQRHRKALLSKVGGGPELGGPWHRLASLLLVEGLTDLQLREHDFTQVEATRGGGHPARTVALDRLFLPLSRVSVPPRVSITIGVAGMGKTTLVRHFVRLWAHGQVGKDFSLVLPLTFRDLNTHEKLCADRLICSVFPHVGEPSLAVAVPARALLILDGLDECRTPLDFSNTVACTDPKKEIPVDHLITNIIRGNLFPEVSIWITSRPSASGQIPGGLVDRMTEIRGFNEEEIKVCLEQMFPEDQALLGWMLSQVQADRALYLMCTVPAFCRLTGMALGHLWRSRTGPQDAELWPPRTLCELYSWYFRMALSGEGQEKGKASPRIEQVAHGGRKMVGTLGRLAFHGLLKKKYVFYEQDMKAFGVDLALLQGAPCSCFLQREETLASSVAYCFTHLSLQEFVAAAYYYGASRRAIFDLFTESGVSWPRLGFLTHFRSAAQRAMQAEDGRLDVFLRFLSGLLSPRVNALLAGSLLAQGEHQAYRTQVAELLQGCLRPDAAVCARAINVLHCLHELQHTELARSVEEAMESGALARLTGPAHRAALAYLLQVSDACAQEANLSLSLSQGVLQSLLPQLLYCRKLRLDTNQFQDPVMELLGSVLSGKDCRIQKISLAENQISNKGAKALARSLLVNRSLTSLDLRGNSIGPQGAKALADALKINRTLTSLSLQGNTVRDDGARSMAEALASNRTLSMLHLQKNSIGPMGAQRMADALKQNRSLKELMFSSNSIGDGGAKALAEALKVNQGLESLDLQSNSISDAGVAALMGALCTNQTLLSLSLRENSISPEGAQAIAHALCANSTLKNLDLTANLLHDQGARAIAVAVRENRTLTSLHLQWNFIQAGAAQALGQALQLNRSLTSLDLQENAIGDDGACAVARALKVNTALTALYLQVASIGASGAQVLGEALAVNRTLEILDLRGNAIGVAGAKALANALKVNSSLRRLNLQENSLGMDGAICIATALSGNHRLQHINLQGNHIGDSGARMISEAIKTNAPTCTVEM

SEQ ID NO: 7086 - protein, 984 aa, Homo sapiens
MDDRYPALQRAQLRLDFIHANSTTHSFLFGALAELLDNARDAGAERLDVFSVDNEKLQGGFMLCFLDDGCGMSPEEASDIIYFGRSKKRLSTLKFIGQYGNGLKSGSMRIGKDFILFTKKEETMTCVFFSQTFCEEESLSEVVVPMPSWLIRTRESVTDDPQKFAMELSIIYKYSPFKTEAELMQQFDVIYGKCGTLLVIYNLKLLLNGEPELDVKTDKEDILMAGALEDFPARWSFRAYTSVLYFNPWMRIFIQAKRVKTKHLCYCLYRPRKYLYVTSSFKGAFKDEVKKAEEAVKIAESILKEAQIKVNQCDRTSLSSAKDVLQRALEDVEAKQKNLKEKQRELKTARTLSLFYGVNVENRSQAGMFIYSNNRLIKMHEKVGSQLKLKSLLGAGVVGIVNIPLEVMEPSHNKQEFLNVQEYNHLLKVMGQYLVQYCKDTGINNRNLTLFCNEFGYQNDIDVEKPLNSIQYQRRQAMGIPFIIQCDLCLKWRVLPSSTNYQEKEFFDIWICANNPNRLENSCHQVECLPSIPLGTMSTISPSKNEKEKQLRESVIKYQNRLAEQQPQPQFIPVDEITVTSTCLTSAHKENTKTQKIRLLGDDLKHESLSSFELSASRRGQKRNIEETDSDVEYISETKIMKKSMEEKMNSQQQRIPVALPENVKLAERSQRSQIANITTVWRAQPTEGCLKNAQAASWEMKRKQSLNFVEECKVLTEDENTSDSDIILVSDKSNTDVSLKQEKKEIPLLNQEKQELCNDVLAMKRSSSLPSWKSLLNVPMEDVNLSSGHIARVSVSGSCKVASSPASSQSTPVKETVRKLKSKLREILLYFFPEYQLPSELEEPALSCELEQCPEQMNKKLKMCFNQIQNTYMVQYEKKIKRKLQSIIYDSNTRGIHNEISLGQCENKRKISEDKLKNLRIKLALLLQKLQLGGPEGDLEQTDTYLEALLKEDNLLFQNNLNKVTIDARHRLPLEKNEKTSEN

SEQ ID NO: 7087 - protein, 334 aa, Homo sapiens
MERKISRIHLVSEPSITHFLQVSWEKTLESGFVITLTDGHSAWTGTVSESEISQEADDMAMEKGKYVGELRKALLSGAGPADVYTFNFSKESCYFFFEKNLKDVSFRLGSFNLEKVENPAEVIRELICYCLDTIAENQAKNEHLQKENERLLRDWNDVQGRFEKCVSAKEALETDLYKRFILVLNEKKTKIRSLHNKLLNAAQEREKDIKQEGETAICSEMTADRDPVYDESTDEESENQTDLSGLASAAVSKDDSIISSLDVTDIAPSRKRRQRMQRNLGTEPKMAPQENQLQEKEKPDSSLPETSKKEHISAENMSLETLRNSSPEDLFDEI

SEQ ID NO: 7088 - protein, 336 aa, Homo sapiens
MERKISRIHLVSEPSITHFLQVSWEKTLESGFVITLTDGHSAWTGTVSESEISQEADDMAMEKGKYVGELRKALLSGAGPADVYTFNFSKESCYFFFEKNLKDVSFRLGSFNLEKVENPAEVIRELICYCLDTIAENQAKNEHLQKENERLLRDWNDVQGRFEKCVSAKEALETDLYKRFILVLNEKKTKIRSLHNKLLNAAQEREKDIKQEGETAICSEMTADRDPVYDESTDEESENQTDLSGLASAAVSKDDSIISSLDVTDIAPSRKRRQRMQRNLGTEPKMAPQENQLQEKENSRPDSSLPETSKKEHISAENMSLETLRNSSPEDLFDEI

SEQ ID NO: 7089 - protein, 3062 aa, Homo sapiens
MHSSSYSYRSSDSVFSNTTSTRTSLDSNENLLLVHCGPTLINSCISFGSESFDGHRLEMLQQIANRVQRDSVICEDKLILAGNALQSDSKRLESGVQFQNEAEIAGYILECENLLRQHVIDVQILIDGKYYQADQLVQRVAKLRDEIMALRNECSSVYSKGRILTTEQTKLMISGITQSLNSGFAQTLHPSLTSGLTQSLTPSLTSSSMTSGLSSGMTSRLTPSVTPAYTPGFPSGLVPNFSSGVEPNSLQTLKLMQIRKPLLKSSLLDQNLTEEEINMKFVQDLLNWVDEMQVQLDRTEWGSDLPSVESHLENHKNVHRAIEEFESSLKEAKISEIQMTAPLKLTYAEKLHRLESQYAKLLNTSRNQERHLDTLHNFVSRATNELIWLNEKEEEEVAYDWSERNTNIARKKDYHAELMRELDQKEENIKSVQEIAEQLLLENHPARLTIEAYRAAMQTQWSWILQLCQCVEQHIKENTAYFEFFNDAKEATDYLRNLKDAIQRKYSCDRSSSIHKLEDLVQESMEEKEELLQYKSTIANLMGKAKTIIQLKPRNSDCPLKTSIPIKAICDYRQIEITIYKDDECVLANNSHRAKWKVISPTGNEAMVPSVCFTVPPPNKEAVDLANRIEQQYQNVLTLWHESHINMKSVVSWHYLINEIDRIRASNVASIKTMLPGEHQQVLSNLQSRFEDFLEDSQESQVFSGSDITQLEKEVNVCKQYYQELLKSAEREEQEESVYNLYISEVRNIRLRLENCEDRLIRQIRTPLERDDLHESVFRITEQEKLKKELERLKDDLGTITNKCEEFFSQAAASSSVPTLRSELNVVLQNMNQVYSMSSTYIDKLKTVNLVLKNTQAAEALVKLYETKLCEEEAVIADKNNIENLISTLKQWRSEVDEKRQVFHALEDELQKAKAISDEMFKTYKERDLDFDWHKEKADQLVERWQNVHVQIDNRLRDLEGIGKSLKYYRDTYHPLDDWIQQVETTQRKIQENQPENSKTLATQLNQQKMLVSEIEMKQSKMDECQKYAEQYSATVKDYELQTMTYRAMVDSQQKSPVKRRRMQSSADLIIQEFMDLRTRYTALVTLMTQYIKFAGDSLKRLEEEEKSLEEEKKEHVEKAKELQKWVSNISKTLKDAEKAGKPPFSKQKISSEEISTKKEQLSEALQTIQLFLAKHGDKMTDEERNELEKQVKTLQESYNLLFSESLKQLQESQTSGDVKVEEKLDKVIAGTIDQTTGEVLSVFQAVLRGLIDYDTGIRLLETQLMISGLISPELRKCFDLKDAKSHGLIDEQILCQLKELSKAKEIISAASPTTIPVLDALAQSMITESMAIKVLEILLSTGSLVIPATGEQLTLQKAFQQNLVSSALFSKVLERQNMCKDLIDPCTSEKVSLIDMVQRSTLQENTGMWLLPVRPQEGGRITLKCGRNISILRAAHEGLIDRETMFRLLSAQLLSGGLINSNSGQRMTVEEAVREGVIDRDTASSILTYQVQTGGIIQSNPAKRLTVDEAVQCDLITSSSALLVLEAQRGYVGLIWPHSGEIFPTSSSLQQELITNELAYKILNGRQKIAALYIPESSQVIGLDAAKQLGIIDNNTASILKNITLPDKMPDLGDLEACKNARRWLSFCKFQPSTVHDYRQEEDVFDGEEPVTTQTSEETKKLFLSYLMINSYMDANTGQRLLLYDGDLDEAVGMLLEGCHAEFDGNTAIKECLDVLSSSGVFLNNASGREKDECTATPSSFNKCHCGEPEHEETPENRKCAIDEEFNEMRNTVINSEFSQSGKLASTISIDPKVNSSPSVCVPSLISYLTQTELADISMLRSDSENILTNYENQSRVETNERANECSHSKNIQNFPSDLIENPIMKSKMSKFCGVNETENEDNTNRDSPIFDYSPRLSALLSHDKLMHSQGSFNDTHTPESNGNKCEAPALSFSDKTMLSGQRIGEKFQDQFLGIAAINISLPGEQYGQKSLNMISSNPQVQYHNDKYISNTSGEDEKTHPGFQQMPEDKEDESEIEEYSCAVTPGGDTDNAIVSLTCATPLLDETISASDYETSLLNDQQNNTGTDTDSDDDFYDTPLFEDDDHDSLLLDGDDRDCLHPEDYDTLQEENDETASPADVFYDVSKENENSMVPQGAPVGSLSVKNKAHCLQDFLMDVEKDELDSGEKIHLNPVGSDKVNGQSLETGSERECTNILEGDESDSLTDYDIVGGKESFTASLKFDDSGSWRGRKEEYVTGQEFHSDTDHLDSMQSEESYGDYIYDSNDQDDDDDDGIDEEGGGIRDENGKPRCQNVAEDMDIQLCASILNENSDENENINTMILLDKMHSCSSLEKQQRVNVVQLASPSENNLVTEKSNLPEYTTEIAGKSKENLLNHEMVLKDVLPPIIKDTESEKTFGPASISHDNNNISSTSELGTDLANTKVKLIQGSELPELTDSVKGKDEYFKNMTPKVDSSLDHIICTEPDLIGKPAEESHLSLIASVTDKDPQGNGSDLIKGRDGKSDILIEDETSIQKMYLGEGEVLVEGLVEEENRHLKLLPGKNTRDSFKLINSQFPFPQITNNEELNQKGSLKKATVTLKDEPNNLQIIVSKSPVQFENLEEIFDTSVSKEISDDITSDITSWEGNTHFEESFTDGPEKELDLFTYLKHCAKNIKAKDVAKPNEDVPSHVLITAPPMKEHLQLGVNNTKEKSTSTQKDSPLNDMIQSNDLCSKESISGGGTEISQFTPESIEATLSILSRKHVEDVGKNDFLQSERCANGLGNDNSSNTLNTDYSFLEINNKKERIEQQLPKEQALSPRSQEKEVQIPELSQVFVEDVKDILKSRLKEGHMNPQEVEEPSACADTKILIQNLIKRITTSQLVNEASTVPSDSQMSDSSGVSPMTNSSELKPESRDDPFCIGNLKSELLLNILKQDQHSQKITGVFELMRELTHMEYDLEKRGITSKVLPLQLENIFYKLLADGYSEKIEHVGDFNQKACSTSEMMEEKPHILGDIKSKEGNYYSPNLETVKEIGLESSTVWASTLPRDEKLKDLCNDFPSHLECTSGSKEMASGDSSTEQVS

SEQ ID NO: 7090 - protein, 2137 aa, Homo sapiens
EFDPEEFYYLLEAAEGHAKEGQGIKTDIPRYIISQLGLNKDPLEEMAHLGNYDSGTAETPETDESVSSSNASLKLRRKPRESDFETIKLISNGAYGAVYFVRHKESRQRFAMKKINKQNLILRNQIQQAFVERDILTFAENPFVVSMYCSFETRRHLCMVMEYVEGGDCATLMKNMGPLPVDMARMYFAETVLALEYLHNYGIVHRDLKPDNLLVTSMGHIKLTDFGLSKVGLMSMTTNLYEGHIEKDAREFLDKQVCGTPEYIAPEVILRQGYGKPVDWWAMGIILYEFLVGCVPFFGDTPEELFGQVISDEINWPEKDEAPPPDAQDLITLLLRQNPLERLGTGGAYEVKQHRFFRSLDWNSLLRQKAEFIPQLESEDDTSYFDTRSEKYHHMETEEEDDTNDEDFNVEIRQFSSCSHRFSKVFSSIDRITQNSAEEKEDSVDKTKSTTLPSTETLSWSSEYSEMQQLSTSNSSDTESNRHKLSSGLLPKLAISTEGEQDEAASCPGDPHEEPGKPALPPEECAQEEPEVTTPASTISSSTLSVGSFSEHLDQINGRSECVDSTDNSSKPSSEPASHMARQRLESTEKKKISGKVTKSLSASALSLMIPGDMFAVSPLGSPMSPHSLSSDPSSSRDSSPSRDSSAASASPHQPIVIHSSGKNYGFTIRAIRVYVGDSDIYTVHHIVWNVEEGSPACQAGLKAGDLITHINGEPVHGLVHTEVIELLLKSGNKVSITTTPFENTSIKTGPARRNSYKSRMVRRSKKSKKKESLERRRSLFKKLAKQPSPLLHTSRSFSCLNRSLSSGESLPGSPTHSLSPRSPTPSYRSTPDFPSGTNSSQSSSPSSSAPNSPAGSGHIRPSTLHGLAPKLGGQRYRSGRRKSAGNIPLSPLARTPSPTPQPTSPQRSPSPLLGHSLGNSKIAQAFPSKMHSPPTIVRHIVRPKSAEPPRSPLLKRVQSEEKLSPSYGSDKKHLCSRKHSLEVTQEEVQREQSQREAPLQSLDENVCDVPPLSRARPVEQGCLKRPVSRKVGRQESVDDLDRDKLKAKVVVKKADGFPEKQESHQKSHGPGSDLENFALFKLEEREKKVYPKAVERSSTFENKASMQEAPPLGSLLKDALHKQASVRASEGAMSDGPVPAEHRQGGGDFRRAPAPGTLQDGLCHSLDRGISGKGEGTEKSSQAKELLRCEKLDSKLANIDYLRKKMSLEDKEDNLCPVLKPKMTAGSHECLPGNPVRPTGGQQEPPPASESRAFVSSTHAAQMSAVSFVPLKALTGRVDSGTEKPGLVAPESPVRKSPSEYKLEGRSVSCLEPIEGTLDIALLSGPQASKTELPSPESAQSPSPSGDVRASVPPVLPSSSGKKNDTTSARELSPSSLKMNKSYLLEPWFLPPSRGLQNSPAVSLPDPEFKRDRKGPHPTARSPGTVMESNPQQREGSSPKHQDHTTDPKLLTCLGQNLHSPDLARPRCPLPPEASPSREKPGLRESSERGPPTARSERSAARADTCREPSMELCFPETAKTSDNSKNLLSVGRTHPDFYTQTQAMEKAWAPGGKTNHKDGPGEARPPPRDNSSLHSAGIPCEKELGKVRRGVEPKPEALLARRSLQPPGIESEKSEKLSSFPSLQKDGAKEPERKEQPLQRHPSSIPPPPLTAKDLSSPAARQHCSSPSHASGREPGAKPSTAEPSSSPQDPPKPVAAHSESSSHKPRPGPDPGPPKTKHPDRSLSSQKPSVGATKGKEPATQSLGGSSREGKGHSKSGPDVFPATPGSQNKASDGIGQGEGGPSVPLHTDRAPLDAKPQPTSGGRPLEVLEKPVHLPRPGHPGPSEPADQKLSAVGEKQTLSPKHPKPSTVKDCPTLCKQTDNRQTDKSPSQPAANTDRRAEGKKCTEALYAPAEGDKLEAGLSFVHSENRLKGAERPAAGVGKGFPEARGKGPGPQKPPTEADKPNGMKRSPSATGQSSFRSTALPEKSLSCSSSFPETRAGVREASAASSDTSSAKAAGGMLELPAPSNRDHRKAQPAGEGRTHMTKSDSLPSFRVSTLPLESHHPDPNTMGGASHRDRALSVTATVGETKGKDPAPAQPPPARKQNVGRDVTKPSPAPNTDRPISLSNEKDFVVRQRRGKESLRSSPHKKAL

SEQ ID NO: 7091 - protein, 1270 aa, Homo sapiens
MDSLEEPQKKVFKARKTMRVSDRQQLEAVYKVKEELLKTDVKLLNGNHENGDLDPTSPLENMDYIKDKEEVNGIEEICFDPEGSKAEWKETPCILSVNVKNKQDDDLNCEPLSPHNITPEPVSKLPAEPVSGDPAPGDLDAGDPASGVLASGDSTSGDPTSSEPSSSDAASGDATSGDAPSGDVSPGDATSGDATADDLSSGDPTSSDPIPGEPVPVEPISGDCAADDIASSEITSVDLASGAPASTDPASDDLASGDLSSSELASDDLATGELASDELTSESTFDRTFEPKSVPVCEPVPEIDNIEPSSNKDDDFLEKNGADEKLEQIQSKDSLDEKNKADNNIDAIEETLETDDTTICSDRPPENEKKVEEDIITELALGEDAISSSMEIDQGEKNEDETSADLVETINENVIEDNKSENILENTDSMETDEIIPILEKLAPSEDELTCFSKTSLLPIDETNPDLEEKMESSFGSPSKQESSESLPKEAFLVLSDEEDISGEKDESEVISQNETCSPAEVESNEKDNKPEEEEQVIHEDDERPSEKNEFSRRKRSKSEDMDNVQSKRRRYMEEEYEAEFQVKITAKGDINQKLQKVIQWLLEEKLCALQCAVFDKTLAELKTRVEKIECNKRHKTVLTELQAKIARLTKRFEAAKEDLKKRHEHPPNPPVSPGKTVNDVNSNNNMSYRNAGTVRQMLESKRNVSESAPPSFQTPVNTVSSTNLVTPPAVVSSQPKLQTPVTSGSLTATSVLPAPNTATVVATTQVPSGNPQPTISLQPLPVILHVPVAVSSQPQLLQSHPGTLVTNQPSGNVEFISVQSPPTVSGLTKNPVSLPSLPNPTKPNNVPSVPSPSIQRNPTASAAPLGTTLAVQAVPTAHSIVQATRTSLPTVGPSGLYSPSTNRGPIQMKIPISAFSTSSAAEQNSNTTPRIENQTNKTIDASVSKKAADSTSQCGKATGSDSSGVIDLTMDDEESGASQDPKKLNHTPVSTMSSSQPVSRPLQPIQPAPPLQPSGVPTSGPSQTTIHLLPTAPTTVNVTHRPVTQVTTRLPVPRAPANHQVVYTTLPAPPAQAPLRGTVMQAPAVRQVNPQNSVTVRVPQTTTYVVNNGLTLGSTGPQLTVHHRPPQVHTEPPRPVHPAPLPEAPQPQRLPPEAASTSLPQKPHLKLARVQSQNGIVLSWSVLEVDRSCATVDSYHLYAYHEEPSATVPSQWKKIGEVKALPLPMACTLTQFVSGSKYYFAVRAKDIYGRFGPFCDPQSTDVISSTQSS

SEQ ID NO: 7092 - protein, 472 aa, Homo sapiens
MTSENQEKVKALLRDLQEQDADAGSERGLSGEEEDDEPDCCNDERYWPAGQEPSLVPDLDPLEYAGLASVEPYVPEFTVSPFAVQKLSRYGFNTERCQAVLRMCDGDVGASLEHLLTQCFSETFGERMKISEAVNQISLDECMEQRQEEAFALKSICGEKFIERIQNRVWTIGLELEYLTSRFRKSKPKESTKNVQENSLEICKFYLKGNCKFGSKCRFKHEVPPNQIVGRIERSVDDSHLNAIEDASFLYELEIRFSKDHKYPYQAPLVAFYSTNENLPLACRLHISEFLYDKALTFAETSEPVVYSLITLLEEESEIVKLLTNTHHKYSDPPVNFLPVPSRTRINNPACHKTVIPNNSFVSNQIPEVEKASESEESDEDDGPAPVIVENESYVNLKKKISKRYDWQAKSVHAENGKICKQFRMKQASRQFQSILQERQSLPAWEERETILNLLRKHQVVVISGMTGTYLF

SEQ ID NO: 7093 - protein, 1386 aa, Homo sapiens
MSSSVRRKGKPGKGGGKGSSRGGRGGRSHASKSHGSGGGGGGGGGGGGGNRKASSRIWDDGDDFCIFSESRRPSRPSNSNISKGESRPKWKPKAKVPLQTLHMTSENQEKVKALLRDLQEQDADAGSERGLSGEEEDDEPDCCNDERYWPAGQEPSLVPDLDPLEYAGLASVEPYVPEFTVSPFAVQKLSRYGFNTERCQAVLRMCDGDVGASLEHLLTQCFSETFGERMKISEAVNQISLDECMEQRQEEAFALKSICGEKFIERIQNRVWTIGLELEYLTSRFRKSKPKESTKNVQENSLEICKFYLKGNCKFGSKCRFKHEVPPNQIVGRIERSVDDSHLNAIEDASFLYELEIRFSKDHKYPYQAPLVAFYSTNENLPLACRLHISEFLYDKALTFAETSEPVVYSLITLLEEESEIVKLLTNTHHKYSDPPVNFLPVPSRTRINNPACHKTVIPNNSFVSNQIPEVEKASESEESDEDDGPAPVIVENESYVNLKKKISKRYDWQAKSVHAENGKICKQFRMKQASRQFQSILQERQSLPAWEERETILNLLRKHQVVVISGMTGCGKTTQIPQFILDDSLNGPPEKVANIICTQPRRISAISVAERVAKERAERVGLTVGYQIRLESVKSSATRLLYCTTGVLLRRLEGDTALQGVSHIIVDEVHERTEESDFLLLVLKDIVSQRPGLQVILMSATLNAELFSDYFNSCPVITIPGRTFPVDQFFLEDAIAVTRYVLQDGSPYMRSMKQISKEKLKARRNRTAFEEVEEDLRLSLHLQDQDSVKDAVPDQQLDFKQLLARYKGVSKSVIKTMSIMDFEKVNLELIEALLEWIVDGKHSYPPGAILVFLPGLAEIKMLYEQLQSNSLFNNRRSNRCVIHPLHSSLSSEEQQAVFVKPPAGVTKIIISTNIAETSITIDDVVYVIDSGKMKEKRYDASKGMESLEDTFVSQANALQRKGRAGRVASGVCFHLFTSHHYNHQLLKQQLPEIQRVPLEQLCLRIKILEMFSAHNLQSVFSRLIEPPHTDSLRASKIRLRDLGALTPDERLTPLGYHLASLPVDVRIGKLMLFGSIFRCLDPALTIAASLAFKSPFVSPWDKKEEANQKKLEFAFANSDYLALLQAYKGWQLSTKEGVRASYNYCRQNFLSGRVLQEMASLKRQFTELLSDIGFAREGLRAREIEKRAQGGDGVLDATGEEANSNAENPKLISAMLCAALYPNVVQVKSPEGKFQKTSTGAVRMQPKSAELKFVTKNDGYVHIHPSSVNYQVRHFDSPYLLYHEKIKTSRVFIRDCSMVSVYPLVLFGGGQVNVQLQRGEFVVSLDDGWIRFVAASHQVAELVKELRCELDQLLQDKIKNPSIDLCTCPRGSRIISTIVKLVTTQ

SEQ ID NO: 7094 - protein, 522 aa, Homo sapiens
MAATAAAVVAEEDTELRDLLVQTLENSGVLNRIKAELRAAVFLALEEQEKVEVKTLVEFLIDNCFEIFGENIPVHSSITSDDSLEHTDSSDVSTLQNDSAYDSNDPDVESNSSSGISSPSRQPQVPMATAAGLDSAGPQDAREVSPEPIVSTVARLKSSLAQPDRRYSEPSMPSSQECLESRVTNQTLTKSEGDFPVPRVGSRLESEEAEDPFPEEVFPAVQGKTKRPVDLKIKNLAPGSVLPRALVLKAFSSSSLDASSDSSPVASPSSPKRNFFSRHQSFTTKTEKGKPSREIKKHSMSFTFAPHKKVLTKNLSAGSGKSQDFTRDHVPRGVRKESQLAGRIVQENGCETHNQTARGFCLRPHALSVDDVFQGADWERPGSPPSYEEAMQGPAARLVASESQTVGSMTVGSMRARMLEAHCLLPPLPPAHHVEDSRHRGSKEPLPGHGLSPLPERWKQSRTVHASGDSLGHVSGPGRPELLPLRTVSESVQRNKRDCLVRRCSQPVFEADQFQYAKESYI

SEQ ID NO: 7095 - protein, 553 aa, Homo sapiens
MGALEMQDEEDRIEALKQVADKLPRPNLLLLKHLVYVLHLISKNSEVNRMDSSNLAICIGPNMLTLENDQSLSFEAQKDLNNKVKTLVEFLIDNCFEIFGENIPVHSSITSDDSLEHTDSSDVSTLQNDSAYDSNDPDVESNSSSGISSPSRQPQVPMATAAGLDSAGPQDAREVSPEPIVSTVARLKSSLAQPDRRYSEPSMPSSQECLESRVTNQTLTKSEGDFPVPRVGSRLESEEAEDPFPEEVFPAVQGKTKRPVDLKIKNLAPGSVLPRALVLKAFSSSSLDASSDSSPVASPSSPKRNFFSRHQSFTTKTEKGKPSREIKKHSMSFTFAPHKKVLTKNLSAGSGKSQDFTRDHVPRGVRKESQLAGRIVQENGCETHNQTARGFCLRPHALSVDDVFQGADWERPGSPPSYEEAMQGPAARLVASESQTVGSMTVGSMRARMLEAHCLLPPLPPAHHVEDSRHRGSKEPLPGHGLSPLPERWKQSRTVHASGDSLGHVSGPGRPELLPLRTVSESVQRNKRDCLVRRCSQPVFEADQFQYAKESYI

SEQ ID NO: 7096 - protein, 731 aa, Homo sapiens
MKLRSSHNASKTLNANNMETLIECQSEGDIKEHPLLASCESEDSICQLIEVKKRKKVLSWPFLMRRLSPASDFSGALETDLKASLFDQPLSIICGDSDTLPRPIQDILTILCLKGPSTEGIFRRAANEKARKELKEELNSGDAVDLERLPVHLLAVVFKDFLRSIPRKLLSSDLFEEWMGALEMQDEEDRIEALKQVADKLPRPNLLLLKHLVYVLHLISKNSEVNRMDSSNLAICIGPNMLTLENDQSLSFEAQKDLNNKVKTLVEFLIDNCFEIFGENIPVHSSITSDDSLEHTDSSDVSTLQNDSAYDSNDPDVESNSSSGISSPSRQPQVPMATAAGLDSAGPQDAREVSPEPIVSTVARLKSSLAQPDRRYSEPSMPSSQECLESRVTNQTLTKSEGDFPVPRVGSRLESEEAEDPFPEEVFPAVQGKTKRPVDLKIKNLAPGSVLPRALVLKAFSSSSLDASSDSSPVASPSSPKRNFFSRHQSFTTKTEKGKPSREIKKHSMSFTFAPHKKVLTKNLSAGSGKSQDFTRDHVPRGVRKESQLAGRIVQENGCETHNQTARGFCLRPHALSVDDVFQGADWERPGSPPSYEEAMQGPAARLVASESQTVGSMTVGSMRARMLEAHCLLPPLPPAHHVEDSRHRGSKEPLPGHGLSPLPERWKQSRTVHASGDSLGHVSGPGRPELLPLRTVSESVQRNKRDCLVRRCSQPVFEADQFQYAKESYI

SEQ ID NO: 7097 - protein, 542 aa, Homo sapiens
MATTVTCTRFTDEYQLYEDIGKGAFSVVRRCVKLCTGHEYAAKIINTKKLSARDHQKLEREARICRLLKHSNIVRLHDSISEEGFHYLVFDLVTGGELFEDIVAREYYSEADASHCIQQILEAVLHCHQMGVVHRDLKPENLLLASKCKGAAVKLADFGLAIEVQGDQQAWFGFAGTPGYLSPEVLRKEAYGKPVDIWACGVILYILLVGYPPFWDEDQHKLYQQIKAGAYDFPSPEWDTVTPEAKNLINQMLTINPAKRITAHEALKHPWVCQRSTVASMMHRQETVECLKKFNARRKLKGAILTTMLATRNFSVGRQTTAPATMSTAASGTTMGLVEQAKSLLNKKADGVKPQTNSTKNSAAATSPKGTLPPAALEPQTTVIHNPVDGIKESSDSANTTIEDEDAKARKQEIIKTTEQLIEAVNNGDFEAYAKICDPGLTSFEPEALGNLVEGMDFHRFYFENLLAKNSKPIHTTILNPHVHVIGEDAACIAYIRLTQYIDGQGRPRTSQSEETRVWHRRDGKWQNVHFHCSGAPVAPLQ

SEQ ID NO: 7098 - protein, 517 aa, Homo sapiens
MATTVTCTRFTDEYQLYEDIGKGAFSVVRRCVKLCTGHEYAAKIINTKKLSARDHQKLEREARICRLLKHSNIVRLHDSISEEGFHYLVFDLVTGGELFEDIVAREYYSEADASHCIQQILEAVLHCHQMGVVHRDLKPENLLLASKCKGAAVKLADFGLAIEVQGDQQAWFGFAGTPGYLSPEVLRKEAYGKPVDIWACGVILYILLVGYPPFWDEDQHKLYQQIKAGAYDFPSPEWDTVTPEAKNLINQMLTINPAKRITAHEALKHPWVCQRSTVASMMHRQETVECLKKFNARRKLKGAILTTMLATRNFSAKSLLNKKADGVKPQTNSTKNSAAATSPKGTLPPAALEPQTTVIHNPVDGIKESSDSANTTIEDEDAKARKQEIIKTTEQLIEAVNNGDFEAYAKICDPGLTSFEPEALGNLVEGMDFHRFYFENLLAKNSKPIHTTILNPHVHVIGEDAACIAYIRLTQYIDGQGRPRTSQSEETRVWHRRDGKWQNVHFHCSGAPVAPLQ

SEQ ID NO: 7099 - protein, 492 aa, Homo sapiens
MATTVTCTRFTDEYQLYEDIGKGAFSVVRRCVKLCTGHEYAAKIINTKKLSARDHQKLEREARICRLLKHSNIVRLHDSISEEGFHYLVFDLVTGGELFEDIVAREYYSEADASHCIQQILEAVLHCHQMGVVHRDLKPENLLLASKCKGAAVKLADFGLAIEVQGDQQAWFGFAGTPGYLSPEVLRKEAYGKPVDIWACGVILYILLVGYPPFWDEDQHKLYQQIKAGAYDFPSPEWDTVTPEAKNLINQMLTINPAKRITAHEALKHPWVCQRSTVASMMHRQETVECLKKFNARRKLKGAILTTMLATRNFSVGRQTTAPATMSTAASGTTMGLVEQAKSLLNKKADGVKEPQTTVIHNPVDGIKESSDSANTTIEDEDAKARKQEIIKTTEQLIEAVNNGDFEAYAFYFENLLAKNSKPIHTTILNPHVHVIGEDAACIAYIRLTQYIDGQGRPRTSQSEETRVWHRRDGKWQNVHFHCSGAPVAPLQ

SEQ ID NO: 7100 - protein, 377 aa, Homo sapiens
MDGTEIAVSPRSLHSELMCPICLDMLKNTMTTKECLHRFCSDCIVTALRSGNKECPTCRKKLVSKRSLRPDPNFDALISKIYPSREEYEAHQDRVLIRLSRLHNQQALSSSIEEGLRMQAMHRAQRVRRPIPGSDQTTTMSGGEGEPGEGEGDGEDVSSDSAPDSAPGPAPKRPRGGGAGGSSVGTGGGGTGGVGGGAGSEDSGDRGGTLGGGTLGPPSPPGAPSPPEPGGEIELVFRPHPLLVEKGEYCQTRYVKTTGNATVDHLSKYLALRIALERRQQQEAGEPGGPGGGASDTGGPDGCGGEGGGAGGGDGPEEPALPSLEGVSEKQYTIYIAPGGGAFTTLNGSLTLELVNEKFWKVSRPLELCYAPTKDPK

SEQ ID NO: 7101 - protein, 963 aa, Homo sapiens
MAEGGGCRERPDAETQKSELGPLMRTTLQRGAQWYLIDSRWFKQWKKYVGFDSWDMYNVGEHNLFPGPIDNSGLFSDPESQTLKEHLIDELDYVLVPTEAWNKLLNWYGCVEGQQPIVRKVVEHGLFVKHCKVEVYLLELKLCENSDPTNVLSCHFSKADTIATIEKEMRKLFNIPAERETRLWNKYMSNTYEQLSKLDNTVQDAGLYQGQVLVIEPQNEDGTWPRQTLQSKSSTAPSRNFTTSPKSSASPYSSVSASLIANGDSTSTCGMHSSGVSRGGSGFSASYNCQEPPSSHIQPGLCGLGNLGNTCFMNSALQCLSNTAPLTDYFLKDEYEAEINRDNPLGMKGEIAEAYAELIKQMWSGRDAHVAPSMFKTQVGRFAPQFSGYQQQDSQELLAFLLDGLHEDLNRVKKKPYLELKDANGRPDAVVAKEAWENHRLRNDSVIVDTFHGLFKSTLVCPECAKVSVTFDPFCYLTLPLPLKKDRVMEVFLVPADPHCRPTQYRVTVPLMGAVSDLCEALSRLSGIAAENMVVADVYNHRFHKIFQMDEGLNHIMPRDDIFVYEVCSTSVDGSECVTLPVYFRERKSRPSSTSSASALYGQPLLLSVPKHKLTLESLYQAVCDRISRYVKQPLPDEFGSSPLEPGACNGSRNSCEGEDEEEMEHQEEGKEQLSETEGSGEDEPGNDPSETTQKKIKGQPCPKRLFTFSLVNSYGTADINSLAADGKLLKLNSRSTLAMDWDRETRRLYYDEQESEAYEKHVSMLQPQKKKKTTVALRDCIELFTTMETLGEHDPWYCPNCKKHQQATKKFDLWSLPKILVVHLKRFSYNRYWRDKLDTVVEFPIRGLNMSEFVCNLSARPYVYDLIAVSNHYGAMGVGHYTAYAKNKLNGKWYYFDDSNVSLASEDQIVTKAAYVLFYQRRDDEFYKTPSLSSSGSSDGGTRPSSSQQGFGDDEACSMDTN

SEQ ID NO: 7102 - protein, 916 aa, Homo sapiens
MAEGGGCRERPDAETQKSELGPLMRTTLQRGAQWYLIDSRWFKQWKKYVGFDSWDMYNVGEHNLFPGPIDNSGLFSDPESQTLKEHLIDELDYVLVPTEAWNKLLNWYGCVEGQQPIVRKVVEHGLFVKHCKVEVYLLELKLCENSDPTNVLSCHFSKADTIATIEKEMRKLFNIPAERETRLWNKYMSNTYEQLSKLDNTVQDAGLYQGQVLVIEPQNEDGTWPRQTLQSNGSGFSASYNCQEPPSSHIQPGLCGLGNLGNTCFMNSALQCLSNTAPLTDYFLKDEYEAEINRDNPLGMKGEIAEAYAELIKQMWSGRDAHVAPSMFKTQVGRFAPQFSGYQQQDSQELLAFLLDGLHEDLNRVKKKPYLELKDANGRPDAVVAKEAWENHRLRNDSVIVDTFHGLFKSTLVCPECAKVSVTFDPFCYLTLPLPLKKDRVMEVFLVPADPHCRPTQYRVTVPLMGAVSDLCEALSRLSGIAAENMVVADVYNHRFHKIFQMDEGLNHIMPRDDIFVYEVCSTSVDGSECVTLPVYFRERKSRPSSTSSASALYGQPLLLSVPKHKLTLESLYQAVCDRISRYVKQPLPDEFGSSPLEPGACNGSRNSCEGEDEEEMEHQEEGKEQLSETEGSGEDEPGNDPSETTQKKIKGQPCPKRLFTFSLVNSYGTADINSLAADGKLLKLNSRSTLAMDWDRETRRLYYDEQESEAYEKHVSMLQPQKKKKTTVALRDCIELFTTMETLGEHDPWYCPNCKKHQQATKKFDLWSLPKILVVHLKRFSYNRYWRDKLDTVVEFPIRGLNMSEFVCNLSARPYVYDLIAVSNHYGAMGVGHYTAYAKNKLNGKWYYFDDSNVSLASEDQIVTKAAYVLFYQRRDDEFYKTPSLSSSGSSDGGTRPSSSQQGFGDDEACSMDTN

SEQ ID NO: 7103 - protein, 604 aa, Homo sapiens
MNIVENSIFLSNLMKSANTFELKYDLSCELYRMSTYSTFPAGVPVSERSLARAGFYYTGVNDKVKCFCCGLMLDNWKRGDSPTEKHKKLYPSCRFVQSLNSVNNLEATSQPTFPSSVTNSTHSLLPGTENSGYFRGSYSNSPSNPVNSRANQDFSALMRSSYHCAMNNENARLLTFQTWPLTFLSPTDLAKAGFYYIGPGDRVACFACGGKLSNWEPKDNAMSEHLRHFPKCPFIENQLQDTSRYTVSNLSMQTHAARFKTFFNWPSSVLVNPEQLASAGFYYVGNSDDVKCFCCDGGLRCWESGDDPWVQHAKWFPRCEYLIRIKGQEFIRQVQASYPHLLEQLLSTSDSPGDENAESSIIHFEPGEDHSEDAIMMNTPVINAAVEMGFSRSLVKQTVQRKILATGENYRLVNDLVLDLLNAEDEIREEERERATEEKESNDLLLIRKNRMALFQHLTCVIPILDSLLTAGIINEQEHDVIKQKTQTSLQARELIDTILVKGNIAATVFRNSLQEAEAVLYEHLFVQQDIKYIPTEDVSDLPVEEQLRRLQEERTCKVCMDKEVSIVFIPCGHLVVCKDCAPSLRKCPICRSTIKGTVRTFLS

SEQ ID NO: 7104 - protein, 990 aa, Homo sapiens
MSEETRQSKLAAAKKKLREYQQRNSPGVPTGAKKKKKIKNGSNPETTTSGGCHSPEDTPKDNAATLQPSDDTVLPGGVPSPGASLTSMAASQNHDADNVPNLMDETKTFSSTESLRQLSQQLNGLVCESATCVNGEGPASSANLKDLESRYQQLAVALDSSYVTNKQLNITIEKLKQQNQEITDQLEEEKKECHQKQGALREQLQVHIQTIGILVSEKAELQTALAHTQHAARQKEGESEDLASRLQYSRRRVGELERALSAVSTQQKKADRYNKELTKERDALRLELYKNTQSNEDLKQEKSELEEKLRVLVTEKAGMQLNLEELQKKLEMTELLLQQFSSRCEAPDANQQLQQAMEERAQLEAHLGQVMESVRQLQMERDKYAENLKGESAMWRQRMQQMSEQVHTLREEKECSMSRVQELETSLAELRNQMAEPPPPEPPAGPSEVEQQLQAEAEHLRKELEGLAGQLQAQVQDNEGLSRLNREQEERLLELERAAELWGEQAEARRQILETMQNDRTTISRALSQNRELKEQLAELQSGFVKLTNENMEITSALQSEQHVKRELGKKLGELQEKLSELKETVELKSQEAQSLQQQRDQYLGHLQQYVAAYQQLTSEKEVLHNQLLLQTQLVDQLQQQEAQGKAVAEMARQELQETQERLEAATQQNQQLRAQLSLMAHPGEGDGLDREEEEDEEEEEEEAVAVPQPMPSIPEDLESREAMVAFFNSAVASAEEEQARLRGQLKEQRVRCRRLAHLLASAQKEPEAAAPAPGTGGDSVCGETHRALQGAMEKLQSRFMELMQEKADLKERVEELEHRCIQLSGETDTIGEYIALYQSQRAVLKERHREKEEYISRLAQDKEEMKVKLLELQELVLRLVGDRNEWHGRFLAAAQNPADEPTSGAPAPQELGAANQQGDLCEVSLAGSVEPAQGEAREGSPRDNPTAQQIMQLLREMQNPRERPGLGSNPCIPFFYRADENDEVKITVI

SEQ ID NO: 7105 - protein, 832 aa, Homo sapiens
MQEPGQIVETYTEEDPEGAMSVVSVETSDDGTTRRTETTVKKVVKTVTTRTVQPVAMGPDGLPVDASSVSNNYIQTLGRDFRKNGNGGPGPYVGQAGTATLPRNFHYPPDGYSRHYEDGYPGGSDNYGSLSRVTRIEERYRPSMEGYRAPSRQDVYGPQPQVRVGGSSVDLHRFHPEPYGLEDDQRSMGYDDLDYGMMSDYGTARRTGTPSDPRRRLRSYEDMIGEEVPSDQYYWAPLAQHERGSLASLDSLRKGGPPPPNWRQPELPEVIAMLGFRLDAVKSNAAAYLQHLCYRNDKVKTDVRKLKGIPVLVGLLDHPKKEVHLGACGALKNISFGRDQDNKIAIKNCDGVPALVRLLRKARDMDLTEVITGTLWNLSSHDSIKMEIVDHALHALTDEVIIPHSGWEREPNEDCKPRHIEWESVLTNTAGCLRNVSSERSEARRKLRECDGLVDALIFIVQAEIGQKDSDSKLVENCVCLLRNLSYQVHREIPQAERYQEAAPNVANNTGPHAASCFGAKKGKGKKPIEDPANDTVDFPKRTSPARGYELLFQPEVVRIYISLLKESKTPAILEASAGAIQNLCAGRWTYGRYIRSALRQEKALSAIADLLTNEHERVVKAASGALRNLAVDARNKELIGKHAIPNLVKNLPGGQQNSSWNFSEDTVISILNTINEVIAENLEAAKKLRETQGIEKLVLINKSGNRSEKEVRAAALVLQTIWGYKELRKPLEKEGWKKSDFQVNLNNASRSQSSHSYDDSTLPLIDRNQKSDKKPDREEIQMSNMGSNTKSLDNNYSTPNERGDHNRTLDRSGDLGDMEPLKGTTPLMQKI

SEQ ID NO: 7106 - protein, 962 aa, Homo sapiens
MDDSEVESTASILASVKEQEAQFEKLTRALEEERRHVSAQLERVRVSPQDANPLMANGTLTRRHQNGRFVGDADLERQKFSDLKLNGPQDHSHLLYSTIPRMQEPGQIVETYTEEDPEGAMSVVSVETSDDGTTRRTETTVKKVVKTVTTRTVQPVAMGPDGLPVDASSVSNNYIQTLGRDFRKNGNGGPGPYVGQAGTATLPRNFHYPPDGYSRHYEDGYPGGSDNYGSLSRVTRIEERYRPSMEGYRAPSRQDVYGPQPQVRVGGSSVDLHRFHPEPYGLEDDQRSMGYDDLDYGMMSDYGTARRTGTPSDPRRRLRSYEDMIGEEVPSDQYYWAPLAQHERGSLASLDSLRKGGPPPPNWRQPELPEVIAMLGFRLDAVKSNAAAYLQHLCYRNDKVKTDVRKLKGIPVLVGLLDHPKKEVHLGACGALKNISFGRDQDNKIAIKNCDGVPALVRLLRKARDMDLTEVITGTLWNLSSHDSIKMEIVDHALHALTDEVIIPHSGWEREPNEDCKPRHIEWESVLTNTAGCLRNVSSERSEARRKLRECDGLVDALIFIVQAEIGQKDSDSKLVENCVCLLRNLSYQVHREIPQAERYQEAAPNVANNTGPHAASCFGAKKGKGKKPIEDPANDTVDFPKRTSPARGYELLFQPEVVRIYISLLKESKTPAILEASAGAIQNLCAGRWTYGRYIRSALRQEKALSAIADLLTNEHERVVKAASGALRNLAVDARNKELIGKHAIPNLVKNLPGGQQNSSWNFSEDTVISILNTINEVIAENLEAAKKLRETQGIEKLVLINKSGNRSEKEVRAAALVLQTIWGYKELRKPLEKEGWKKSDFQVNLNNASRSQSSHSYDDSTLPLIDRNQKSDKKPDREEIQMSNMGSNTKSLDNNYSTPNERGDHNRTLDRSGDLGDMEPLKGTTPLMQDEGQESLEEELDVLVLDDEGGQVSYPSMQKI

SEQ ID NO: 7107 - protein, 859 aa, Homo sapiens
MANGTLTRRHQNGRFVGDADLERQKFSDLKLNGPQDHSHLLYSTIPRMQEPGQIVETYTEEDPEGAMSVVSVETSDDGTTRRTETTVKKVVKTVTTRTVQPVAMGPDGLPVDASSVSNNYIQTLGRDFRKNGNGGPGPYVGQAGTATLPRNFHYPPDGYSRHYEDGYPGGSDNYGSLSRVTRIEERYRPSMEGYRAPSRQDVYGPQPQVRVGGSSVDLHRFHPEPYGLEDDQRSMGYDDLDYGMMSDYGTARRTGTPSDPRRRLRSYEDMIGEEVPSDQYYWAPLAQHERGSLASLDSLRKGGPPPPNWRQPELPEVIAMLGFRLDAVKSNAAAYLQHLCYRNDKVKTDVRKLKGIPVLVGLLDHPKKEVHLGACGALKNISFGRDQDNKIAIKNCDGVPALVRLLRKARDMDLTEVITGTLWNLSSHDSIKMEIVDHALHALTDEVIIPHSGWEREPNEDCKPRHIEWESVLTNTAGCLRNVSSERSEARRKLRECDGLVDALIFIVQAEIGQKDSDSKLVENCVCLLRNLSYQVHREIPQAERYQEAAPNVANNTGPHAASCFGAKKGKGKKPIEDPANDTVDFPKRTSPARGYELLFQPEVVRIYISLLKESKTPAILEASAGAIQNLCAGRWTYGRYIRSALRQEKALSAIADLLTNEHERVVKAASGALRNLAVDARNKELIGKHAIPNLVKNLPGGQQNSSWNFSEDTVISILNTINEVIAENLEAAKKLRETQGIEKLVLINKSGNRSEKEVRAAALVLQTIWGYKELRKPLEKEGWKKSDFQVNLNNASRSQSSHSYDDSTLPLIDRNQKSDDNNYSTPNERGDHNRTLDRSGDLGDMEPLKGTTPLMQKI

SEQ ID NO: 7108 - protein, 596 aa, Homo sapiens
MIGEEVPSDQYYWAPLAQHERGSLASLDSLRKGGPPPPNWRQPELPEVIAMLGFRLDAVKSNAAAYLQHLCYRNDKVKTDVRKLKGIPVLVGLLDHPKKEVHLGACGALKNISFGRDQDNKIAIKNCDGVPALVRLLRKARDMDLTEVITGTLWNLSSHDSIKMEIVDHALHALTDEVIIPHSGWEREPNEDCKPRHIEWESVLTNTAGCLRNVSSERSEARRKLRECDGLVDALIFIVQAEIGQKDSDSKLVENCVCLLRNLSYQVHREIPQAERYQEAAPNVANNTGPHAASCFGAKKGKDEWFSRGKKPIEDPANDTVDFPKRTSPARGYELLFQPEVVRIYISLLKESKTPAILEASAGAIQNLCAGRWTYGRYIRSALRQEKALSAIADLLTNEHERVVKAASGALRNLAVDARNKELIGKHAIPNLVKNLPGGQQNSSWNFSEDTVISILNTINEVIAENLEAAKKLRETQGIEKLVLINKSGNRSEKEVRAAALVLQTIWGYKELRKPLEKEGWKKSDFQVNLNNASRSQSSHSYDDSTLPLIDRNQKSDDNNYSTPNERGDHNRTLDRSGDLGDMEPLKGTTPLMQKI

SEQ ID NO: 7109 - protein, 948 aa, Homo sapiens
MDDSEVESTASILASVKEQEAQFEKLTRALEEERRHVSAQLERVRVSPQDANPLMANGTLTRRHQNGRFVGDADLERQKFSDLKLNGPQDHSHLLYSTIPRMQEPGQIVETYTEEDPEGAMSVVSVETSDDGTTRRTETTVKKVVKTVTTRTVQPVAMGPDGLPVDASSVSNNYIQTLGRDFRKNGNGGPGPYVGQAGTATLPRNFHYPPDGYSRHYEDGYPGGSDNYGSLSRVTRIEERYRPSMEGYRAPSRQDVYGPQPQVRVGGSSVDLHRFHPEPYGLEDDQRSMGYDDLDYGMMSDYGTARRTGTPSDPRRRLRSYEDMIGEEVPSDQYYWAPLAQHERGSLASLDSLRKGGPPPPNWRQPELPEVIAMLGFRLDAVKSNAAAYLQHLCYRNDKVKTDVRKLKGIPVLVGLLDHPKKEVHLGACGALKNISFGRDQDNKIAIKNCDGVPALVRLLRKARDMDLTEVITGTLWNLSSHDSIKMEIVDHALHALTDEVIIPHSGWEREPNEDCKPRHIEWESVLTNTAGCLRNVSSERSEARRKLRECDGLVDALIFIVQAEIGQKDSDSKLVENCVCLLRNLSYQVHREIPQAERYQEAAPNVANNTGPHAASCFGAKKGKDEWFSRGKKPIEDPANDTVDFPKRTSPARGYELLFQPEVVRIYISLLKESKTPAILEASAGAIQNLCAGRWTYGRYIRSALRQEKALSAIADLLTNEHERVVKAASGALRNLAVDARNKELIGKHAIPNLVKNLPGGQQNSSWNFSEDTVISILNTINEVIAENLEAAKKLRETQGIEKLVLINKSGNRSEKEVRAAALVLQTIWGYKELRKPLEKEGWKKSDFQVNLNNASRSQSSHSYDDSTLPLIDRNQKSDDNNYSTPNERGDHNRTLDRSGDLGDMEPLKGTTPLMQDEGQESLEEELDVLVLDDEGGQVSYPSMQKI

SEQ ID NO: 7110 - protein, 885 aa, Homo sapiens
MANGTLTRRHQNGRFVGDADLERQKFSDLKLNGPQDHSHLLYSTIPRMQEPGQIVETYTEEDPEGAMSVVSVETSDDGTTRRTETTVKKVVKTVTTRTVQPVAMGPDGLPVDASSVSNNYIQTLGRDFRKNGNGGPGPYVGQAGTATLPRNFHYPPDGYSRHYEDGYPGGSDNYGSLSRVTRIEERYRPSMEGYRAPSRQDVYGPQPQVRVGGSSVDLHRFHPEPYGLEDDQRSMGYDDLDYGMMSDYGTARRTGTPSDPRRRLRSYEDMIGEEVPSDQYYWAPLAQHERGSLASLDSLRKGGPPPPNWRQPELPEVIAMLGFRLDAVKSNAAAYLQHLCYRNDKVKTDVRKLKGIPVLVGLLDHPKKEVHLGACGALKNISFGRDQDNKIAIKNCDGVPALVRLLRKARDMDLTEVITGTLWNLSSHDSIKMEIVDHALHALTDEVIIPHSGWEREPNEDCKPRHIEWESVLTNTAGCLRNVSSERSEARRKLRECDGLVDALIFIVQAEIGQKDSDSKLVENCVCLLRNLSYQVHREIPQAERYQEAAPNVANNTGPHAASCFGAKKGKDEWFSRGKKPIEDPANDTVDFPKRTSPARGYELLFQPEVVRIYISLLKESKTPAILEASAGAIQNLCAGRWTYGRYIRSALRQEKALSAIADLLTNEHERVVKAASGALRNLAVDARNKELIGKHAIPNLVKNLPGGQQNSSWNFSEDTVISILNTINEVIAENLEAAKKLRETQGIEKLVLINKSGNRSEKEVRAAALVLQTIWGYKELRKPLEKEGWKKSDFQVNLNNASRSQSSHSYDDSTLPLIDRNQKSDKKPDREEIQMSNMGSNTKSLDNNYSTPNERGDHNRTLDRSGDLGDMEPLKGTTPLMQKI

SEQ ID NO: 7111 - protein, 847 aa, Homo sapiens
MQEPGQIVETYTEEDPEGAMSVVSVETSDDGTTRRTETTVKKVVKTVTTRTVQPVAMGPDGLPVDASSVSNNYIQTLGRDFRKNGNGGPGPYVGQAGTATLPRNFHYPPDGYSRHYEDGYPGGSDNYGSLSRVTRIEERYRPSMEGYRAPSRQDVYGPQPQVRVGGSSVDLHRFHPEPYGLEDDQRSMGYDDLDYGMMSDYGTARRTGTPSDPRRRLRSYEDMIGEEVPSDQYYWAPLAQHERGSLASLDSLRKGGPPPPNWRQPELPEVIAMLGFRLDAVKSNAAAYLQHLCYRNDKVKTDVRKLKGIPVLVGLLDHPKKEVHLGACGALKNISFGRDQDNKIAIKNCDGVPALVRLLRKARDMDLTEVITGTLWNLSSHDSIKMEIVDHALHALTDEVIIPHSGWEREPNEDCKPRHIEWESVLTNTAGCLRNVSSERSEARRKLRECDGLVDALIFIVQAEIGQKDSDSKLVENCVCLLRNLSYQVHREIPQAERYQEAAPNVANNTGPHAASCFGAKKGKDEWFSRGKKPIEDPANDTVDFPKRTSPARGYELLFQPEVVRIYISLLKESKTPAILEASAGAIQNLCAGRWTYGRYIRSALRQEKALSAIADLLTNEHERVVKAASGALRNLAVDARNKELIGKHAIPNLVKNLPGGQQNSSWNFSEDTVISILNTINEVIAENLEAAKKLRETQGIEKLVLINKSGNRSEKEVRAAALVLQTIWGYKELRKPLEKEGWKKSDFQVNLNNASRSQSSHSYDDSTLPLIDRNQKSDDNNYSTPNERGDHNRTLDRSGDLGDMEPLKGTTPLMQDEGQESLEEELDVLVLDDEGGQVSYPSMQKI

SEQ ID NO: 7112 - protein, 610 aa, Homo sapiens
MIGEEVPSDQYYWAPLAQHERGSLASLDSLRKGGPPPPNWRQPELPEVIAMLGFRLDAVKSNAAAYLQHLCYRNDKVKTDVRKLKGIPVLVGLLDHPKKEVHLGACGALKNISFGRDQDNKIAIKNCDGVPALVRLLRKARDMDLTEVITGTLWNLSSHDSIKMEIVDHALHALTDEVIIPHSGWEREPNEDCKPRHIEWESVLTNTAGCLRNVSSERSEARRKLRECDGLVDALIFIVQAEIGQKDSDSKLVENCVCLLRNLSYQVHREIPQAERYQEAAPNVANNTGPHAASCFGAKKGKGKKPIEDPANDTVDFPKRTSPARGYELLFQPEVVRIYISLLKESKTPAILEASAGAIQNLCAGRWTYGRYIRSALRQEKALSAIADLLTNEHERVVKAASGALRNLAVDARNKELIGKHAIPNLVKNLPGGQQNSSWNFSEDTVISILNTINEVIAENLEAAKKLRETQGIEKLVLINKSGNRSEKEVRAAALVLQTIWGYKELRKPLEKEGWKKSDFQVNLNNASRSQSSHSYDDSTLPLIDRNQKSDKKPDREEIQMSNMGSNTKSLDNNYSTPNERGDHNRTLDRSGDLGDMEPLKGTTPLMQKI

SEQ ID NO: 7113 - protein, 625 aa, Homo sapiens
MIGEEVPSDQYYWAPLAQHERGSLASLDSLRKGGPPPPNWRQPELPEVIAMLGFRLDAVKSNAAAYLQHLCYRNDKVKTDVRKLKGIPVLVGLLDHPKKEVHLGACGALKNISFGRDQDNKIAIKNCDGVPALVRLLRKARDMDLTEVITGTLWNLSSHDSIKMEIVDHALHALTDEVIIPHSGWEREPNEDCKPRHIEWESVLTNTAGCLRNVSSERSEARRKLRECDGLVDALIFIVQAEIGQKDSDSKLVENCVCLLRNLSYQVHREIPQAERYQEAAPNVANNTGPHAASCFGAKKGKDEWFSRGKKPIEDPANDTVDFPKRTSPARGYELLFQPEVVRIYISLLKESKTPAILEASAGAIQNLCAGRWTYGRYIRSALRQEKALSAIADLLTNEHERVVKAASGALRNLAVDARNKELIGKHAIPNLVKNLPGGQQNSSWNFSEDTVISILNTINEVIAENLEAAKKLRETQGIEKLVLINKSGNRSEKEVRAAALVLQTIWGYKELRKPLEKEGWKKSDFQVNLNNASRSQSSHSYDDSTLPLIDRNQKSDDNNYSTPNERGDHNRTLDRSGDLGDMEPLKGTTPLMQDEGQESLEEELDVLVLDDEGGQVSYPSMQKI

SEQ ID NO: 7114 - protein, 879 aa, Homo sapiens
MANGTLTRRHQNGRFVGDADLERQKFSDLKLNGPQDHSHLLYSTIPRMQEPGQIVETYTEEDPEGAMSVVSVETSDDGTTRRTETTVKKVVKTVTTRTVQPVAMGPDGLPVDASSVSNNYIQTLGRDFRKNGNGGPGPYVGQAGTATLPRNFHYPPDGYSRHYEDGYPGGSDNYGSLSRVTRIEERYRPSMEGYRAPSRQDVYGPQPQVRVGGSSVDLHRFHPEPYGLEDDQRSMGYDDLDYGMMSDYGTARRTGTPSDPRRRLRSYEDMIGEEVPSDQYYWAPLAQHERGSLASLDSLRKGGPPPPNWRQPELPEVIAMLGFRLDAVKSNAAAYLQHLCYRNDKVKTDVRKLKGIPVLVGLLDHPKKEVHLGACGALKNISFGRDQDNKIAIKNCDGVPALVRLLRKARDMDLTEVITGTLWNLSSHDSIKMEIVDHALHALTDEVIIPHSGWEREPNEDCKPRHIEWESVLTNTAGCLRNVSSERSEARRKLRECDGLVDALIFIVQAEIGQKDSDSKLVENCVCLLRNLSYQVHREIPQAERYQEAAPNVANNTGPHAASCFGAKKGKGKKPIEDPANDTVDFPKRTSPARGYELLFQPEVVRIYISLLKESKTPAILEASAGAIQNLCAGRWTYGRYIRSALRQEKALSAIADLLTNEHERVVKAASGALRNLAVDARNKELIGKHAIPNLVKNLPGGQQNSSWNFSEDTVISILNTINEVIAENLEAAKKLRETQGIEKLVLINKSGNRSEKEVRAAALVLQTIWGYKELRKPLEKEGWKKSDFQVNLNNASRSQSSHSYDDSTLPLIDRNQKSDKKPDREEIQMSNMGSNTKSLDNNYSTPNERGDHNRTLDRSGDLGDMEPLKGTTPLMQKI

SEQ ID NO: 7115 - protein, 812 aa, Homo sapiens
MQEPGQIVETYTEEDPEGAMSVVSVETSDDGTTRRTETTVKKVVKTVTTRTVQPVAMGPDGLPVDASSVSNNYIQTLGRDFRKNGNGGPGPYVGQAGTATLPRNFHYPPDGYSRHYEDGYPGGSDNYGSLSRVTRIEERYRPSMEGYRAPSRQDVYGPQPQVRVGGSSVDLHRFHPEPYGLEDDQRSMGYDDLDYGMMSDYGTARRTGTPSDPRRRLRSYEDMIGEEVPSDQYYWAPLAQHERGSLASLDSLRKGGPPPPNWRQPELPEVIAMLGFRLDAVKSNAAAYLQHLCYRNDKVKTDVRKLKGIPVLVGLLDHPKKEVHLGACGALKNISFGRDQDNKIAIKNCDGVPALVRLLRKARDMDLTEVITGTLWNLSSHDSIKMEIVDHALHALTDEVIIPHSGWEREPNEDCKPRHIEWESVLTNTAGCLRNVSSERSEARRKLRECDGLVDALIFIVQAEIGQKDSDSKLVENCVCLLRNLSYQVHREIPQAERYQEAAPNVANNTGPHAASCFGAKKGKGKKPIEDPANDTVDFPKRTSPARGYELLFQPEVVRIYISLLKESKTPAILEASAGAIQNLCAGRWTYGRYIRSALRQEKALSAIADLLTNEHERVVKAASGALRNLAVDARNKELIGKHAIPNLVKNLPGGQQNSSWNFSEDTVISILNTINEVIAENLEAAKKLRETQGIEKLVLINKSGNRSEKEVRAAALVLQTIWGYKELRKPLEKEGWKKSDFQVNLNNASRSQSSHSYDDSTLPLIDRNQKSDDNNYSTPNERGDHNRTLDRSGDLGDMEPLKGTTPLMQKI

SEQ ID NO: 7116 - protein, 841 aa, Homo sapiens
MQEPGQIVETYTEEDPEGAMSVVSVETSDDGTTRRTETTVKKVVKTVTTRTVQPVAMGPDGLPVDASSVSNNYIQTLGRDFRKNGNGGPGPYVGQAGTATLPRNFHYPPDGYSRHYEDGYPGGSDNYGSLSRVTRIEERYRPSMEGYRAPSRQDVYGPQPQVRVGGSSVDLHRFHPEPYGLEDDQRSMGYDDLDYGMMSDYGTARRTGTPSDPRRRLRSYEDMIGEEVPSDQYYWAPLAQHERGSLASLDSLRKGGPPPPNWRQPELPEVIAMLGFRLDAVKSNAAAYLQHLCYRNDKVKTDVRKLKGIPVLVGLLDHPKKEVHLGACGALKNISFGRDQDNKIAIKNCDGVPALVRLLRKARDMDLTEVITGTLWNLSSHDSIKMEIVDHALHALTDEVIIPHSGWEREPNEDCKPRHIEWESVLTNTAGCLRNVSSERSEARRKLRECDGLVDALIFIVQAEIGQKDSDSKLVENCVCLLRNLSYQVHREIPQAERYQEAAPNVANNTGPHAASCFGAKKGKGKKPIEDPANDTVDFPKRTSPARGYELLFQPEVVRIYISLLKESKTPAILEASAGAIQNLCAGRWTYGRYIRSALRQEKALSAIADLLTNEHERVVKAASGALRNLAVDARNKELIGKHAIPNLVKNLPGGQQNSSWNFSEDTVISILNTINEVIAENLEAAKKLRETQGIEKLVLINKSGNRSEKEVRAAALVLQTIWGYKELRKPLEKEGWKKSDFQVNLNNASRSQSSHSYDDSTLPLIDRNQKSDDNNYSTPNERGDHNRTLDRSGDLGDMEPLKGTTPLMQDEGQESLEEELDVLVLDDEGGQVSYPSMQKI

SEQ ID NO: 7117 - protein, 894 aa, Homo sapiens
MANGTLTRRHQNGRFVGDADLERQKFSDLKLNGPQDHSHLLYSTIPRMQEPGQIVETYTEEDPEGAMSVVSVETSDDGTTRRTETTVKKVVKTVTTRTVQPVAMGPDGLPVDASSVSNNYIQTLGRDFRKNGNGGPGPYVGQAGTATLPRNFHYPPDGYSRHYEDGYPGGSDNYGSLSRVTRIEERYRPSMEGYRAPSRQDVYGPQPQVRVGGSSVDLHRFHPEPYGLEDDQRSMGYDDLDYGMMSDYGTARRTGTPSDPRRRLRSYEDMIGEEVPSDQYYWAPLAQHERGSLASLDSLRKGGPPPPNWRQPELPEVIAMLGFRLDAVKSNAAAYLQHLCYRNDKVKTDVRKLKGIPVLVGLLDHPKKEVHLGACGALKNISFGRDQDNKIAIKNCDGVPALVRLLRKARDMDLTEVITGTLWNLSSHDSIKMEIVDHALHALTDEVIIPHSGWEREPNEDCKPRHIEWESVLTNTAGCLRNVSSERSEARRKLRECDGLVDALIFIVQAEIGQKDSDSKLVENCVCLLRNLSYQVHREIPQAERYQEAAPNVANNTGPHAASCFGAKKGKDEWFSRGKKPIEDPANDTVDFPKRTSPARGYELLFQPEVVRIYISLLKESKTPAILEASAGAIQNLCAGRWTYGRYIRSALRQEKALSAIADLLTNEHERVVKAASGALRNLAVDARNKELIGKHAIPNLVKNLPGGQQNSSWNFSEDTVISILNTINEVIAENLEAAKKLRETQGIEKLVLINKSGNRSEKEVRAAALVLQTIWGYKELRKPLEKEGWKKSDFQVNLNNASRSQSSHSYDDSTLPLIDRNQKSDDNNYSTPNERGDHNRTLDRSGDLGDMEPLKGTTPLMQDEGQESLEEELDVLVLDDEGGQVSYPSMQKI

SEQ ID NO: 7118 - protein, 861 aa, Homo sapiens
MQEPGQIVETYTEEDPEGAMSVVSVETSDDGTTRRTETTVKKVVKTVTTRTVQPVAMGPDGLPVDASSVSNNYIQTLGRDFRKNGNGGPGPYVGQAGTATLPRNFHYPPDGYSRHYEDGYPGGSDNYGSLSRVTRIEERYRPSMEGYRAPSRQDVYGPQPQVRVGGSSVDLHRFHPEPYGLEDDQRSMGYDDLDYGMMSDYGTARRTGTPSDPRRRLRSYEDMIGEEVPSDQYYWAPLAQHERGSLASLDSLRKGGPPPPNWRQPELPEVIAMLGFRLDAVKSNAAAYLQHLCYRNDKVKTDVRKLKGIPVLVGLLDHPKKEVHLGACGALKNISFGRDQDNKIAIKNCDGVPALVRLLRKARDMDLTEVITGTLWNLSSHDSIKMEIVDHALHALTDEVIIPHSGWEREPNEDCKPRHIEWESVLTNTAGCLRNVSSERSEARRKLRECDGLVDALIFIVQAEIGQKDSDSKLVENCVCLLRNLSYQVHREIPQAERYQEAAPNVANNTGPHAASCFGAKKGKGKKPIEDPANDTVDFPKRTSPARGYELLFQPEVVRIYISLLKESKTPAILEASAGAIQNLCAGRWTYGRYIRSALRQEKALSAIADLLTNEHERVVKAASGALRNLAVDARNKELIGKHAIPNLVKNLPGGQQNSSWNFSEDTVISILNTINEVIAENLEAAKKLRETQGIEKLVLINKSGNRSEKEVRAAALVLQTIWGYKELRKPLEKEGWKKSDFQVNLNNASRSQSSHSYDDSTLPLIDRNQKSDKKPDREEIQMSNMGSNTKSLDNNYSTPNERGDHNRTLDRSGDLGDMEPLKGTTPLMQDEGQESLEEELDVLVLDDEGGQVSYPSMQKI

SEQ ID NO: 7119 - protein, 639 aa, Homo sapiens
MIGEEVPSDQYYWAPLAQHERGSLASLDSLRKGGPPPPNWRQPELPEVIAMLGFRLDAVKSNAAAYLQHLCYRNDKVKTDVRKLKGIPVLVGLLDHPKKEVHLGACGALKNISFGRDQDNKIAIKNCDGVPALVRLLRKARDMDLTEVITGTLWNLSSHDSIKMEIVDHALHALTDEVIIPHSGWEREPNEDCKPRHIEWESVLTNTAGCLRNVSSERSEARRKLRECDGLVDALIFIVQAEIGQKDSDSKLVENCVCLLRNLSYQVHREIPQAERYQEAAPNVANNTGPHAASCFGAKKGKGKKPIEDPANDTVDFPKRTSPARGYELLFQPEVVRIYISLLKESKTPAILEASAGAIQNLCAGRWTYGRYIRSALRQEKALSAIADLLTNEHERVVKAASGALRNLAVDARNKELIGKHAIPNLVKNLPGGQQNSSWNFSEDTVISILNTINEVIAENLEAAKKLRETQGIEKLVLINKSGNRSEKEVRAAALVLQTIWGYKELRKPLEKEGWKKSDFQVNLNNASRSQSSHSYDDSTLPLIDRNQKSDKKPDREEIQMSNMGSNTKSLDNNYSTPNERGDHNRTLDRSGDLGDMEPLKGTTPLMQDEGQESLEEELDVLVLDDEGGQVSYPSMQKI

SEQ ID NO: 7120 - protein, 939 aa, Homo sapiens
MDDSEVESTASILASVKEQEAQFEKLTRALEEERRHVSAQLERVRVSPQDANPLMANGTLTRRHQNGRFVGDADLERQKFSDLKLNGPQDHSHLLYSTIPRMQEPGQIVETYTEEDPEGAMSVVSVETSDDGTTRRTETTVKKVVKTVTTRTVQPVAMGPDGLPVDASSVSNNYIQTLGRDFRKNGNGGPGPYVGQAGTATLPRNFHYPPDGYSRHYEDGYPGGSDNYGSLSRVTRIEERYRPSMEGYRAPSRQDVYGPQPQVRVGGSSVDLHRFHPEPYGLEDDQRSMGYDDLDYGMMSDYGTARRTGTPSDPRRRLRSYEDMIGEEVPSDQYYWAPLAQHERGSLASLDSLRKGGPPPPNWRQPELPEVIAMLGFRLDAVKSNAAAYLQHLCYRNDKVKTDVRKLKGIPVLVGLLDHPKKEVHLGACGALKNISFGRDQDNKIAIKNCDGVPALVRLLRKARDMDLTEVITGTLWNLSSHDSIKMEIVDHALHALTDEVIIPHSGWEREPNEDCKPRHIEWESVLTNTAGCLRNVSSERSEARRKLRECDGLVDALIFIVQAEIGQKDSDSKLVENCVCLLRNLSYQVHREIPQAERYQEAAPNVANNTGPHAASCFGAKKGKDEWFSRGKKPIEDPANDTVDFPKRTSPARGYELLFQPEVVRIYISLLKESKTPAILEASAGAIQNLCAGRWTYGRYIRSALRQEKALSAIADLLTNEHERVVKAASGALRNLAVDARNKELIGKHAIPNLVKNLPGGQQNSSWNFSEDTVISILNTINEVIAENLEAAKKLRETQGIEKLVLINKSGNRSEKEVRAAALVLQTIWGYKELRKPLEKEGWKKSDFQVNLNNASRSQSSHSYDDSTLPLIDRNQKSDKKPDREEIQMSNMGSNTKSLDNNYSTPNERGDHNRTLDRSGDLGDMEPLKGTTPLMQKI

SEQ ID NO: 7121 - protein, 867 aa, Homo sapiens
MQEPGQIVETYTEEDPEGAMSVVSVETSDDGTTRRTETTVKKVVKTVTTRTVQPVAMGPDGLPVDASSVSNNYIQTLGRDFRKNGNGGPGPYVGQAGTATLPRNFHYPPDGYSRHYEDGYPGGSDNYGSLSRVTRIEERYRPSMEGYRAPSRQDVYGPQPQVRVGGSSVDLHRFHPEPYGLEDDQRSMGYDDLDYGMMSDYGTARRTGTPSDPRRRLRSYEDMIGEEVPSDQYYWAPLAQHERGSLASLDSLRKGGPPPPNWRQPELPEVIAMLGFRLDAVKSNAAAYLQHLCYRNDKVKTDVRKLKGIPVLVGLLDHPKKEVHLGACGALKNISFGRDQDNKIAIKNCDGVPALVRLLRKARDMDLTEVITGTLWNLSSHDSIKMEIVDHALHALTDEVIIPHSGWEREPNEDCKPRHIEWESVLTNTAGCLRNVSSERSEARRKLRECDGLVDALIFIVQAEIGQKDSDSKLVENCVCLLRNLSYQVHREIPQAERYQEAAPNVANNTGPHAASCFGAKKGKDEWFSRGKKPIEDPANDTVDFPKRTSPARGYELLFQPEVVRIYISLLKESKTPAILEASAGAIQNLCAGRWTYGRYIRSALRQEKALSAIADLLTNEHERVVKAASGALRNLAVDARNKELIGKHAIPNLVKNLPGGQQNSSWNFSEDTVISILNTINEVIAENLEAAKKLRETQGIEKLVLINKSGNRSEKEVRAAALVLQTIWGYKELRKPLEKEGWKKSDFQVNLNNASRSQSSHSYDDSTLPLIDRNQKSDKKPDREEIQMSNMGSNTKSLDNNYSTPNERGDHNRTLDRSGDLGDMEPLKGTTPLMQDEGQESLEEELDVLVLDDEGGQVSYPSMQKI

SEQ ID NO: 7122 - protein, 933 aa, Homo sapiens
MDDSEVESTASILASVKEQEAQFEKLTRALEEERRHVSAQLERVRVSPQDANPLMANGTLTRRHQNGRFVGDADLERQKFSDLKLNGPQDHSHLLYSTIPRMQEPGQIVETYTEEDPEGAMSVVSVETSDDGTTRRTETTVKKVVKTVTTRTVQPVAMGPDGLPVDASSVSNNYIQTLGRDFRKNGNGGPGPYVGQAGTATLPRNFHYPPDGYSRHYEDGYPGGSDNYGSLSRVTRIEERYRPSMEGYRAPSRQDVYGPQPQVRVGGSSVDLHRFHPEPYGLEDDQRSMGYDDLDYGMMSDYGTARRTGTPSDPRRRLRSYEDMIGEEVPSDQYYWAPLAQHERGSLASLDSLRKGGPPPPNWRQPELPEVIAMLGFRLDAVKSNAAAYLQHLCYRNDKVKTDVRKLKGIPVLVGLLDHPKKEVHLGACGALKNISFGRDQDNKIAIKNCDGVPALVRLLRKARDMDLTEVITGTLWNLSSHDSIKMEIVDHALHALTDEVIIPHSGWEREPNEDCKPRHIEWESVLTNTAGCLRNVSSERSEARRKLRECDGLVDALIFIVQAEIGQKDSDSKLVENCVCLLRNLSYQVHREIPQAERYQEAAPNVANNTGPHAASCFGAKKGKGKKPIEDPANDTVDFPKRTSPARGYELLFQPEVVRIYISLLKESKTPAILEASAGAIQNLCAGRWTYGRYIRSALRQEKALSAIADLLTNEHERVVKAASGALRNLAVDARNKELIGKHAIPNLVKNLPGGQQNSSWNFSEDTVISILNTINEVIAENLEAAKKLRETQGIEKLVLINKSGNRSEKEVRAAALVLQTIWGYKELRKPLEKEGWKKSDFQVNLNNASRSQSSHSYDDSTLPLIDRNQKSDKKPDREEIQMSNMGSNTKSLDNNYSTPNERGDHNRTLDRSGDLGDMEPLKGTTPLMQKI

SEQ ID NO: 7123 - protein, 616 aa, Homo sapiens
MIGEEVPSDQYYWAPLAQHERGSLASLDSLRKGGPPPPNWRQPELPEVIAMLGFRLDAVKSNAAAYLQHLCYRNDKVKTDVRKLKGIPVLVGLLDHPKKEVHLGACGALKNISFGRDQDNKIAIKNCDGVPALVRLLRKARDMDLTEVITGTLWNLSSHDSIKMEIVDHALHALTDEVIIPHSGWEREPNEDCKPRHIEWESVLTNTAGCLRNVSSERSEARRKLRECDGLVDALIFIVQAEIGQKDSDSKLVENCVCLLRNLSYQVHREIPQAERYQEAAPNVANNTGPHAASCFGAKKGKDEWFSRGKKPIEDPANDTVDFPKRTSPARGYELLFQPEVVRIYISLLKESKTPAILEASAGAIQNLCAGRWTYGRYIRSALRQEKALSAIADLLTNEHERVVKAASGALRNLAVDARNKELIGKHAIPNLVKNLPGGQQNSSWNFSEDTVISILNTINEVIAENLEAAKKLRETQGIEKLVLINKSGNRSEKEVRAAALVLQTIWGYKELRKPLEKEGWKKSDFQVNLNNASRSQSSHSYDDSTLPLIDRNQKSDKKPDREEIQMSNMGSNTKSLDNNYSTPNERGDHNRTLDRSGDLGDMEPLKGTTPLMQKI

SEQ ID NO: 7124 - protein, 818 aa, Homo sapiens
MQEPGQIVETYTEEDPEGAMSVVSVETSDDGTTRRTETTVKKVVKTVTTRTVQPVAMGPDGLPVDASSVSNNYIQTLGRDFRKNGNGGPGPYVGQAGTATLPRNFHYPPDGYSRHYEDGYPGGSDNYGSLSRVTRIEERYRPSMEGYRAPSRQDVYGPQPQVRVGGSSVDLHRFHPEPYGLEDDQRSMGYDDLDYGMMSDYGTARRTGTPSDPRRRLRSYEDMIGEEVPSDQYYWAPLAQHERGSLASLDSLRKGGPPPPNWRQPELPEVIAMLGFRLDAVKSNAAAYLQHLCYRNDKVKTDVRKLKGIPVLVGLLDHPKKEVHLGACGALKNISFGRDQDNKIAIKNCDGVPALVRLLRKARDMDLTEVITGTLWNLSSHDSIKMEIVDHALHALTDEVIIPHSGWEREPNEDCKPRHIEWESVLTNTAGCLRNVSSERSEARRKLRECDGLVDALIFIVQAEIGQKDSDSKLVENCVCLLRNLSYQVHREIPQAERYQEAAPNVANNTGPHAASCFGAKKGKDEWFSRGKKPIEDPANDTVDFPKRTSPARGYELLFQPEVVRIYISLLKESKTPAILEASAGAIQNLCAGRWTYGRYIRSALRQEKALSAIADLLTNEHERVVKAASGALRNLAVDARNKELIGKHAIPNLVKNLPGGQQNSSWNFSEDTVISILNTINEVIAENLEAAKKLRETQGIEKLVLINKSGNRSEKEVRAAALVLQTIWGYKELRKPLEKEGWKKSDFQVNLNNASRSQSSHSYDDSTLPLIDRNQKSDDNNYSTPNERGDHNRTLDRSGDLGDMEPLKGTTPLMQKI

SEQ ID NO: 7125 - protein, 919 aa, Homo sapiens
MDDSEVESTASILASVKEQEAQFEKLTRALEEERRHVSAQLERVRVSPQDANPLMANGTLTRRHQNGRFVGDADLERQKFSDLKLNGPQDHSHLLYSTIPRMQEPGQIVETYTEEDPEGAMSVVSVETSDDGTTRRTETTVKKVVKTVTTRTVQPVAMGPDGLPVDASSVSNNYIQTLGRDFRKNGNGGPGPYVGQAGTATLPRNFHYPPDGYSRHYEDGYPGGSDNYGSLSRVTRIEERYRPSMEGYRAPSRQDVYGPQPQVRVGGSSVDLHRFHPEPYGLEDDQRSMGYDDLDYGMMSDYGTARRTGTPSDPRRRLRSYEDMIGEEVPSDQYYWAPLAQHERGSLASLDSLRKGGPPPPNWRQPELPEVIAMLGFRLDAVKSNAAAYLQHLCYRNDKVKTDVRKLKGIPVLVGLLDHPKKEVHLGACGALKNISFGRDQDNKIAIKNCDGVPALVRLLRKARDMDLTEVITGTLWNLSSHDSIKMEIVDHALHALTDEVIIPHSGWEREPNEDCKPRHIEWESVLTNTAGCLRNVSSERSEARRKLRECDGLVDALIFIVQAEIGQKDSDSKLVENCVCLLRNLSYQVHREIPQAERYQEAAPNVANNTGPHAASCFGAKKGKDEWFSRGKKPIEDPANDTVDFPKRTSPARGYELLFQPEVVRIYISLLKESKTPAILEASAGAIQNLCAGRWTYGRYIRSALRQEKALSAIADLLTNEHERVVKAASGALRNLAVDARNKELIGKHAIPNLVKNLPGGQQNSSWNFSEDTVISILNTINEVIAENLEAAKKLRETQGIEKLVLINKSGNRSEKEVRAAALVLQTIWGYKELRKPLEKEGWKKSDFQVNLNNASRSQSSHSYDDSTLPLIDRNQKSDDNNYSTPNERGDHNRTLDRSGDLGDMEPLKGTTPLMQKI

SEQ ID NO: 7126 - protein, 865 aa, Homo sapiens
MANGTLTRRHQNGRFVGDADLERQKFSDLKLNGPQDHSHLLYSTIPRMQEPGQIVETYTEEDPEGAMSVVSVETSDDGTTRRTETTVKKVVKTVTTRTVQPVAMGPDGLPVDASSVSNNYIQTLGRDFRKNGNGGPGPYVGQAGTATLPRNFHYPPDGYSRHYEDGYPGGSDNYGSLSRVTRIEERYRPSMEGYRAPSRQDVYGPQPQVRVGGSSVDLHRFHPEPYGLEDDQRSMGYDDLDYGMMSDYGTARRTGTPSDPRRRLRSYEDMIGEEVPSDQYYWAPLAQHERGSLASLDSLRKGGPPPPNWRQPELPEVIAMLGFRLDAVKSNAAAYLQHLCYRNDKVKTDVRKLKGIPVLVGLLDHPKKEVHLGACGALKNISFGRDQDNKIAIKNCDGVPALVRLLRKARDMDLTEVITGTLWNLSSHDSIKMEIVDHALHALTDEVIIPHSGWEREPNEDCKPRHIEWESVLTNTAGCLRNVSSERSEARRKLRECDGLVDALIFIVQAEIGQKDSDSKLVENCVCLLRNLSYQVHREIPQAERYQEAAPNVANNTGPHAASCFGAKKGKDEWFSRGKKPIEDPANDTVDFPKRTSPARGYELLFQPEVVRIYISLLKESKTPAILEASAGAIQNLCAGRWTYGRYIRSALRQEKALSAIADLLTNEHERVVKAASGALRNLAVDARNKELIGKHAIPNLVKNLPGGQQNSSWNFSEDTVISILNTINEVIAENLEAAKKLRETQGIEKLVLINKSGNRSEKEVRAAALVLQTIWGYKELRKPLEKEGWKKSDFQVNLNNASRSQSSHSYDDSTLPLIDRNQKSDDNNYSTPNERGDHNRTLDRSGDLGDMEPLKGTTPLMQKI

SEQ ID NO: 7127 - protein, 908 aa, Homo sapiens
MANGTLTRRHQNGRFVGDADLERQKFSDLKLNGPQDHSHLLYSTIPRMQEPGQIVETYTEEDPEGAMSVVSVETSDDGTTRRTETTVKKVVKTVTTRTVQPVAMGPDGLPVDASSVSNNYIQTLGRDFRKNGNGGPGPYVGQAGTATLPRNFHYPPDGYSRHYEDGYPGGSDNYGSLSRVTRIEERYRPSMEGYRAPSRQDVYGPQPQVRVGGSSVDLHRFHPEPYGLEDDQRSMGYDDLDYGMMSDYGTARRTGTPSDPRRRLRSYEDMIGEEVPSDQYYWAPLAQHERGSLASLDSLRKGGPPPPNWRQPELPEVIAMLGFRLDAVKSNAAAYLQHLCYRNDKVKTDVRKLKGIPVLVGLLDHPKKEVHLGACGALKNISFGRDQDNKIAIKNCDGVPALVRLLRKARDMDLTEVITGTLWNLSSHDSIKMEIVDHALHALTDEVIIPHSGWEREPNEDCKPRHIEWESVLTNTAGCLRNVSSERSEARRKLRECDGLVDALIFIVQAEIGQKDSDSKLVENCVCLLRNLSYQVHREIPQAERYQEAAPNVANNTGPHAASCFGAKKGKGKKPIEDPANDTVDFPKRTSPARGYELLFQPEVVRIYISLLKESKTPAILEASAGAIQNLCAGRWTYGRYIRSALRQEKALSAIADLLTNEHERVVKAASGALRNLAVDARNKELIGKHAIPNLVKNLPGGQQNSSWNFSEDTVISILNTINEVIAENLEAAKKLRETQGIEKLVLINKSGNRSEKEVRAAALVLQTIWGYKELRKPLEKEGWKKSDFQVNLNNASRSQSSHSYDDSTLPLIDRNQKSDKKPDREEIQMSNMGSNTKSLDNNYSTPNERGDHNRTLDRSGDLGDMEPLKGTTPLMQDEGQESLEEELDVLVLDDEGGQVSYPSMQKI

SEQ ID NO: 7128 - protein, 590 aa, Homo sapiens
MIGEEVPSDQYYWAPLAQHERGSLASLDSLRKGGPPPPNWRQPELPEVIAMLGFRLDAVKSNAAAYLQHLCYRNDKVKTDVRKLKGIPVLVGLLDHPKKEVHLGACGALKNISFGRDQDNKIAIKNCDGVPALVRLLRKARDMDLTEVITGTLWNLSSHDSIKMEIVDHALHALTDEVIIPHSGWEREPNEDCKPRHIEWESVLTNTAGCLRNVSSERSEARRKLRECDGLVDALIFIVQAEIGQKDSDSKLVENCVCLLRNLSYQVHREIPQAERYQEAAPNVANNTGPHAASCFGAKKGKGKKPIEDPANDTVDFPKRTSPARGYELLFQPEVVRIYISLLKESKTPAILEASAGAIQNLCAGRWTYGRYIRSALRQEKALSAIADLLTNEHERVVKAASGALRNLAVDARNKELIGKHAIPNLVKNLPGGQQNSSWNFSEDTVISILNTINEVIAENLEAAKKLRETQGIEKLVLINKSGNRSEKEVRAAALVLQTIWGYKELRKPLEKEGWKKSDFQVNLNNASRSQSSHSYDDSTLPLIDRNQKSDDNNYSTPNERGDHNRTLDRSGDLGDMEPLKGTTPLMQKI

SEQ ID NO: 7129 - protein, 914 aa, Homo sapiens
MANGTLTRRHQNGRFVGDADLERQKFSDLKLNGPQDHSHLLYSTIPRMQEPGQIVETYTEEDPEGAMSVVSVETSDDGTTRRTETTVKKVVKTVTTRTVQPVAMGPDGLPVDASSVSNNYIQTLGRDFRKNGNGGPGPYVGQAGTATLPRNFHYPPDGYSRHYEDGYPGGSDNYGSLSRVTRIEERYRPSMEGYRAPSRQDVYGPQPQVRVGGSSVDLHRFHPEPYGLEDDQRSMGYDDLDYGMMSDYGTARRTGTPSDPRRRLRSYEDMIGEEVPSDQYYWAPLAQHERGSLASLDSLRKGGPPPPNWRQPELPEVIAMLGFRLDAVKSNAAAYLQHLCYRNDKVKTDVRKLKGIPVLVGLLDHPKKEVHLGACGALKNISFGRDQDNKIAIKNCDGVPALVRLLRKARDMDLTEVITGTLWNLSSHDSIKMEIVDHALHALTDEVIIPHSGWEREPNEDCKPRHIEWESVLTNTAGCLRNVSSERSEARRKLRECDGLVDALIFIVQAEIGQKDSDSKLVENCVCLLRNLSYQVHREIPQAERYQEAAPNVANNTGPHAASCFGAKKGKDEWFSRGKKPIEDPANDTVDFPKRTSPARGYELLFQPEVVRIYISLLKESKTPAILEASAGAIQNLCAGRWTYGRYIRSALRQEKALSAIADLLTNEHERVVKAASGALRNLAVDARNKELIGKHAIPNLVKNLPGGQQNSSWNFSEDTVISILNTINEVIAENLEAAKKLRETQGIEKLVLINKSGNRSEKEVRAAALVLQTIWGYKELRKPLEKEGWKKSDFQVNLNNASRSQSSHSYDDSTLPLIDRNQKSDKKPDREEIQMSNMGSNTKSLDNNYSTPNERGDHNRTLDRSGDLGDMEPLKGTTPLMQDEGQESLEEELDVLVLDDEGGQVSYPSMQKI

SEQ ID NO: 7130 - protein, 645 aa, Homo sapiens
MIGEEVPSDQYYWAPLAQHERGSLASLDSLRKGGPPPPNWRQPELPEVIAMLGFRLDAVKSNAAAYLQHLCYRNDKVKTDVRKLKGIPVLVGLLDHPKKEVHLGACGALKNISFGRDQDNKIAIKNCDGVPALVRLLRKARDMDLTEVITGTLWNLSSHDSIKMEIVDHALHALTDEVIIPHSGWEREPNEDCKPRHIEWESVLTNTAGCLRNVSSERSEARRKLRECDGLVDALIFIVQAEIGQKDSDSKLVENCVCLLRNLSYQVHREIPQAERYQEAAPNVANNTGPHAASCFGAKKGKDEWFSRGKKPIEDPANDTVDFPKRTSPARGYELLFQPEVVRIYISLLKESKTPAILEASAGAIQNLCAGRWTYGRYIRSALRQEKALSAIADLLTNEHERVVKAASGALRNLAVDARNKELIGKHAIPNLVKNLPGGQQNSSWNFSEDTVISILNTINEVIAENLEAAKKLRETQGIEKLVLINKSGNRSEKEVRAAALVLQTIWGYKELRKPLEKEGWKKSDFQVNLNNASRSQSSHSYDDSTLPLIDRNQKSDKKPDREEIQMSNMGSNTKSLDNNYSTPNERGDHNRTLDRSGDLGDMEPLKGTTPLMQDEGQESLEEELDVLVLDDEGGQVSYPSMQKI

SEQ ID NO: 7131 - protein, 838 aa, Homo sapiens
MQEPGQIVETYTEEDPEGAMSVVSVETSDDGTTRRTETTVKKVVKTVTTRTVQPVAMGPDGLPVDASSVSNNYIQTLGRDFRKNGNGGPGPYVGQAGTATLPRNFHYPPDGYSRHYEDGYPGGSDNYGSLSRVTRIEERYRPSMEGYRAPSRQDVYGPQPQVRVGGSSVDLHRFHPEPYGLEDDQRSMGYDDLDYGMMSDYGTARRTGTPSDPRRRLRSYEDMIGEEVPSDQYYWAPLAQHERGSLASLDSLRKGGPPPPNWRQPELPEVIAMLGFRLDAVKSNAAAYLQHLCYRNDKVKTDVRKLKGIPVLVGLLDHPKKEVHLGACGALKNISFGRDQDNKIAIKNCDGVPALVRLLRKARDMDLTEVITGTLWNLSSHDSIKMEIVDHALHALTDEVIIPHSGWEREPNEDCKPRHIEWESVLTNTAGCLRNVSSERSEARRKLRECDGLVDALIFIVQAEIGQKDSDSKLVENCVCLLRNLSYQVHREIPQAERYQEAAPNVANNTGPHAASCFGAKKGKDEWFSRGKKPIEDPANDTVDFPKRTSPARGYELLFQPEVVRIYISLLKESKTPAILEASAGAIQNLCAGRWTYGRYIRSALRQEKALSAIADLLTNEHERVVKAASGALRNLAVDARNKELIGKHAIPNLVKNLPGGQQNSSWNFSEDTVISILNTINEVIAENLEAAKKLRETQGIEKLVLINKSGNRSEKEVRAAALVLQTIWGYKELRKPLEKEGWKKSDFQVNLNNASRSQSSHSYDDSTLPLIDRNQKSDKKPDREEIQMSNMGSNTKSLDNNYSTPNERGDHNRTLDRSGDLGDMEPLKGTTPLMQKI

SEQ ID NO: 7132 - protein, 942 aa, Homo sapiens
MDDSEVESTASILASVKEQEAQFEKLTRALEEERRHVSAQLERVRVSPQDANPLMANGTLTRRHQNGRFVGDADLERQKFSDLKLNGPQDHSHLLYSTIPRMQEPGQIVETYTEEDPEGAMSVVSVETSDDGTTRRTETTVKKVVKTVTTRTVQPVAMGPDGLPVDASSVSNNYIQTLGRDFRKNGNGGPGPYVGQAGTATLPRNFHYPPDGYSRHYEDGYPGGSDNYGSLSRVTRIEERYRPSMEGYRAPSRQDVYGPQPQVRVGGSSVDLHRFHPEPYGLEDDQRSMGYDDLDYGMMSDYGTARRTGTPSDPRRRLRSYEDMIGEEVPSDQYYWAPLAQHERGSLASLDSLRKGGPPPPNWRQPELPEVIAMLGFRLDAVKSNAAAYLQHLCYRNDKVKTDVRKLKGIPVLVGLLDHPKKEVHLGACGALKNISFGRDQDNKIAIKNCDGVPALVRLLRKARDMDLTEVITGTLWNLSSHDSIKMEIVDHALHALTDEVIIPHSGWEREPNEDCKPRHIEWESVLTNTAGCLRNVSSERSEARRKLRECDGLVDALIFIVQAEIGQKDSDSKLVENCVCLLRNLSYQVHREIPQAERYQEAAPNVANNTGPHAASCFGAKKGKGKKPIEDPANDTVDFPKRTSPARGYELLFQPEVVRIYISLLKESKTPAILEASAGAIQNLCAGRWTYGRYIRSALRQEKALSAIADLLTNEHERVVKAASGALRNLAVDARNKELIGKHAIPNLVKNLPGGQQNSSWNFSEDTVISILNTINEVIAENLEAAKKLRETQGIEKLVLINKSGNRSEKEVRAAALVLQTIWGYKELRKPLEKEGWKKSDFQVNLNNASRSQSSHSYDDSTLPLIDRNQKSDDNNYSTPNERGDHNRTLDRSGDLGDMEPLKGTTPLMQDEGQESLEEELDVLVLDDEGGQVSYPSMQKI

SEQ ID NO: 7133 - protein, 619 aa, Homo sapiens
MIGEEVPSDQYYWAPLAQHERGSLASLDSLRKGGPPPPNWRQPELPEVIAMLGFRLDAVKSNAAAYLQHLCYRNDKVKTDVRKLKGIPVLVGLLDHPKKEVHLGACGALKNISFGRDQDNKIAIKNCDGVPALVRLLRKARDMDLTEVITGTLWNLSSHDSIKMEIVDHALHALTDEVIIPHSGWEREPNEDCKPRHIEWESVLTNTAGCLRNVSSERSEARRKLRECDGLVDALIFIVQAEIGQKDSDSKLVENCVCLLRNLSYQVHREIPQAERYQEAAPNVANNTGPHAASCFGAKKGKGKKPIEDPANDTVDFPKRTSPARGYELLFQPEVVRIYISLLKESKTPAILEASAGAIQNLCAGRWTYGRYIRSALRQEKALSAIADLLTNEHERVVKAASGALRNLAVDARNKELIGKHAIPNLVKNLPGGQQNSSWNFSEDTVISILNTINEVIAENLEAAKKLRETQGIEKLVLINKSGNRSEKEVRAAALVLQTIWGYKELRKPLEKEGWKKSDFQVNLNNASRSQSSHSYDDSTLPLIDRNQKSDDNNYSTPNERGDHNRTLDRSGDLGDMEPLKGTTPLMQDEGQESLEEELDVLVLDDEGGQVSYPSMQKI

SEQ ID NO: 7134 - protein, 941 aa, Homo sapiens
MDDSEVESTASILASVKEQEAQFEKLTRALEEERRHVSAQLERVRVSPQDANPLMANGTLTRRHQNGRFVGDADLERQKFSDLKLNGPQDHSHLLYSTIPRMQEPGQIVETYTEEDPEGAMSVVSVETSDDGTTRRTETTVKKVVKTVTTRTVQPVAMGPDGLPVDASSVSNNYIQTLGRDFRKNGNGGPGPYVGQAGTATLPRNFHYPPDGYSRHYEDGYPGGSDNYGSLSRVTRIEERYRPSMEGYRAPSRQDVYGPQPQVRVGGSSVDLHRFHPEPYGLEDDQRSMGYDDLDYGMMSDYGTARRTGTPSDPRRRLRSYEDMIGEEVPSDQYYWAPLAQHERGSLASLDSLRKGGPPPPNWRQPELPEVIAMLGFRLDAVKSNAAAYLQHLCYRNDKVKTDVRKLKGIPVLVGLLDHPKKEVHLGACGALKNISFGRDQDNKIAIKNCDGVPALVRLLRKARDMDLTEVITGTLWNLSSHDSIKMEIVDHALHALTDEVIIPHSGWEREPNEDCKPRHIEWESVLTNTAGCLRNVSSERSEARRKLRECDGLVDALIFIVQAEIGQKDSDSKLVENCVCLLRNLSYQVHREIPQAERYQEAAPNVANNTGPHAASCFGAKKGKGKKPIEDPANDTVDFPKRTSPARGYELLFQPEVVRIYISLLKESKTPAILEASAGAIQNLCAGRWTYGRYIRSALRQEKALSAIADLLTNEHERVVKAASGALRNLAVDARNKELIGKHAIPNLVKNLPGGQQNSSWNFSEDTVISILNTINEVIAENLEAAKKLRETQGIEKLVLINKSGNRSEKEVRAAALVLQTIWGYKELRKPLEKEGWKKSDFQVNLNNASRSQSSHSYDDSTLPLIDRNQKSDNNYSTPNERGDHNRTLDRSGDLGDMEPLKGTTPLMQDEGQESLEEELDVLVLDDEGGQVSYPSMQKI

SEQ ID NO: 7135 - protein, 888 aa, Homo sapiens
MANGTLTRRHQNGRFVGDADLERQKFSDLKLNGPQDHSHLLYSTIPRMQEPGQIVETYTEEDPEGAMSVVSVETSDDGTTRRTETTVKKVVKTVTTRTVQPVAMGPDGLPVDASSVSNNYIQTLGRDFRKNGNGGPGPYVGQAGTATLPRNFHYPPDGYSRHYEDGYPGGSDNYGSLSRVTRIEERYRPSMEGYRAPSRQDVYGPQPQVRVGGSSVDLHRFHPEPYGLEDDQRSMGYDDLDYGMMSDYGTARRTGTPSDPRRRLRSYEDMIGEEVPSDQYYWAPLAQHERGSLASLDSLRKGGPPPPNWRQPELPEVIAMLGFRLDAVKSNAAAYLQHLCYRNDKVKTDVRKLKGIPVLVGLLDHPKKEVHLGACGALKNISFGRDQDNKIAIKNCDGVPALVRLLRKARDMDLTEVITGTLWNLSSHDSIKMEIVDHALHALTDEVIIPHSGWEREPNEDCKPRHIEWESVLTNTAGCLRNVSSERSEARRKLRECDGLVDALIFIVQAEIGQKDSDSKLVENCVCLLRNLSYQVHREIPQAERYQEAAPNVANNTGPHAASCFGAKKGKGKKPIEDPANDTVDFPKRTSPARGYELLFQPEVVRIYISLLKESKTPAILEASAGAIQNLCAGRWTYGRYIRSALRQEKALSAIADLLTNEHERVVKAASGALRNLAVDARNKELIGKHAIPNLVKNLPGGQQNSSWNFSEDTVISILNTINEVIAENLEAAKKLRETQGIEKLVLINKSGNRSEKEVRAAALVLQTIWGYKELRKPLEKEGWKKSDFQVNLNNASRSQSSHSYDDSTLPLIDRNQKSDDNNYSTPNERGDHNRTLDRSGDLGDMEPLKGTTPLMQDEGQESLEEELDVLVLDDEGGQVSYPSMQKI

SEQ ID NO: 7136 - protein, 968 aa, Homo sapiens
MDDSEVESTASILASVKEQEAQFEKLTRALEEERRHVSAQLERVRVSPQDANPLMANGTLTRRHQNGRFVGDADLERQKFSDLKLNGPQDHSHLLYSTIPRMQEPGQIVETYTEEDPEGAMSVVSVETSDDGTTRRTETTVKKVVKTVTTRTVQPVAMGPDGLPVDASSVSNNYIQTLGRDFRKNGNGGPGPYVGQAGTATLPRNFHYPPDGYSRHYEDGYPGGSDNYGSLSRVTRIEERYRPSMEGYRAPSRQDVYGPQPQVRVGGSSVDLHRFHPEPYGLEDDQRSMGYDDLDYGMMSDYGTARRTGTPSDPRRRLRSYEDMIGEEVPSDQYYWAPLAQHERGSLASLDSLRKGGPPPPNWRQPELPEVIAMLGFRLDAVKSNAAAYLQHLCYRNDKVKTDVRKLKGIPVLVGLLDHPKKEVHLGACGALKNISFGRDQDNKIAIKNCDGVPALVRLLRKARDMDLTEVITGTLWNLSSHDSIKMEIVDHALHALTDEVIIPHSGWEREPNEDCKPRHIEWESVLTNTAGCLRNVSSERSEARRKLRECDGLVDALIFIVQAEIGQKDSDSKLVENCVCLLRNLSYQVHREIPQAERYQEAAPNVANNTGPHAASCFGAKKGKDEWFSRGKKPIEDPANDTVDFPKRTSPARGYELLFQPEVVRIYISLLKESKTPAILEASAGAIQNLCAGRWTYGRYIRSALRQEKALSAIADLLTNEHERVVKAASGALRNLAVDARNKELIGKHAIPNLVKNLPGGQQNSSWNFSEDTVISILNTINEVIAENLEAAKKLRETQGIEKLVLINKSGNRSEKEVRAAALVLQTIWGYKELRKPLEKEGWKKSDFQVNLNNASRSQSSHSYDDSTLPLIDRNQKSDKKPDREEIQMSNMGSNTKSLDNNYSTPNERGDHNRTLDRSGDLGDMEPLKGTTPLMQDEGQESLEEELDVLVLDDEGGQVSYPSMQKI

SEQ ID NO: 7137 - protein, 115 aa, Homo sapiens [sequence omitted]

SEQ ID NO: 7138 - protein, 351 aa, Homo sapiens
MEDSQETSPSSNNSSEELSSALHLSKGMSIFLDILRRADKNDDGKLSFEEFKAYFADGVLSGEELHELFHTIDTHNTNNLDTEELCEYFSQHLGEYENVLAALEDLNLSILKAMGKTKKDYQEASNLEQFVTRFLLKETLNQLQSLQNSLECAMETTEEQTRQERQGPAKPEVLSIQWPGKRSSRRVQRHNSFSPNSPQFNVSGPGLLEEDNQWMTQINRLQKLIDRLEKKDLKLEPPEEEIIEGNTKSHIMLVQRQMSVIEEDLEEFQLALKHYVESASSQSGCLRISIQKLSNESRYMIYEFWENSSVWNSHLQTNYSKTFQRSNVDFLETPELTSTMLVPASWWILNN

SEQ ID NO: 7139 - protein, 958 aa, Homo sapiens
MSECGGRGGGSSSSEDAEDEGGGGGGPAGSDCLSSSPTLATASSAGRLRRGLRGAFLMARQRPELLCGAVALGCALLLALKFTCSRAKDVIIPAKPPVSFFSLRSPVLDLFQGQLDYAEYVRRDSEVVLLFFYAPWCGQSIAARAEIEQAASRLSDQVLFVAINCWWNQGKCRKQKHFFYFPVIYLYHRSFGPIEYKGPMSAVYIEKFVRRVMKPLLYIPSQSELLDFLSNYEPGVLGYFEFSGSPQPPGYLTFFTSALHSLKKDYLGTVRFGVITNKHLAKLVSLVHSGSVYLHRHFNTSLVFPREVLNYTAENICKWALENQETLFRWLRPHGGKSLLLNNELKKGPALFLFIPFNPLAESHPLIDEITEVALEYNNCHGDQVVERLLQHLRRVDAPVLESLALEVPAQLPDPPTITASPCCNTVVLPQWHSFSRTHNVCELCVNQTSGGMKPSSVSVPQCSFFEMAAALDSFYLKEQTFYHVASDSIECSNFLTSYSPFSYYTACCRTISRGVSGFIDSEQGVFEAPTVAFSSLEKKCEVDAPSSVPHIEENRYLFPEVDMTSTNFTGLSCRTNKTLNIYLLDSNLFWLYAERLGAPSSTQVKEFAAIVDVKEESHYILDPKQALMKLTLESFIQNFSVLYSPLKRHLIGSGSAQFPSQHLITEVTTDTFWEVVLQKQDVLLLYYAPWCGFCPSLNHIFIQLARNLPMDTFTVARIDVSQNDLPWEFMVDRLPTVLFFPCNRKDLSVKYPEDVPITLPNLLRFILHHSDPASSPQNVANSPTKECLQSEAVLQRGHISHLEREIQKLRAEISSLQRAQVQVESQLSSARRDEHRLRQQQRALEEQHSLLHAHSEQLQALYEQKTRELQELARKLQELADASENLLTENTWLKILVATMERKLEGRDGAESLAAQREVHPKQPEPSATPQLPGSSPPPANVSATLVSERNKENRTD

SEQ ID NO: 7140 - protein, 210 aa, Homo sapiens
MKPSSVSVPQCSFFEMAAALDSFYLKEQTFYHVASDSIECSNFLTSYSPFSYYTACCRTISRGVSGFIDSEQGVFEAPTVAFSSLEKKCEVDAPSSVPHIEENRYLFPEVDMTSTNFTGLSCRTNKTLNIYLLDSNLFWLYAERLGAPSSTQVKEFAAIVDVKEESHYILDPKQALMKLTLGTAGSLFPQALYILLDFIWVNFIDGSHYI

SEQ ID NO: 7141 - protein, 359 aa, Homo sapiens
MAEPFLSEYQHQPQTSNCTGAAAVQEELNPERPPGAEERVPEEDSRWQSRAFPQLGGRPGPEGEGSLESQPPPLQTQACPESSCLREGEKGQNGDDSSAGGDFPPPAEVEPTPEAELLAQPCHDSEASKLGAPAAGGEEEWGQQQRQLGKKKHRRRPSKKKRHWKPYYKLTWEEKKKFDEKQSLRASRIRAEMFAKGQPVAPYNTTQFLMDDHDQEEPDLKTGLYSKRAAAKSDDTSDDDFMEEGGEEDGGSDGMGGDGSEFLQRDFSETYERYHTESLQNMSKQELIKEYLELEKCLSRMEDENNRLRLESKRLGGDDARVRELELELDRLRAENLQLLTENELHRQQERAPLSKFGD

SEQ ID NO: 7142 - protein, 452 aa, Homo sapiens
EFVTALADLRAEASCPICLDYLKDPVTISCGHNFCLSCIIMSWKDLHDSFPCPFCHFCCPERKFISNPQLGSLTEIAKQLQIRSKKRKRQEEKHVCKKHNQVLTFFCQKDLELLCPRCSLSTDHQHHCVWPIKKAASYHRKKLEEYNAPWKERVELIEKVITMQTRKSLELKKKVKHRAEEVKSEFEQLRLFLQNEQETVLRQLQDEEMDILAQLNESLTKFSDYTSSLKYLLKEIESIYVKSELELLANVKDIYHRYENLKFPELFLFKLKKYGYHLPPQYSGLDKIIKRFQVDVILDPETAHRKLIVSEDRKTVRYGNTTQNVPHNPRRFYLLPAVLGSKGYSCGRQYWEVEVKDKPEWILGVCNDCLPRRRKSQPILVQDGLWGIWRSSQNNYIVLGHREIILLPQVIPSKIGIFLDYEMNEVSFYNLNDRSLLYTFNDNFTGALWPYF

SEQ ID NO: 7143 - protein, 684 aa, Homo sapiens [sequence omitted]

SEQ ID NO: 7144 - protein, 674 aa, Homo sapiens
MQSREDAPRSRRLASPRGGKRPKKIHKPTVSAFFTGPEELKDTAHSAALLAQLKSFYDARLLCDVTIEVVTPGSGPGTGRLFPCNRNVLAAACPYFKSMFTGGMYESQQASVTMHDVDAESFEVLVDYCYTGRVSLSEANVERLYAASDMLQLEYVREACASFLARRLDLTNCTAILKFADAFGHRKLRSQAQSYIAQNFKQLSHMGSIREETLADLTLAQLLAVLRLDSLDVESEQTVCHVAVQWLEAAPKERGPSAAEVFKCVRWMHFTEEDQDYLEGLLTKPIVKKYCLDVIEGALQMRYGDLLYKSLVPVPNSSSSSSSSNSLVSAAENPPQRLGMCAKEMVIFFGHPRDPFLCCDPYSGDLYKVPSPLTCLAHTRTVTTLAVCISPDHDIYLAAQPRTDLWVYKPAQNSWQQLADRLLCREGMDVAYLNGYIYILGGRDPITGVKLKEVECYNVKRNQWALVAPLPHSFLSFDLMVIRDYLYALNSKRMFCYDPSHNMWLKCVSLKRNDFQEACVFNEEIYCICDIPVMKVYNPVRAEWRQMNNIPLVSETNNYRIIKHGQKLLLITSRTPQWKKNRVTVYEYDIRGDQWINIGTTLGLLQFDSNFFCLSARVYPSCLEPGQSFLTEEEEIPSESSTEWDLGGFSEPDSESGSSSSLSDDDFWVRVAPQ

SEQ ID NO: 7145 - protein, 684 aa, Homo sapiens
MQSREDVPRSRRLASPRGGRRPKRISKPSVSAFFTGPEELKDTAHSAALLAQLKSFYDARLLCDVTIEVVTPGSGPGTGRLFSCNRNVLAAACPYFKSMFTGGMYESQQASVTMHDVDAESFEVLVDYCYTGRVSLSEANVQRLYAASDMLQLEYVREACASFLARRLDLTNCTAILKFADAFDHHKLRSQAQSYIAHNFKQLSRMGSIREETLADLTLAQLLAVLRLDSLDIESERTVCHVAVQWLEAAAKERGPSAAEVFKCVRWMHFTEEDQDYLEGLLTKPIVKKYCLDVIEGALQMRYGDLLYKSLVPVPNSSSSSSSSNSLVSAAENPPQRLGMCAKEMVIFFGHPRDPFLCYDPYSGDIYTMPSPLTSFAHTKTVTSSAVCVSPDHDIYLAAQPRKDLWVYKPAQNSWQQLADRLLCREGMDVAYLNGYIYILGGRDPITGVKLKEVECYSVQRNQWALVAPVPHSFYSFELIVVQNYLYAVNSKRMLCYDPSHNMWLNCASLKRSDFQEACVFNDEIYCICDIPVMKVYNPARGEWRRISNIPLDSETHNYQIVNHDQKLLLITSTTPQWKKNRVTVYEYDTREDQWINIGTMLGLLQFDSGFICLCARVYPSCLEPGQSFITEEDDARSESSTEWDLDGFSELDSESGSSSSFSDDEVWVQVAPQRNAQDQQGSL

SEQ ID NO: 7146 - protein, 674 aa, Homo sapiens
MQSREDAPRSRRLASPRGGKRPKKIHKPTVSAFFTGPEELKDTAHSAALLAQLKSFYDARQLCDVTIEVVTPGSGPGTGRLFPCNRNVLAAACPYFKSMFTGGMYESQQASVTMHDVDAESFEVLVDYCYTGRVSLSEANVERLYAASDMLQLEYVREACASFLARRLDLTNCTAILKFADAFGHRKLRSQAQSYIAQNFKQLSHMGSIREETLADLTLAQLLAVLRLDSLDVESEQTVCHVAVQWLEAAPKERGPSAAEVFKCVRWMHFTEEDQDYLEGLLTKPIVKKYCLDVIEGALQMRYGDLLYKSLVPVPNSSSSSSSSNSLVSAAENPPQRLGMCAKEMVIFFGHPRDPFLCCDPYSGDLYKVPSPLTCLAHTRTVTTLAVCISPDHDIYLAAQPRTDLWVYKPAQNSWQQLADRLLCREGMDVAYLNGYIYILGGRDPITGVKLKEVECYNVKRNQWALVAPLPHSFLSFDLMVIRDYLYALNSKRMFCYDPSHNMWLKCVSLKRNDFQEACVFNEEIYCICDIPVMKVYNPVRAEWRQMNNIPLVSETNNYRIIKHGQKLLLITSRTPQWKKNRVTVYEYDIRGDQWINIGTTLGLLQFDSNFFCLSARVYPSCLEPGQSFLTEEEEIPSESSTEWDLGGFSEPDSESGSSSSLSDDDFWVRVAPQ

SEQ ID NO: 7147 - protein, 620 aa, Homo sapiens
MPSERCLSIQEMLTGQRLCHSESHNDSVLAALNQQRSDGILCDITLIAEEQKFHAHKAVLAACSDYFRAMFSLCMVESGADEVNLHGVTSLGLKQALEFAYTGQILLEPGVIQDVLAAGSHLQLLELLNLCSHYLIQELNSFNYLDLYRLADLFNLTLLEKAVIDFLVKHLSELLKSRPEEVLTLPYCLLQEVLKSDRLTSLSEEQIWQLAVRWLEHNCHYQYMDELLQYIRFGLMDVDTLHTVALSHPLVQASETATALVNEALEYHQSIYAQPVWQTRRTKPRFQSDTLYIIGGKKREVCKVKELRYFNPVDQENALIAAIANWSELASMPVGRSHHCVAVMGDFLFVAGGEVEHASGRTCAVRTACRYDPRSNSWAEIAPMKNCREHFVLGAMEEYLYAVGGRNELRQVLPTVERYCPKKNKWTFVQSFDRSLSCHAGYVADGLLWISGGVTNTAQYQNRLMVYEPNQNKWISRSPMLQRRVYHSMAAVQRKLYVLGGNDLDYNNDRILVRHIDSYNIDTDQWTRCNFNLLTGQNESGVAVHNGRIYLVGGYSIWTNEPLACIQVLDVSREGKEEVFYGPTLPFASNGIAACFLPAPYFTCPNLQTLQVPHHRIGTI

SEQ ID NO: 7148 - protein, 619 aa, Homo sapiens
MYGFVNHALELLVIRNYGPEVWEDIKKEAQLDEEGQFLVRIIYDDSKTYDLVAAASKVLNLNAGEILQMFGKMFFVFCQESGYDTILRVLGSNVREFLQNLDALHDHLATIYPGMRAPSFRCTDAEKGKGLILHYYSEREGLQDIVIGIIKTVAQQIHGTEIDMKVIQQRNEECDHTQFLIEEKESKEEDFYEDLDRFEENGTQESRISPYTFCKAFPFHIIFDRDLVVTQCGNAIYRVLPQLQPGNCSLLSVFSLVRPHIDISFHGILSHINTVFVLRSKEGLLDVEKLECEDELTGTEISCLRLKGQMIYLPEADSILFLCSPSVMNLDDLTRRGLYLSDIPLHDATRDLVLLGEQFREEYKLTQELEILTDRLQLTLRALEDEKKKTDTLLYSVLPPSVANELRHKRPVPAKRYDNVTILFSGIVGFNAFCSKHASGEGAMKIVNLLNDLYTRFDTLTDSRKNPFVYKVETVGDKYMTVSGLPEPCIHHARSICHLALDMMEIAGQVQVDGESVQITIGIHTGEVVTGVIGQRMPRYCLFGNTVNLTSRTETTGEKGKINVSEYTYRCLMSPENSDPQFHLEHRGPVSMKGKKEPMQVWFLSRKNTGTEETKQDDD

SEQ ID NO: 7149 - protein, 2080 aa, Homo sapiens [sequence omitted]

SEQ ID NO: 7150 - protein, 2567 aa, Homo sapiens [sequence omitted]

SEQ ID NO: 7151 - protein, 450 aa, Homo sapiens
GRKQFMRFEWANYAAEALGCEYEELNTATFKHHLRQIIQQMTFGPSRWGLEDEETSSGLKMTGVDCVEGMASGLYQELFAAVVSLINRSFSSHHLSMASIMVVDSPGFQNPRHQGKDRAATFEELCHNYAHERLQLLFYQRTFVSTLQRYQEVCLGWSRAFTRAPWMVESWFSQQVRLPAGGGAQDARGLFWVLDEEVHVEGSSDSVVLERLCAAFEKKGAGTEGSSALRTCEQPLQCEIFHQLGWDPVRYDLTGWLHRAKPNLSALDAPQVLHQSKREELRSLFQARAKLPPVCRAVAGLEGTSQQALQRSRMVRRTFASSLAAVRRKAPCSQIKLQMDALTSMIKRSRLHFIHCLVPNPVVESRSGQESPPPPQPGRDKPGAGGPLALDIPALRVQLAGFHILEALRLHRTGYADHMGLTRFRRQFQVLDAPLLKKLMSTSEGIDERK

SEQ ID NO: 7152 - protein, 876 aa, Homo sapiens
MVVNGRRNGGKLSNDHQQNQSKLQHTGKDTLKAGKNAVERRSNRCNGNSGFEGQSRYVPSSGMSAKELCENDDLATSLVLDPYLGFQTHKMNTSAFPSRSSRHFSKSDSFSHNNPVRFRPIKGRQEELKEVIERFKKDEHLEKAFKCLTSGEWARHYFLNKNKMQEKLFKEHVFIYLRMFATDSGFEILPCNRYSSEQNGAKIVATKEWKRNDKIELLVGCIAELSEIEENMLLRHGENDFSVMYSTRKNCAQLWLGPAAFINHDCRPNCKFVSTGRDTACVKALRDIEPGEEISCYYGDGFFGENNEFCECYTCERRGTGAFKSRVGLPAPAPVINSKYGLRETDKRLNRLKKLGDSSKNSDSQSVSSNTDADTTQEKNNATSNRKSSVGVKKNSKSRTLTRQSMSRIPASSNSTSSKLTHINNSRVPKKLKKPAKPLLSKIKLRNHCKRLEQKNASRKLEMGNLVLKEPKVVLYKNLPIKKDKEPEGPAQAAVASGCLTRHAAREHRQNPVRGAHSQGESSPCTYITRRSVRTRTNLKEASDIKLEPNTLNGYKSSVTEPCPDSGEQLQPAPVLQEEELAHETAQKGEAKCHKSDTGMSKKKSRQGKLVKQFAKIEESTPVHDSPGKDDAVPDLMGPHSDQGEHSGTVGVPVSYTDCAPSPVGCSVVTSDSFKTKDSFRTAKSKKKRRITRYDAQLILENNSGIPKLTLRRRHDSSSKTNDQENDGMNSSKISIKLSKDHDNDNNLYVAKLNNGFNSGSGSSSTKLKIQLKRDEENRGSYTEGLHENGVCCSDPLSLLESRMEVDDYSQYEEESTDDSSSSEGDEEEDDYDDDFEDDFIPLPPAKRLRLIVGKDSIDIDISSRRREDQSLRLNA

SEQ ID NO: 7153 - protein, 2385 aa, Homo sapiens
MPVLGVASKLRQPAVGSKPVHTALPIPNLGTTGSQHCSSRPLELAETESSMLSCQLALKSTCEFGEKKPLQGKAKEKEDSKIYTDWANHYLAKSGHKRLIKDLQQDIADGVLLAEIIQIIANEKVEDINGCPRSQSQMIENVDVCLSFLAARGVNVQGLSAEEIRNGNLKAILGLFFSLSRYKQQQHHQQQYYQSLVELQQRVTHASPPSEASQAKTQQDMQSSLAARYATQSNHSGIATSQKKPTRLPGPSRVPAAGSSSKVQGASNLNRRSQSFNSIDKNKPPNYANGNEKDSSKGPQSSSGVNGNVQPPSTAGQPPASAIPSPSASKPWRSKSMNVKHSATSTMLTVKQSSTATSPTPSSDRLKPPVSEGVKTAPSGQKSMLEKFKLVNARTALRPPQPPSSGPSDGGKDDDAFSESGEMEGFNSGLNSGGSTNSSPKVSPKLAPPKAGSKNLSNKKSLLQPKEKEEKNRDKNKVCTEKPVKEEKDQVTEMAPKKTSKIASLIPKGSKTTAAKKESLIPSSSGIPKPGSKVPTVKQTISPGSTASKESEKFRTTKGSPSQSLSKPITMEKASASSCPAPLEGREAGQASPSGSCTMTVAQSSGQSTGNGAVQLPQQQQHSHPNTATVAPFIYRAHSENEGTALPSADSCTSPTKMDLSYSKTAKQCLEEISGEGPETRRMRTVKNIADLRQNLEETMSSLRGTQISHSTLETTFDSTVTTEVNGRTIPNLTSRPTPMTWRLGQACPRLQAGDAPSLGAGYPRSGTSRFIHTDPSRFMYTTPLRRAAVSRLGNMSQIDMSEKASSDLDMSSEVDVGGYMSDGDILGKSLRTDDINSGYMTDGGLNLYTRSLNRIPDTATSRDIIQRGVHDVTVDADSWDDSSSVSSGLSDTLDNISTDDLNTTSSVSSYSNITVPSRKNTQLRTDSEKRSTTDETWDSPEELKKPEEDFDSHGDAGGKWKTVSSGLPEDPEKAGQKASLSVSQTGSWRRGMSAQGGAPSRQKAGTSALKTPGKTDDAKASEKGKAPLKGSSLQRSPSDAGKSSGDEGKKPPSGIGRSTATSSFGFKKPSGVGSSAMITSSGATITSGSATLGKIPKSAAIGGKSNAGRKTSLDGSQNQDDVVLHVSSKTTLQYRSLPRPSKSSTSGIPGRGGHRSSTSSIDSNVSSKSAGATTSKLREPTKIGSGRSSPVTVNQTDKEKEKVAVSDSESVSLSGSPKSSPTSASACGAQGLRQPGSKYPDIASPTFRRLFGAKAGGKSASAPNTEGVKSSSVMPSPSTTLARQGSLESPSSGTGSMGSAGGLSGSSSPLFNKPSDLTTDVISLSHSLASSPASVHSFTSGGLVWAANMSSSSAGSKDTPSYQSMTSLHTSSESIDLPLSHHGSLSGLTTGTHEVQSLLMRTGSVRSTLSESMQLDRNTLPKKGLRYTPSSRQANQEEGKEWLRSHSTGGLQDTGNQSPLVSPSAMSSSAAGKYHFSNLVSPTNLSQFNLPGPSMMRSNSIPAQDSSFDLYDDSQLCGSATSLEERPRAISHSGSFRDSMEEVHGSSLSLVSSTSSLYSTAEEKAHSEQIHKLRRELVASQEKVATLTSQLSANAHLVAAFEKSLGNMTGRLQSLTMTAEQKESELIELRETIEMLKAQNSAAQAAIQGALNGPDHPPKDLRIRRQHSSESVSSINSATSHSSIGSGNDADSKKKKKKNWVNSRGSELRSSFKQAFGKKKSTKPPSSHSDIEELTDSSLPASPKLPHNAGDCGSASMKPSQSASASPLVWPPKKRQNGPVIYKHRSRICECTEAEAEIILQLKSELREKELKLTDIRLEALSSAHHLDQIREAMNRMQNEIEILKAENDRLKAETGNTAKPTRPPSESSSSTSSSSSRQSLGLSLNNLNITEAVSSDILLDDAGDATGHKDGRSVKIIVSISKGYGRAKDQKSQAYLIGSIGVSGKTKWDVLDGVIRRLFKEYVFRIDTSTSLGLSSDCIASYCIGDLIRSHNLEVPELLPCGYLVGDNNIITVNLKGVEENSLDSFVFDTLIPKPITQRYFNLLMEHHRIILSGPSGTGKTYLANKLAEYVITKSGRKKTEDAIATFNVDHKSSKELQQYLANLAEQCSADNNGVELPVVIILDNLHHVGSLSDIFNGFLNCKYNKCPYIIGTMNQGVSSSPNLELHHNFRWVLCANHTEPVKGFLGRYLRRKLIEIEIERNIRNNDLVKIIDWIPKTWHHLNSFLETHSSSDVTIGPRLFLPCPMDVEGSRVWFMDLWNYSLVPYILEAVREGLQMYGKRTPWEDPSKWVLDTYPWSSATLPQESPALLQLRPEDVGYESCTSTKEATTSKHIPQTDTEGDPLMNMLMKLQEAANYSSTQSCDSESTSHHEDILDSSLESTL

SEQ ID NO: 7154 - protein, 423 aa, Homo sapiens
  VARIANT 383: Xaa = Any Amino Acid
MSIKVTQKSYKVSTSDPWAFSSLSYTSGPGAPISFSSFSRVGSSSFRGGQGGGYAGASGMGGITIITVNQSLLSPLNLEVDPNIQAVHTQEKEQVKTLNKFASFIEKLETLGQEKLKLEAEFGNMKGLVENFKNKYEDEINKRTEVGNEFVLIKKDVDEAYMNKVELESCLEVLTDEINFFSQLYEEDIQELQSQISDTFVVLSMDNSRTLDMDSIITEVRAQYEEIANCSQAEAVRPCTRSSMRSCRRWLGSTGVTCGVRRQISEMNGNISRLQAEIEGLKGQRASLEATLADAEQCGELAVKDANAKLSKLGGCPTAGQAGHGTAAAYQGLINFKLALDVEIATYRKLLEGEESRLESGMRNMSIHSKTTSGYVSGLSSAXGGLTSYCLSSSFGSGAGSSSTKAVVVKKLETRDGKLVSES

SEQ ID NO: 7155 - protein, 990 aa, Homo sapiens
ANSFDDRFLVTAGADGNIFVFNIFSEFMLRKDMKAKVPSPRFGIETEPIPEDIEDPKAYSIENARRKREHDKLMKEVGEIKARKREQIKALRSEFCNLLEMNEKLPKHMQFKRTDFDVDSQIRAEMHRKTAFKIQQVEKELAWEKEKHELGLMKLKNRFRDPLESDTIVVHAILSDHKISSYRLVQPSKYSKFKRASQSERKPSKLDRFEKEGPGRKDSQRDAGGSVTIQEESIIEKGKKFRPKTLSEIIVENQIEKTRKLILKAERAQLKIQQRKKEWEELYKSKPGDDYEDPKDLQAIKEAQVYMGDFNLKTAPDYKIPEHMRINAAKKEEELGHLDSLVHGNKRHMNKCILSLRDLKVAVVEEIQCLVQELKNIQSTLHISKHIPIPKIPQIHPEEVPEKRFQYDEETLLNFKQQQMKSKDEKSPGVEQTGSGGPVGGFLKLSSRKDGDLTTRDSISRSSKASTFSLDIPKCLEFEKAEPTDVELEIMKRDEIKHVYMQQYLVNRIKELVVTFDAELRLLRHQKLKLDTQMKLSDLHHVTLFQEILLLKNFEKQENILQERVNSLDKEEQYMQWKINETLKEMEEKKNEITKLQEQEKALYAGFQAAIGENNKFANFLMKVLKKKIKRVKKKEVEGDADEDEESEESSEEESSLESDEDESESEDEVFDDSICPTNCDVALFELALHLREKRLDIEEALVEEKKIVDNLKKEYDTLSKKVKIVATNLNAAEEALEAYQREKQQRLNELLVVIPLKPHQIEYVVFGEIPSDLSGTLVFSNHALRRLQERIRELQEENSKQQKLNKEWRERRKQLIREKREMTKTIHKMEETVRQLMISKFGRVVNLEALQMLSVNTTLEELKIRKLRKELANAKEMKMWEEKIAQMRWELMMKTKEHTRKLYQMNDLCIEKKKLDSRLNTLQNQQGNAFQGPREADVVAREEVTELIQLQAERISALKEEIALLRRKGGLILPPIQSPREKEIQPADL

SEQ ID NO: 7156 - protein, 4862 aa, Homo sapiens
MATMIPPVKLKWLEHLNSSWITEDSESIATREGVAVLYSKLVSNKEVVPLPQQVLCLKGPQLPDFERESLSSDEQDHYLDALLSSQLALAKMVCSDSPFAGALRKRLLVLQRVFYALSNKYHDKGKVKQQQHSPESSSGSADVHSVSERPRSSTDALIEMGVRTGLSLLFALLRQSWMMPVSGPGLSLCNDVIHTAIEVVSSLPPLSLANESKIPPMGLDCLSQVTTFLKGVTIPNSGADTLGRRLASELLLGLAAQRGSLRYLLEWIEMALGASAVVHTMEKGKLLSSQEGMISFDCFMTILMQMRRSLGSSADRSQWREPTRTSDGLCSLYEAALCLFEEVCRMASDYSRTCASPDSIQTGDAPIVSETCEVYVWGSNSSHQLVEGTQEKILQPKLAPSFSDAQTIEAGQYCTFVISTDGSVRACGKGSYGRLGLGDSNNQSTLKKLTFEPHRSIKKVSSSKGSDGHTLAFTTEGEVFSWGDGDYGKLGHGNSSTQKYPKLIQGPLQGKVVVCVSAGYRHSAAVTEDGELYTWGEGDFGRLGHGDSNSRNIPTLVKDISNVGEVSCGSSHTIALSKDGRTVWSFGGGDNGKLGHGDTNRVYKPKVIEALQGMFIRKVCAGSQSSLALTSTGQVYAWGCGACLGCGSSEATALRPKLIEELAATRIVDVSIGDSHCLALSHDNEVYAWGNNSMGQCGQGNSTGPITKPKKVSGLDGIAIQQISAGTSHSLAWTALPRDRQVVAWHRPYCVDLEESTFSHLRSFLERYCDKINSEIPPLPFPSSREHHSFLKLCLKLLSNHLALALAGGVATSILGRQAGPLRNLLFRLMDSTVPDEIQEVVIETLSVGATMLLPPLRERMELLHSLLPQGPDRWESLSKGQRMQLDIILTSLQDHTHVASLLGYSSPSDAADLSSVCTGYGNLSDQPYGTQSCHPDTHLAEILMKTLLRNLGFYTDQAFGELEKNSDKFLLGTSSSENSQPAHLHELLCSLQKQLLAFCHINNISENSSSVALLHKHLQLLLPHATDIYSRSANLLKESPWNGSVGEKLRDVIYVSAAGSMLCQIVNSLLLLPVSVARPLLSYLLDLLPPLDCLNRLLPAADLLEDQELQWPLHGGPELIDPAGLPLPQPAQSWVWLVDLERTIALLIGRCLGGMLQGSPVSPEEQDTAYWMKTPLFSDGVEMDTPQLDKCMSCLLEVALSGNEEQKPFDYKLRPEIAVYVDLALGCSKEPARSLWISMQDYAVSKDWDSATLSNESLLDTVSRFVLAALLKHTNLLSQACGESRQYQPGKHLSEVYRCVYKVRSRLLACKNLELIQTRSSSRDRWISENQDSADVDPQEHSFTRTIDEEAEMEEQAERDREEGHPEPEDEEEEREHEVMTAGKIFQCFLSAREVARSRDRDRMNSGAGSGARADDPPPQSQQERRVSTDLPEGQDVYTAACNSVIHRCALLILGVSPVIDELQKRREEGQLQQPSTSASEGGGLMTRSESLTAESRLVHTSPNYRLIKSRSESDLSQPESDEEGYALSGRRNVDLDLAASHRKRGPMHSQLESLSDSWARLKHSRDWLCNSSYSFESDFDLTKSLGVHTLIENVVSFVSGDVGNAPGFKEPEESMSTSPQASIIAMEQQQLRAELRLEALHQILVLLSGMEEKGSISLAGSRLSSGFQSSTLLTSVRLQFLAGCFGLGTVGHTGGKGESGRLHHYQDGIRAAKRNIQIEIQVAVHKIYQQLSATLERALQANKHHIEAQQRLLLVTVFALSVHYQPVDVSLAISTGLLNVLSQLCGTDTMLGQPLQLLPKTGVSQLSTALKVASTRLLQILAITTGTYADKLSPKVVQSLLDLLCSQLKNLLSQTGVLHMASFGEGEQEDGEEEEKKVDSSGETEKKDFRAALRKQHAAELHLGDFLVFLRRVVSSKAIQSKMASPKWTEVLLNIASQKCSSGIPLVGNLRTRLLALHVLEAVLPACESGVEDDQMAQIVERLFSLLSDCMWETPIAQAKHAIQIKEKEQEIKLQKQGELEEEDENLPIQEVSFDPEKAQCCLVENGQILTHGSGGKGYGLASTGVTSGCYQWKFYIVKENRGNEGTCVGVSRWPVHDFNHRTTSDMWLYRAYSGNLYHNGEQTLTLSSFTQGDFITCVLDMEARTISFGKNGEEPKLAFEDVDAAELYPCVMFYSSNPGEKVKICDMQMRGTPRDLLPGDPICSPVAAVLAEATIQLIRILHRTDRWTYCINKKMMERLHKIKICIKESGQKLKKSRSVQSREENEMREEKESKEEEKGKHTRHGLADLSELQLRTLCIEVWPVLAVIGGVDAGLRVGGRCVHKQTGRHATLLGVVKEGSTSAKVQWDEAEITISFPTFWSPSDTPLYNLEPCEPLPFDVARFRGLTASVLLDLTYLTGVHEDMGKQSTKRHEKKHRHESEEKGDVEQKPESESALDMRTGLTSDDVKSQSTTSSKSENEIASFSLDPTLPSVESQHQITEGKRKNHEHMSKNHDVAQSEIRAVQLSYLYLGAMKSLSALLGCSKYAELLLIPKVLAENGHNSDCASSPVVHEDVEMRAALQFLMRHMVKRAVMRSPIKRALGLADLERAQAMIYKLVVHGLLEDQFGGKIKQEIDQQAEESDPAQQAQTPVTTSPSASSTTSFMSSSLEDTTTATTPVTDTETVPASESPGVMPLSLLRQMFSSYPTTTVLPTRRAQTPPISSLPTSPSDEVGRRQSLTSPDSQSARPANRTALSDPSSRLSTSPPPPAIAVPLLEMGFSLRQIAKAMEATGARGEADAQNITVLAMWMIEHPGHEDEEEPQSGSTADSRPGAAVLGSGGKSNDPCYLQSPGDIPSADAAEMEEGFSESPDNLDHTENAASGSGPSARGRSAVTRRHKFDLAARTLLARAAGLYRSVQAHRNQSRREGISLQQDPGALYDFNLDEELEIDLDDEAMEAMFGQDLTSDNDILGMWIPEVLDWPTWHVCESEDREEVVVCELCECSVVSFNQHMKRNHPGCGRSANRQGYRSNGSYVDGWFGGECGSGNPYYLLCGTCREKYLAMKTKSKSTSSERYKGQAPDLIGKQDSVYEEDWDMLDVDEDEKLTGEEEFELLAGPLGLNDRRIVPEPVQFPDSDPLGASVAMVTATNSMEETLMQIGCHGSVEKSSSGRITLGEQAAALANPHDRVVALRRVTAAAQVLLARTMVMRALSLLSVSGSSCSLAAGLESLGLTDIRTLVRLMCLAAAGRAGLSTSPSAMASTSERSRGGHSKANKPISCLAYLSTAVGCLASNAPSAAKLLVQLCTQNLISAATGVNLTTVDDSIQRKFLPSFLRGIAEENKLVTSPNFVVTQALVALLADKGAKLRPNYDKSEVEKKGPLELANALAACCLSSRLSSQHRQWAAQQLVRTLAAHDRDNQTTLQTLADMGGDLRKCSFIKLEAHQNRVMTCVWCNKKGLLATSGNDGTIRVWNVTKKQYSLQQTCVFNRLEGDAEESLGSPSDPSFSPVSWSISGKYLAGALEKMVNIWQVNGGKGLVDIQPHWVSALAWPEEGPATAWSGESPELLLVGRMDGSLGLIEVVDVSTMHRRELEHCYRKDVSVTCIAWFSEDRPFAVGYFDGKLLLGTKEPLEKGGIVLIDAHKDTLISMKWDPTGHILMTCAKEDSVKLWGSISGCWCCLHSLCHPSIVNGIAWCRLPGKGSKLQLLMATGCQSGLVCVWRIPQDTTQTNVTSAEGWWEQESNCQDGYRKSSGAKCVYQLRGHITPVRTVAFSSDGLALVSGGLGGLMNIWSLRDGSVLQTVVIGSGAIQTTVWIPEVGVAACSNRSKDVLVVNCTAEWAAANHVLATCRTALKQQGVLGLNMAPCMRAFLERLPMMLQEQYAYEKPHVVCGDQLVHSPYMQCLASLAVGLHLDQLLCNPPVPPHHQNCLPDPASWNPNEWAWLECFSTTIKAAEALTNGAQFPESFTVPDLEPVPEDELVFLMDNSKWINGMDEQIMSWATSRPEDWHLGGKCDVYLWGAGRHGQLAEAGRNVMVPAAAPSFSQAQQVICGQNCTFVIQANGTVLACGEGSYGRLGQGNSDDLHVLTVISALQGFVVTQLVTSCGSDGHSMALTESGEVFSWGDGDYGKLGHGNSDRQRRPRQIEALQGEEVVQMSCGFKHSAVVTSDGKLFTFGNGDYGRLGLGNTSNKKLPERVTALEGYQIGQVACGLNHTLAVSADGSMVWAFGDGDYGKLGLGNSTAKSSPQKIDVLCGIGIKKVACGTQFSVALTKDGHVYTFGQDRLIGLPEGRARNHNRPQQIPVLAGVIIEDVAVGAEHTLALASNGDVYAWGSNSEGQLGLGHTNHVREPTLVTGLQGKNVRQISAGRCHSAAWTAPPVPPRAPGVSVPLQLGLPDTVPPQYGALREVSIHTVRARLRLLYHFSDLMYSSWRLLNLSPNNQNSTSHYNAGTWGIVQGQLRPLLAPRVYTLPMVRSIGKTMVQGKNYGPQITVKRISTRGRKCKPIFVQIARQVVKLNASDLRLPSRAWKVKLVGEGADDAGGVFDDTITEMCQELETGIVDLLIPSPNATAEVGYNRDRFLFNPSACLDEHLMQFKFLGILMGVAIRTKKPLDLHLAPLVWKQLCCVPLTLEDLEEVDLLYVQTLNSILHIEDSGITEESFHEMIPLDSFVGQSADGKMVPIIPGGNSIPLTFSNRKEYVERAIEYRLHEMDRQVAAVREGMSWIVPVPLLSLLTAKQLEQMVCGMPEISVEVLKKVVRYREVDEQHQLVQWFWHTLEEFSNEERVLFMRFVSGRSRLPANTADISQRFQIMKVDRPYDSLPTSQTCFFQLRLPPYSSQLVMAERLRYAINNCRSIDMDNYMLSRNVDNAEGSDTDY

SEQ ID NO: 7157 - protein, 862 aa, Homo sapiens
MSDSGSQLGSMGSLTMKSQLQITVISAKLKENKKNWFGPSPYVEVTVDGQSKKTEKCNNTNSPKWKQPLTVIVTPVSKLHFRVWSHQTLKSDVLLGTAALDIYETLKSNNMKLEEVVVTLQLGGDKEPTETIGDLSICLDGLQLESEVVTNGETTCSESASQNDDGSRSKDETRVSTNGSDDPEDAGAGENRRVSGNNSPSLSNGGFKPSRPPRPSRPPPPTPRRPASVNGSPSATSESDGSSTGSLPPTNTNTNTSEGATSGLIIPLTISGGSGPRPLNPVTQAPLPPGWEQRVDQHGRVYYVDHVEKRTTWDRPEPLPPGWERRVDNMGRIYYVDHFTRTTTWQRPTLESVRNYEQWQLQRSQLQGAMQQFNQRFIYGNQDLFATSQSKEFDPLGPLPPGWEKRTDSNGRVYFVNHNTRITQWEDPRSQGQLNEKPLPEGWEMRFTVDGIPYFVDHNRRTTTYIDPRTGKSALDNGPQIAYVRDFKAKVQYFRFWCQQLAMPQHIKITVTRKTLFEDSFQQIMSFSPQDLRRRLWVIFPGEEGLDYGGVAREWFFLLSHEVLNPMYCLFEYAGKDNYCLQINPASYINPDHLKYFRFIGRFIAMALFHGKFIDTGFSLPFYKRILNKPVGLKDLESIDPEFYNSLIWVKENNIEECDLEMYFSVDKEILGEIKSHDLKPNGGNILVTEENKEEYIRMVAEWRLSRGVEEQTQAFFEGFNEILPQQYLQYFDAKELEVLLCGMQEIDLNDWQRHAIYRHYARTSKQIMWFWQFVKEIDNEKRMRLLQFVTGTCRLPVGGFADLMGSNGPQKFCIEKVGKENWLPRSHTCFNRLDLPPYKSYEQLKEKLLFAIEETEGFGQE

SEQ ID NO: 7158 - protein, 903 aa, Homo sapiens
MSDSGSQLGSMGSLTMKSQLQITVISAKLKENKKNWFGPSPYVEVTVDGQSKKTEKCNNTNSPKWKQPLTVIVTPVSKLHFRVWSHQTLKSDVLLGTAALDIYETLKSNNMKLEEVVVTLQLGGDKEPTETIGDLSICLDGLQLESEVVTNGETTCSENGVSLCLPRLECNSAISAHCNLCLPGLSDSPISASRVAGFTGASQNDDGSRSKDETRVSTNGSDDPEDAGAGENRRVSGNNSPSLSNGGFKPSRPPRPSRPPPPTPRRPASVNGSPSATSESDGSSTGSLPPTNTNTNTSEGATSGLIIPLTISGGSGPRPLNPVTQAPLPPGWEQRVDQHGRVYYVDHVEKRTTWDRPEPLPPGWERRVDNMGRIYYVDHFTRTTTWQRPTLESVRNYEQWQLQRSQLQGAMQQFNQRFIYGNQDLFATSQSKEFDPLGPLPPGWEKRTDSNGRVYFVNHNTRITQWEDPRSQGQLNEKPLPEGWEMRFTVDGIPYFVDHNRRTTTYIDPRTGKSALDNGPQIAYVRDFKAKVQYFRFWCQQLAMPQHIKITVTRKTLFEDSFQQIMSFSPQDLRRRLWVIFPGEEGLDYGGVAREWFFLLSHEVLNPMYCLFEYAGKDNYCLQINPASYINPDHLKYFRFIGRFIAMALFHGKFIDTGFSLPFYKRILNKPVGLKDLESIDPEFYNSLIWVKENNIEECDLEMYFSVDKEILGEIKSHDLKPNGGNILVTEENKEEYIRMVAEWRLSRGVEEQTQAFFEGFNEILPQQYLQYFDAKELEVLLCGMQEIDLNDWQRHAIYRHYARTSKQIMWFWQFVKEIDNEKRMRLLQFVTGTCRLPVGGFADLMGSNGPQKFCIEKVGKENWLPRSHTCFNRLDLPPYKSYEQLKEKLLFAIEETEGFGQE

SEQ ID NO: 7159 - protein, 1709 aa, Homo sapiens
MDADSASSSESERNITIMASGNTGGEKDGLRNSTGLGSQNKFVVGSSSNNVGHGSSTGPWGFSHGAIISTCQVSVDAPESKSESSNNRMNAWGTVSSSSNGGLNPSTLNSASNHGAWPVLENNGLALKGPVGSGSSGINIQCSTIGQMPNNQSINSKVSGGSTHGTWGSLQETCESEVSGTQKVSFSGQPQNITTEMTGPNNTTNFMTSSLPNSGSVQNNELPSSNTGAWRVSTMNHPQMQAPSGMNGTSLSHLSNGESKSGGSYGTTWGAYGSNYSGDKCSGPNGQANGDTVNATLMQPGVNGPMGTNFQVNTNKGGGVWESGAANSQSTSWGSGNGANSGGSRRGWGTPAQNTGTNLPSVEWNKLPSNQHSNDSANGNGKTFTNGWKSTEEEDQGSATSQTNEQSSVWAKTGGTVESDGSTESTGRLEEKGTGESQSRDRRKIDQHTLLQSIVNRTDLDPRVLSNSGWGQTPIKQNTAWDTETSPRGERKTDNGTEAWGSSATQTFNSGACIDKTSPNGNDTSSVSGWGDPKPALRWGDSKGSNCQGGWEDDSAATGMVKSNQWGNCKEEKAAWNDSQKNKQGWGDGQKSSQGWSVSASDNWGETSRNNHWGEANKKSSSGGSDSDRSVSGWNELGKTSSFTWGNNINPNNSSGWDESSKPTPSQGWGDPPKSNQSLGWGDSSKPVSSPDWNKQQDIVGSWGIPPATGKPPGTGWLGGPIPAPAKEEEPTGWEEPSPESIRRKMEIDDGTSAWGDPSKYNYKNVNMWNKNVPNGNSRSDQQAQVHQLLTPASAISNKEASSGSGWGEPWGEPSTPATTVDNGTSAWGKPIDSGPSWGEPIAAASSTSTWGSSSVGPQALSKSGPKSMQDGWCGDDMPLPGNRPTGWEEEEDVEIGMWNSNSSQELNSSLNWPPYTKKMSSKGLSGKKRRRERGMMKGGNKQEEAWINPFVKQFSNISFSRDSPEENVQSNKMDLSGGMLQDKRMEIDKHSLNIGDYNRTVGKGPGSRPQISKESSMERNPYFDKDGIVADESQNMQFMSSQSMKLPPSNSALPNQALGSIAGLGMQNLNSVRQNGNPSMFGVGNTAAQPRGMQQPPAQPLSSSQPNLRAQVPPPLLSPQVPVSLLKYAPNNGGLNPLFGPQQVAMLNQLSQLNQLSQISQLQRLLAQQQRAQSQRSVPSGNRPQQDQQGRPLSVQQQMMQQSRQLDPNLLVKQQTPPSQQQPLHQPAMKSFLDNVMPHTTPELQKGPSPINAFSNFPIGLNSNLNVNMDMNSIKEPQSRLRKWTTVDSISVNTSLDQNSSKHGAISSGFRLEESPFVPYDFMNSSTSPASPPGSIGDGWPRAKSPNGSSSVNWPPEFRPGEPWKGYPNIDPETDPYVTPGSVINNLSINTVREVDHLRDRNSGSSSSLNTTLPSTSAWSSIRASNYNVPLSSTAQSTSARNSDSKLTWSPGSVTNTSLAHELWKVPLPPKNITAPSRPPPGLTGQKPPLSTWDNSPLRIGGGWGNSDARYTPGSSWGESSSGRITNWLVLKNLTPQIDGSTLRTLCMQHGPLITFHLNLPHGNALVRYSSKEEVVKAQKSLHMCVLGNTTILAEFASEEEISRFFAQSQSLTPSPGWQSLGSSQSRLGSLDCSHSFSSRTDLNHWNGAGLSGTNCGDLHGTSLWGTPHYSTSLWGPPSSSDPRGISSPSPINAFLSVDHLGGGGESM

SEQ ID NO: 7160 - protein, 1963 aa, Homo sapiens
CFRELEAKATKDVERNLSRDLVQEEEQLMEEKKKKKDDKKKKEAAQKKATEQKIKVPEQIKPSVSQPQPANSNNGTSTATSTNNNAKRATANNQQPQQQQQQQQPQQQQPQQQPQPQPQQQQPQQQPQALPRYPREVPPRFRHQEHKQLLKRGQHFPVIAANLGSAVKVLNSQSESSALTNQQPQNNGEVQNSKNQSDINHSTSGSHYENSQRGPVSSTSDSSTNCKNAVVSDLSEKEAWPSAPGSDPELASECMDADSASSSESERNITIMASGNTGGEKDGLRNSTGLGSQNKFVVGSSSNNVGHGSSTGPWGFSHGAIISTCQVSVDAPESKSESSNNRMNAWGTVSSSSNGGLNPSTLNSASNHGAWPVLENNGLALKGPVGSGSSGINIQCSTIGQMPNNQSINSKVSGGSTHGTWGSLQETCESEVSGTQKVSFSGQPQNITTEMTGPNNTTNFMTSSLPNSGSVQNNELPSSNTGAWRVSTMNHPQMQAPSGMNGTSLSHLSNGESKSGGSYGTTWGAYGSNYSGDKCSGPNGQANGDTVNATLMQPGVNGPMGTNFQVNTNKGGGVWESGAANSQSTSWGSGNGANSGGSRRGWGTPAQNTGTNLPSVEWNKLPSNQHSNDSANGNGKTFTNGWKSTEEEDQGSATSQTNEQSSVWAKTGGTVESDGSTESTGRLEEKGTGESQSRDRRKIDQHTLLQSIVNRTDLDPRVLSNSGWGQTPIKQNTAWDTETSPRGERKTDNGTEAWGSSATQTFNSGACIDKTSPNGNDTSSVSGWGDPKPALRWGDSKGSNCQGGWEDDSAATGMVKSNQWGNCKEEKAAWNDSQKNKQGWGDGQKSSQGWSVSASDNWGETSRNNHWGEANKKSSSGGSDSDRSVSGWNELGKTSSFTWGNNINPNNSSGWDESSKPTPSQGWGDPPKSNQSLGWGDSSKPVSSPDWNKQQDIVGSWGIPPATGKPPGTGWLGGPIPAPAKEEEPTGWEEPSPESIRRKMEIDDGTSAWGDPSKYNYKNVNMWNKNVPNGNSRSDQQAQVHQLLTPASAISNKEASSGSGWGEPWGEPSTPATTVDNGTSAWGKPIDSGPSWGEPIAAASSTSTWGSSSVGPQALSKSGPKSMQDGWCGDDMPLPGNRPTGWEEEEDVEIGMWNSNSSQELNSSLNWPPYTKKMSSKGLSGKKRRRERGMMKGGNKQEEAWINPFVKQFSNISFSRDSPEENVQSNKMDLSGGMLQDKRMEIDKHSLNIGDYNRTVGKGPGSRPQISKESSMERNPYFDKDGIVADESQNMQFMSSQSMKLPPSNSALPNQALGSIAGLGMQNLNSVRQNGNPSMFGVGNTAAQPRGMQQPPAQPLSSSQPNLRAQVPPPLLSPQVPVSLLKYAPNNGGLNPLFGPQQVAMLNQLSQLNQLSQISQLQRLLAQQQRAQSQRSVPSGNRPQQDQQGRPLSVQQQMMQQSRQLDPNLLVKQQTPPSQQQPLHQPAMKSFLDNVMPHTTPELQKGPSPINAFSNFPIGLNSNLNVNMDMNSIKEPQSRLRKWTTVDSISVNTSLDQNSSKHGAISSGFRLEESPFVPYDFMNSSTSPASPPGSIGDGWPRAKSPNGSSSVNWPPEFRPGEPWKGYPNIDPETDPYVTPGSVINNLSINTVREVDHLRDRNSGSSSSLNTTLPSTSAWSSIRASNYNVPLSSTAQSTSARNSDSKLTWSPGSVTNTSLAHELWKVPLPPKNITAPSRPPPGLTGQKPPLSTWDNSPLRIGGGWGNSDARYTPGSSWGESSSGRITNWLVLKNLTPQIDGSTLRTLCMQHGPLITFHLNLPHGNALVRYSSKEEVVKAQKSLHMCVLGNTTILAEFASEEEISRFFAQSQSLTPSPGWQSLGSSQSRLGSLDCSHSFSSRTDLNHWNGAGLSGTNCGDLHGTSLWGTPHYSTSLWGPPSSSDPRGISSPSPINAFLSVDHLGGGGESM

SEQ ID NO: 7161 - protein, 451 aa, Homo sapiens
MPREIITLQLGQCGNQIGFEFWKQLCAEHGISPEGIVEEFATEGTDRKDVFFYQADDEHYIPRAVLLDLEPRVIHSILNSPYAKLYNPENIYLSEHGGGAGNNWASGFSQGEKIHEDIFDIIDREADGSDSLEGFVLCHSIAGGTGSGLGSYLLERLNDRYPKKLVQTYSVFPNQDEMSDVVVQPYNSLLTLKRLTQNADCVVVLDNTALNRIATDRLHIQNPSFSQINQLVSTIMSASTTTLRYPGYMNNDLIGLIASLIPTPRLHFLMTGYTPLTTDQSVASVRKTTVLDVMRRLLQPKNVMVSTGRDRQTNHCYIAILNIIQGEVDPTQVHKSLQRIRERKLANFIPWGPASIQVALSRKSPYLPSAHRVSGLMMANHTSISSLFERTCRQYDKLRKREAFLEQFRKEDMFKDNFDEMDTSREIVQQLIDEYHAATRPDYISWGTQEQ

SEQ ID NO: 7162 - protein, 219 aa, Homo sapiens
MDSGTRPVGSCCSSPAGLSREYKLVMLGAGGVGKSAMTMQFISHRFPEDHDPTIEDAYKIRIRIDDEPANLDILDTAGQAEFTAMRDQYMRAGEGFIICYSITDRRSFHEVREFKQLIYRVRRTDDTPVVLVGNKSDLKQLRQVTKEEGLALAREFSCPFFETSAAYRYYIDDVFHALVREIRRKEKEAVLAMEKKSKPKNSVWKRLKSPFRKKKDSVT

SEQ ID NO: 7163 - protein, 521 aa, Homo sapiens
MADNEKLDNQRLKNFKNKGRDLETMRRQRNEVVVELRKNKRDEHLLKRRNVPHEDICEDSDIDGDYRVQNTSLEAIVQNASSDNQGIQLSAVQAARKLLSSDRNPPIDDLIKSGILPILVHCLERDDNPSLQFEAAWALTNIASGTSEQTQAVVQSNAVPLFLRLLHSPHQNVCEQAVWALGNIIGDGPQCRDYVISLGVVKPLLSFISPSIPITFLRNVTWVMVNLCRHKDPPPPMETIQEILPALCVLIHHTDVNILVDTVWALSYLTDAGNEQIQMVIDSGIVPHLVPLLSHQEVKVQTAALRAVGNIVTGTDEQTQVVLNCDALSHFPALLTHPKEKINKEAVWFLSNITAGNQQQVQAVIDANLVPMIIHLLDKGDFGTQKEAAWAISNLTISGRKDQVAYLIQQNVIPPFCNLLTVKDAQVVQVVLDGLSNILKMAEDEAETIGNLIEECGGLEKIEQLQNHENEDIYKLAYEIIDQFFSSDDIDEDPSLVPEAIQGGTFGFNSSANVPTEGFQF

SEQ ID NO: 7164 - protein, 529 aa, Homo sapiens
MSSTVSYWILNSTRNSIATLQGGRRLYSRYVSNRNKLKWRLFSRVPPTLNSSPCGGFTLCKAYRHTSTEEDDFHLQLSPEQINEVLRAGETTHKILDLESRVPNSVLRFESNQLAANSPVEDRRGVASCLQTNGLMFGIFDGHGGHACAQAVSERLFYYVAVSLMSHQTLEHMEGAMESMKPLLPILHWLKHPGDSIYKDVTSVHLDHLRVYWQELLDLHMEMGLSIEEALMYSFQRLDSDISLEIQAPLEDEVTRNLSLQVAFSGATACMAHVDGIHLHVANAGDCRAILGVQEDNGMWSCLPLTRDHNAWNQAELSRLKREHPESEDRTIIMEDRLLGVLIPCRAFGDVQLKWSKELQRSILERGFNTEALNIYQFTPPHYYTPPYLTAEPEVTYHRLRPQDKFLVLASDGLWDMLSNEDVVRLVVGHLAEADWHKTDLAQRPANLGLMQSLLLQRKASGLHEADQNAATRLIRHAIGNNEYGEMEAERLAAMLTLPEDLARMYRDDITVTVVYFNSESIGAYYKGG

SEQ ID NO: 7165 - protein, 523 aa, Homo sapiens
MAAVGRVGSFGSSPPGLSSTYTGGPLGNEIASGNGGAAAGDDEDGQNLWSCILSEVSTRSRSKLPAGKNVLLLGEDGAGKTSLIRKIQGIEEYKKGRGLEYLYLNVHDEDRDDQTRCNVWILDGDLYHKGLLKFSLDAVSLKDTLVMLVVDMSKPWTALDSLQKWASVVREHVDKLKIPPEEMKQMEQKLIRDFQEYVEPGEDFPASPQRRNTASQEDKDDSVVVPLGADTLTHNLGIPVLVVCTKCDAISVLEKEHDYRDEHFDFFQSHIRKFCLRYGAALIYTSVKENKNIDLVYKYIVQKLYGFPYKIPAVVVEKDAVFIPAGWDNDKKIGILHENFQTLKAEDNFEDIITKPPVRKFVHEKEIMAEDDQVFLMKLQSLLAKQPPTAAGRPVDASPRVPGGSPRTPNRSVSSNVASVSPIPAGSKKIDPNMKAGATSEGVLANFFNSLLSKKTGSPGGPGVSGGSPAGGAGGGSSGLPPSTKKSGQKPVLDVHAELDRITRKPVTVSPTTPTSPTEGEAS

SEQ ID NO: 7166 - protein, 2712 aa, Homo sapiens
MAASERLYELWLLYYAQKDLGYLQQWLKAFVGAFKKSISLSSLEPRRPEEAGAEVPLLPLDELHVLAEQLHQADLEQALLLLKLFIILCRNLENIEAGRGQVLVPRVLALLTKLVAELKGCPPPQGRGTQLENVALHALLLCEGLFDPYQTWRRQRSGEVISSKEKSKYKFPPAALPQEFSAFFQGTTWWWLHAGLGEPKTKQEFRDRDKRRHLGLERGPPISLHASPPIPETQEVSPPPVPWLLEDLVPRTAVAACSQPCNLGDITLPTPPYPESLQNADHLPPILLLRLIHLFCAVLAGGKENGQMAVSDGSVKGLLSVVRGWSRGPAPDPCLVPLALEALVGAVHVLHASRAPPRGPELRALLESYFHVLNADWPAGLSSGPEEALVTLRVSMLDAIPMMLACEDRPVLQATFLSNNCFEHLTRLIQNSKLYLQSRAPPEGDSDLATRLLTEPDVQKVLDQDTDAIAVHVVRVLTCIMSDSPSAKEVFKERIGYPHLQEVLQSHGPPTHRLLQELLNMAVEGDHSMCPPPPIRNEQPVLVLAQWLPSLPTAELRLFLAQRLRWLCDSCPASRATCVQAGLVGCLLETLSTGLALEARCQEQLLALLQALGRVSIRPMELRHLLRPRPGLDSEPGGAEAGKARHAGAVIRTLSGMARHQGPARALRYFDLTPSMAGIMVPPVQRWPGPGFTFHAWLCLHPMDTAPTPAPTRPLQRKQLYSFFTSSGSGFEAFFTAAGTLVVAVCTRKEYLTMSLPEVSFADSAWHCVAIVHVPGRRPFSQNLVHVYKDGHLVKTAPLRCPSLSEPFSSCCIGSAGYRTTTTTTGLPTPPVPATLAYTHPALTRSQSVPASTGLGWGSGLVAPLQEGSIDSTLAGTQDTRWGSPTSLEGELGAVAIFHEALQATALRTLCTLGPNETAPFKPEGELHELSTRLLLHYSPQACKNNICLDLSPSHGLDGRLTGHRVETWDVKDVVNCVGGMGALLPLLERVAAQPKEAEAGPAETHDLVGPELTSGHNTQGLVLPLGKSSEERMERNAVAAFLLMLRNFLQGHMVNQESLVQCQGPAIIGALLRKVPSWAMDMNVLMSAQLLMEQVAAEGSGPLLYLLYQHLLFNFHLWTLSDFAVRLGHIQYMSSIVREHRQKLRKKYGVQFILDALRTHYSPQRERPLAADDLRTVQTSLLGLAREFLVRSLSADDVQVTQTMLSFLAATGDDGQAVGALDLLLALLHGSLVQESLAVFLLEPGNLEVLLALLVRPGSLPLLPDRVCKILRRLQQNERLPERSRQRLRLRECGLQGLVACLPEGTVSPQLCQGLYKLFLGAGSGNTAGGGGSSGTLTPASQPGTPSPLDGPRPFPAAPGRHSSSLSNVLEDGSLPEPTISGDDTSNTSNPQQTSEEELCNLLTNVLFSVTWRGVEGSDEAAWRERGQVFSVLTQLGASATLVRPPDCIKRSLLEMMLESALTDIKEAPVGVLASLTQQALWLLRLLQDFLCAEGHGNQELWSEKLFEGVCSLLDRLGAWPHLANGTADLREMAQIGLRLVLGYILLEDPQLHAQAYVRLHMLLQTAVPARREEACYVLSKLEAALGRVLNTSSLESATDEAGSPLAAAAAAAAAERCSWLVPLVRTLLDRAYEPLGLQWGLPSLPPTNGSPTFFEDFQAFCATPEWRHFIDKQVQPTMSQFEMDTYAKSHDLMSGFWNACYDMLMSSGQRRQWERAQSRRAFQELVLEPAQRRARLEGLRYTAVLKQQATQHSMALLHWGALWRQLASPCGAWALRDTPIPRWKLSSAETYSRMRLKLVPNHHFDPHLEASALRDNLGEVPLTPTEEASLPLAVTKEAKVSTPPELLQEDQLGEDELAELETPMEAAELDEQREKLVLSAECQLVTVVAVVPGLLEVTTQNVYFYDGSTERVETEEGIGYDFRRPLAQLREVHLRRFNLRRSALELFFIDQANYFLNFPCKVGTTPVSSPSQTPRPQPGPIPPHTQVRNQVYSWLLRLRPPSQGYLSSRSPQEMLRASGLTQKWVQREISNFEYLMQLNTIAGRTYNDLSQYPVFPWVLQDYVSPTLDLSNPAVFRDLSKPIGVVNPKHAQLVREKYESFEDPAGTIDKFHYGTHYSNAAGVMHYLIRVEPFTSLHVQLQSGRFDCSDRQFHSVAAAWQARLESPADVKELIPEFFYFPDFLENQNGFDLGCLQLTNEKVGDVVLPPWASSPEDFIQQHRQALESEYVSAHLHEWIDLIFGYKQRGPAAEEALNVFYYCTYEGAVDLDHVTDERERKALEGIISNFGQTPCQLLKEPHPTRLSAEEAAHRLARLDTNSPSIFQHLDELKAFFAEVVSDGVPLVLALVPHRQPHSFITQGSPDLLVTVSASGLLGTHSWLPYDRNISNYFSFSKDPTMGSHKTQRLLSGPWVPGSGVSGQALAVAPDGKLLFSGGHWDGSLRVTALPRGKLLSQLSCHLDVVTCLALDTCGIYLISGSRDTTCMVWRLLHQGGLSVGLAPKPVQVLYGHGAAVSCVAISTELDMAVSGSEDGTVIIHTVRRGQFVAALRPLGATFPGPIFHLALGSEGQIVVQSSAWERPGAQVTYSLHLYSVNGKLRASLPLAEQPTALTVTEDFVLLGTAQCALHILQLNTLLPAAPPLPMKVAIRSVAVTKERSHVLVGLEDGKLIVVVAGQPSEVRSSQFARKLWRSSRRISQVSSGETEYNPTEAR

SEQ ID NO: 7167 - protein, 363 aa, Homo sapiens
MQAFLKGTSISTKPPLTKDRGVAASAGSSGENKKAKPVPWVEKYRPKCVDEVAFQEEVVAVLKKSLEGADLPNLLFYGPPGTGKTSTILAAARELFGPELFRLRVLELNASDERGIQVVREKVKNFAQLTVSGSRSDGKPCPPFKIVILDEADSMTSAAQAALRRTMEKESKTTRFCLICNYVSRIIEPLTSRCSKFRFKPLSDKIQQQRLLDIAKKENVKISDEGIAYLVKVSEGDLRKAITFLQSATRLTGGKEITEKVITDIAGVIPAEKIDGVFAACQSGSFDKLEAVVKDLIDEGHAATQLVNQLHDVVVENNLSDKQKSIITEKLAEVDKCLADGADEHLQLISLCATVMQQLSQNC

SEQ ID NO: 7168 - protein, 919 aa, Homo sapiens
MGTTAPGPIHLLELCDQKLMEFLCNMDNKDLVWLEEIQEEAERMFTREFSKEPELMPKTPSQKNRRKKRRISYVQDENRDPIRRRLSRRKSRSSQLSSRRLRSKDSVEKLATVVGENGSVLRRVTRAAAAAAAATMALAAPSSPTPESPTMLTKKPEDNHTQCQLVPVVEIGISERQNAEQHVTQLMSTEPLPRTLSPTPASATAPTSQGIPTSDEESTPKKSKARILESITVSSLMATPQDPKGQGVGTGRSASKLRIAQVSPGPRDSPAFPDSPWRERVLAPILPDNFSTPTGSRTDSQSVRHSPIAPSSPSPQVLAQKYSLVAKQESVVRRASRRLAKKTAEEPAASGRIICHSYLERLLNVEVPQKVGSEQKEPPEEAEPVAAAEPEVPENNGNNSWPHNDTEIANSTPNPKPAASSPETPSAGQQEAKTDQADGPREPPQSARRKRSYKQAVSELDEEQHLEDEELQPPRSKTPSSPCPASKVVRPLRTFLHTVQRNQMLMTPTSAPRSVMKSFIKRNTPLRMDPKEKERQRLENLRRKEEAEQLRRQKVEEDKRRRLEEVKLKREERLRKVLQARERVEQMKEEKKKQIEQKFAQIDEKTEKAKEERLAEEKAKKKAAAKKMEEVEARRKQEEDARRLRWLQQEEEERRHQELLQKKKEEEQERLRKAAEAKRLAEQREQERREQERREQERREQERREQERREQERREQERQLAEQERRREQERLQAERELQEREKALRLQKEQLQRELEEKKKKEEQQRLAERQLQEEQEKKAKEAAGASKALNVTVDVQSPACTSSPITPQGHKAPPQINPHNYGMDLNSDDSTDDEAHPRKPIPTWARGTPLSQAIIHQYYQPPNLLELFGTILPLDLEDIFKKSKPRYHKRTSSAVWNSPPLQGARVPSSLAYSLKKH

SEQ ID NO: 7169 - protein, 159 aa, Homo sapiens
MSLITCKFKNLGNLHAGGCGYIPLSSTREERVKNGSRVVSTALLSSYHKGIAFVIFPSHHHTPTRPPSPKPSGSGGYLLNLRRRDPPQAFLSGCPPLPPRGSVLLGCTPPRTQFFVFHVVSYPLVLQKLLQTRDQKSIGSNSSCDTSEMSDCWQVTLSI

SEQ ID NO: 7170 - protein, 543 aa, Homo sapiens
MASPDRSKRKILKAKKTMPLSCRKQVEMLNKSRNVEALKTAIGSNVPSGNQSFSPSVITRTTEITKCSPSENGASSLDSNKNSISEKSKVFSQNCIKPVEEIVHSETKLEQVVCSYQKPSRTTESPSRVFTEEAKDSLNTSENDSEHQTNVTRSLFEHEGACSLKSSCCPPSVLSGVVQMPESTVTSTVGDKKTDQMVFHLETNSNSESHDKRQSDNILCSEDSGFVPVEKTPNLVNSVTSNNCADDILKTDECSRTSISNCESADSTWQSSLDTNNNSHYQKKRMFSENEENVKRMKTSEQINENICVSLERQTAFLEQVRHLIQQEIYSINYELFDKKLKELNQRIGKTECRNKHEGIADKLLAKIAKLQRRIKTVLLFQRNCLKPNMLSSNGASKVANSEAMILDKNLESVNSPIEKSSVNYEPSNPSEKGSKKINLSSDQNKSVSESNNDDVMLISVESPNLTTPITSNPTDTRKITSGNSSNSPNAEVMKVQYPPWSHIRKLLQTQRKQPHWHKMQSRFLSPLSTCHLSQNHQHHYLN

SEQ ID NO: 7171 - protein, 1514 aa, Homo sapiens
YRIIGGNSQFTINPSTGQIITSALLDRETKDNYTLVVVCSDAGSPEPLSSSTSVLVTVTDVNDNPPRFQHHPYVTHIPSPTLPGSFVFAVTVTDADIGPNSELHYSLSGRNSEKFHIDPLRGAIMAAGPLNGASEVTFSVHVKDGGSFPKTDSTTVTVRFVNKADFPKVRAKEQTFMFPENQPVSSLVTTITGSSLRGEPMSYYIASGNLGNTFQIDQLTGQVSISQPLDFEKIQKYVVWIEARDGGFPPFSSYEKLDITVLDVNDNAPIFKEDPFISEILENLSPRKILTVSAMDKDSGPNGQLDYEIVNGNMENSFSINHATGEIRSVRPLDREKVSHYVLTIKSSDKGSPSQSTSVKVMINILDENDNAPRFSQIFSAHVPENSPLGYTVTRVTTSDEDIGINAISRYSIMDASLPFTINPSTGDIVISRPLNREDTDRYRIRVSAHDSGWTVSTDVTIFVTDINDNAPRFSRTSYYLDCPELTEIGSKVTQVFATDPDEGSNGQVFYFIKSQSEYFRINATTGEIFNKQILKYQNVTGFSNVNINRHSFIVTSSDRGKPSLISETTVTINIVDSNDNAPQFLKSKYFTPVTKNVKVGTKLIRVTAIDDKDFGLNSEVEYFISNDNHLGKFKLDNDTGWISVASSLISDLNQNFFITVTAKDKGNPPLSSQATVHITVTEENYHTPEFSQSHMSATIPESHSIGSIVRTVSARDRDAAMNGLIKYSISSGNEEGIFAINSSTGILTLAKALDYELCQKHEMTISAIDGGWVARTGYCSVTVNVIDVNDNSPVFLSDDYFPTVLENAPSGTTVIHLNATDADSGTNAVIAYTVQSSDSDLFVIDPNTGVITTQGFLDFETKQSYHLTVKAFNVPDEERCSFATVNIQLKGTNEYVPRFVSKLYYFEISEAAPKGTIVGEVFASDRDLGTDGEVHYLIFGNSRKKGFQINKKTGQIYVSGILDREKEERVSLKVLAKNFGSIRGADIDEVTVNVTVLDANDPPIFTLNIYSVQISEGVPIGTHVTFVSAFDSDSIPSWSRFSYFIGSGNENGAFSINPQTGQITVTAELDRETLPIYNLSVLAVDSGTPSATGSASLLVTLEDINDNGPMLTVSEGEVMENKRPGTLVMTLQSTDPDLPPNQGPFTYYLLSTGPATSYFSLSTAGVLSTTREIDREQIADFYLSVVTKDSGVPQMSSTGTVHITVIDQNDNPSQSRTVEIFVNYYGNLFPGGILGSVKPQDPDVLDSFHCSLTSGVTSLFSIPGGTCDLNSQPRSTDGTFDLTVLSNDGVHSTVTSNIRVFFAGFSNATVDNSILLRLGVPTVKDFLTNHYLHFLRIASSQLTGLGTAVQLYSAYEENNRTFLLAAVKRNHNQYVNPSGVATFFESIKEILLRQSGVKVESVDHDSCVHGPCQNGGSCLRRLAVSSVLKSRESLPVIIVANEPLQPFLCKCLPGYAGSWCEIDIDECLPSPCHSGGTCHNLVGGFSCSCPDGFTGRACERDINECLQSPCKNG

SEQ ID NO: 7172 - protein, 1178 aa, Homo sapiens
PLSSSTSVLVTVTDVNDNPPRFQHHPYVTHIPSPTLPGSFVFAVTVTDADIGPNSELHYSLSGRNSEKFHIDPLRGAIMAAGPLNGASEVTFSVHVKDGGSFPKTDSTTVTVRFVNKADFPKVRAKEQTFMFPENQPVSSLVTTITGSSLRGEPMSYYIASGNLGNTFQIDQLTGQVSISQPLDFEKIQKYVVWIEARDGGFPPFSSYEKLDITVLDVNDNAPIFKEDPFISEILENLSPRKILTVSAMDKDSGPNGQLDYEIVNGNMENSFSINHATGEIRSVRPLDREKVSHYVLTIKSSDKGSPSQSTSVKVMINILDENDNAPRFSQIFSAHVPENSPLGYTVTRVTTSDEDIGINAISRYSIMDASLPFTINPSTGDIVISRPLNREDTDRYRIRVSAHDSGWTVSTDVTIFVTDINDNAPRFSRTSYYLDCPELTEIGSKVTQVFATDPDEGSNGQVFYFIKSQSEYFRINATTGEIFNKQILKYQNVTGFSNVNINRHSFIVTSSDRGKPSLISETTVTINIVDSNDNAPQFLKSKYFTPVTKNVKVGTKLIRVTAIDDKDFGLNSEVEYFISNDNHLGKFKLDNDTGWISVASSLISDLNQNFFITVTAKDKGNPPLSSQATVHITVTEENYHTPEFSQSHMSATIPESHSIGSIVRTVSARDRDAAMNGLIKYSISSGNEEGIFAINSSTGILTLAKALDYELCQKHEMTISAIDGGWVARTGYCSVTVNVIDVNDNSPVFLSDDYFPTVLENAPSGTTVIHLNATDADSGTNAVIAFSYFIGSGNENGAFSINPQTGQITVTAELDRETLPIYNLSVLAVDSGTPSATGSASLLVTLEDINDNGPMLTVSEGEVMENKRPGTLVMTLQSTDPDLPPNQGPFTYYLLSTGPATSYFSLSTAGVLSTTREIDREQIADFYLSVVTKDSGVPQMSSTGTVHITVIDQNDNPSQSRTVEIFVNYYGNLFPGGILGSVKPQDPDVLDSFHCSLTSGVTSLFSIPGGTCDLNSQPRSTDGTFDLTVLSNDGVHSTVTSNIRVFFAGFSNATVDNSILLRLGVPTVKDFLTNHYLHFLRIASSQLTGLGTAVQLYSAYEENNRTFLLAAVKRNHNQYVNPSGVATFFESIKEILLRQSGVKVESVDHDSCVHGPCQNGGSCLRRLAVSSVLKSRE

SEQ ID NO: 7173 - protein, 995 aa, Homo sapiens
MKHFCSSSVSEDLGCRRGDFSRKHYGSVELLISSDADGAIQRAGRFRVENGSSDENATALPGTWRRTDVHLENPEYHTRWYFKYFLGQVRQNYIGNDAEKSPFFLSVTLSDQNNQRVPQYRAILWRKTGTQKICLPYSPTKTLSVKSILSAMNLDKFEKGPREIFHPEIQKDLLVLEEQEGSVNFKFGVLFAKDGQLTDDEMFSNEIGSEPFQKFLNLLGDTITLKGWTGYRGGLDTKNDTTGIHSVYTVYQGHEIMFHVSTMLPYSKENKQQVERKRHIGNDIVTIVFQEGEESSPAFKPSMIRSHFTHIFALVRYNQQNDNYRLKIFSEESVPLFGPPLPTPPVFTDHQEFRDFLLVKLINGEKATLETPTFAQKRRRTLDMLIRSLHQDLMPDLHKNMLNRRSFSDVLPESPKSARKKEEARQAEFVRIGQALKLKSIVRGDAPSSLAASGICKKEPWEPQCFCSNFPHEAVCADPWGQALLVSTDAGVLLVDDDLPSVPVFDRTLPVKQMHVLETLDLLVLRADKGKDARLFVFRLSALQKGLEGKQAGKSRSDCRENKLEKTKGCHLYAINTHHSRELRIVVAIRNKLLLITRKHNKPSGVTSTSLLSPLSESPVEEFQYIREICLSDSPMVMTLVDGPAEESDNLICVAYRHQFDVVNESTGEAFRLHHVEANRVNFVAAIDVYEDGEAGLLLCYNYSCIYKKVCPFNGGSFLVQPSASDFQFCWNQAPYAIVCAFPYLLAFTTDSMEIRLVVNGNLVHTAVVPQLQLVASRSDIYFTATAAVNEVSSGGSSKGASARNSPQTPPGRDTPVFPSSLGEGEIQSKNLYKIPLRNLVGRSIERPLKSPLVSKVITPPTPISVGLAAIPVTHSLSLSRMEIKEIASRTRRELLGLSDEGGPKSEGAPKAKSKPRKRLEESQGGPKPGAVRSSSSDRIPSGSLESASTSEANPEGHSASSDQDPVADREGSPVSGSSPFQLTAFSDEDIIDLK

SEQ ID NO: 7174 - protein, 423 aa, Homo sapiens
MVVDFCRRFVARSLCIILMKHFCSSSVSEDLGCRRGDFSRKHYGSVELLISSDADGAIQRAGRFRVENGSSDENATALPGTWRRTDVHLENPEYHTRWYFKYFLGQVHQNYIGNDAEKSPFFLSVTLSDQNNQRVPQYRAILWRKTGTQKICLPYSPTKTLSVKSILSAKDGQLTDDEMFSNEIGSEPFQKFLNLLGDTITLKGWTGYRGGLDTKNDTTGIHSVYTVYQGHEIMFHVSTMLPYSKENKQQVERKRHIGNDIVTIVFQEGEESSPAFKPSMIRSHFTHIFALVRYNQQNDNYRLKIFSEESVPLFGPPLPTPPVFTDHQEFRDFLLVKLINGEKATLETPTFAQKRRRTLDMLIRSLHQDLMPDLHKNMLNRRSFSDVLPESPKSARKKEEARQAEFVRIGQVGFLLKPFLRDM

SEQ ID NO: 7175 - protein, 69 aa, Homo sapiens [sequence omitted]

SEQ ID NO: 7176 - protein, 238 aa, Homo sapiens
MKKFLYIKSVFHTLRMAQRRHKRVRTWTRHINIFNKDYIFVPVNESSHWYLAVICFPWLEEAVYEDFPQTVSQQSQAQQSQNDNKTIDNDLRTTSTLSLSAEDSQSTESNMSVPKKMCKRPCILILDSLKAASVQNTVQNLREYLEVEWEVKLKTHRQFSKTNMVDLCPKVPKQDNSSDCGVYLLQYVESFFKDPIVNFELPIHLEKWFPRHVIKTKREDIRELILKLHLQQQKGSSS

SEQ ID NO: 7177 - protein, 984 aa, Homo sapiens
MDKRKLGRRPSSSEIITEGKRKKSSSDLSEIRKMLNAKPEDVHVQSPLSKFRSSERWTLPLQWERSLRNKVISLDHKNKKHIRGCPVTSRSSPERIPRVILTNVLGTELGRKYIRTPPVTEGSLSDTDNLQSEQLSSSSDGSLESYQNLNPHKSCYLSERGSQRSKTVDDNSAKQTAHNKEKRRKDDGISLLISDTQPEDLNSGSRGCDHLEQESRNKDVKYSDSKVELTLISRKTKRRLRNNLPDSQYCTSLDKSTEQTKKQEDDSTISTEFERPSENYHQDPKLPEEITTKPTKSDFTKLSSLNSQELTLSNATKSASAGSTTETVEYSNSIDIVGISSLVEKDENELNTIEKPILRGHNEGNQSLISAEPIVVSSDEEGPVEHKSSEILKLQSKQDRETTNENESTSESALLELPLITCESVQMSSELCPYNPVMENISSIMPSNEMDLQLDFIFTSVYIGKIKGASKGCVTITKKYIKIPFQVSLNEISLLVDTTHLKRFGLWKSKDDNHSKRSHAILFFWVSSDYLQEIQTQLEHSVLSQQSKSSEFIFLELHNPVSQREELKLKDIMTEISIISGELELSYPLSWVQAFPLFQNLSSKESSFIHYYCVSTCSFPAGVAVAEEMKLKSVSQPSNTDAAKPTYTFLQKQSSGCYSLSITSNPDEEWREVRHTGLVQKLIVYPPPPTKGGLGVTNEDLECLEEGEFLNDVIIDFYLKYLILEKASDELVERSHIFSSFFYKCLTRKENNLTEDNPNLSMAQRRHKRVRTWTRHINIFNKDYIFVPVNESSHWYLAVICFPWLEEAVYEDFPQTVSQQSQAQQSQNDNKTIDNDLRTTSTLSLSAEDSQSTESNMSVPKKMCKRPCILILDSLKAASVQNTVQNLREYLEVEWEVKLKTHRQFSKTNMVDLCPKVPKQDNSSDCGVYLLQYVESFFKDPIVNFELPIHLEKWFPRHVIKTKREDIRELILKLHLQQQKGSSS

SEQ ID NO: 7178 - protein, 886 aa, Homo sapiens
MLNAKPEDVHVQSPLSKFRSSERWTLPLQWERSLRNKVISLDHKNKKHIRGCPVTSKSSPERGSQRSKTVDDNSAKQTAHNKEKRRKDDGISLLISDTQPEDLNSGSRGCDHLEQESRNKDVKYSDSKVELTLISRKTKRRLRNNLPDSQYCTSLDKSTEQTKKQEDDSTISTEFEKPSENYHQDPKLPEEITTKPTKSDFTKLSSLNSQELTLSNATKSASAGSTTETVENSNSIDIVGISSLVEKDENELNTIEKPILRGHNEGNQSLISAEPIVVSSDEEGPVEHKSSEILKLQSKQDRETTNENESTSESALLELPLITCESVQMSSELCPYNPVMENISSIMPSNEMDLQLDFIFTSVYIGKIKGASKGCVTITKKYIKIPFQVSLNEISLLVDTTHLKRFGLWKSKDDNHSKRSHAILFFWVSSDYLQEIQTQLEHSVLSQQSKSSEFIFLELHNPVSQREELKLKDIMTEISIISGELELSYPLSWVQAFPLFQNLSSKESSFIHYYCVSTCSFPAGVAVAEEMKLKSVSQPSNTDAAKPTYTFLQKQSSGCYSLSITSNPDEEWREVRHTGLVQKLIVYPPPPTKGGLGVTNEDLECLEEGEFLNDVIIDFYLKYLILEKASDELVERSHIFSSFFYKCLTRKENNLTEDNPNLSMAQRRHKRVRTWTRHINIFNKDYIFVPVNESSHWYLAVICFPWLEEAVYEDFPQTVSQQSQAQQSQNDNKTIDNDLRTTSTLSLSAEDSQSTESNMSVPKKMCKRPCILILDSLKAASVQNTVQNLREYLEVEWEVKLKTHRQFSKTNMVDLCPKVPKQDNSSDCGVYLLQYVESFFKDPIVNFELPIHLEKWFPRHVIKTKREDIRELILKLHLQQQKGSSS

SEQ ID NO: 7179 - protein, 1017 aa, Homo sapiens
MLNAKPEDVHVQSPLSKFRSSERWTLPLQWERSLRNKVISLDHKNKKHIRGCPVTSRSSPERQLKVMLTNVLWTDLGRKFRKTLPRNDANLCDANKVQSDSLPSTSVDSLETCQKLEPLRQSLNLSERIPRVILTNVLGTELGRKYIRTPPVTEGSLSDTDNLQSEQLSSSSDGSLESYQNLNPHKSCYLSERGSQRSKTVDDNSAKQTAHNKEKRRKDDGISLLISDTQPEDLNSGSRGCDHLEQESRNKDVKYSDSKVELTLISRKTKRRLRNNLPDSQYCTSLDKSTEQTKKQEDDSTISTEFERPSENYHQDPKLPEEITTKPTKSDFTKLSSLNSQELTLSNATKSASAGSTTETVEYSNSIDIVGISSLVEKDENELNTIEKPILRGHNEGNQSLISAEPIVVSSDEEGPVEHKSSEILKLQSKQDRETTNENESTSESALLELPLITCESVQMSSELCPYNPVMENISSIMPSNEMDLQLDFIFTSVYIGKIKGASKGCVTITKKYIKIPFQVSLNEISLLVDTTHLKRFGLWKSKDDNHSKRSHAILFFWVSSDYLQEIQTQLEHSVLSQQSKSSEFIFLELHNPVSQREELKLKDIMTEISIISGELELSYPLSWVQAFPLFQNLSSKESSFIHYYCVSTCSFPAGVAVAEEMKLKSVSQPSNTDAAKPTYTFLQKQSSGCYSLSITSNPDEEWREVRHTGLVQKLIVYPPPPTKGGLGVTNEDLECLEEGEFLNDVIIDFYLKYLILEKASDELVERSHIFSSFFYKCLTRKENNLTEDNPNLSMAQRRHKRVRTWTRHINIFNKDYIFVPVNESSHWYLAVICFPWLEEAVYEDFPQTVSQQSQAQQSQNDNKTIDNDLRTTSTLSLSAEDSQSTESNMSVPKKMCKRPCILILDSLKAASVQNTVQNLREYLEVEWEVKLKTHRQFSKTNMVDLCPKVPKQDNSSDCGVYLLQYVESFFKDPIVNFELPIHLEKWFPRHVIKTKREDIRELILKLHLQQQKGSSS

SEQ ID NO: 7180 - protein, 572 aa, Homo sapiens
MSYQGKKNIPRITSDRLLIKGGKIVNDDQSFYADIYMEDGLIKQIGENLIVPGGVKTIEAHSRMVIPGGIDVHTRFQMPDQGMTSADDFFQGTKAALAGGTTMIIDHVVPEPGTSLLAAFDQWREWADSKSCCDYSLHVDISEWHKGIQEEMEALVKDHGVNSFLVYMAFKDRFQLTDCQIYEVLSVIRDIGAIAQVHAENGDIIAEEQQRILDLGITGPEGHVLSRPEEVEAEAVNRAITIANQTNCPLYITKVMSKSSAEVIAQARKKGTVVYGEPITASLGTDGSHYWSKNWAKAAAFVTSPPLSPDPTTPDFLNSLLSCGDLQVTGSAHCTFNTAQKAVGKDNFTLIPEGTNGTEERMSVIWDKAVVTGKMDENQFVAVTSTNAAKVFNLYPRKGRIAVGSDADLVIWDPDSVKTISAKTHNSSLEYNIFEGMECRGSPLVVISQGKIVLEDGTLHVTEGSGRYIPRKPFPDFVYKRIKARSRLAELRGVPRGLYDGPVCEVSVTPKTVTPASSAKTSPAKQQAPPVRNLHQSGFSLSGAQIDDNIPRRTTQRIVAPPGGRANITSLG

SEQ ID NO: 7181 - protein, 636 aa, Homo sapiens
ASFGVRPGCCSGDQLVSLGGRCFPRPPGAMIQNVGNHLRRGLASVFSNRTSRKSALRAGNDSAMADGEGYRNPTEVQMSQLVLPCHTNQRGELSVGQLLKWIDTTACLSAERHAGCPCVTASMDDIYFEHTISVGQVVNIKAKVNRAFNSSMEVGIQVASEDLCSEKQWNVCKALATFVARREITKVKLKQITPRTEEEKMEHSVAAERRRMRLVYADTIKDLLANCAIQGDLESRDCSRMVPAEKTRVESVELVLPPHANHQGNTFGGQIMAWMENVATIAASRLCRAHPTLKAIEMFHFRGPSQVGDRLVLKAIVNNAFKHSMEVGVCVEAYRQEAETHRRHINSAFMTFVVLDADDQPQLLPWIRPQPGDGERRYREASARKKIRLDRKYIVSCKQTEVPLSVPWDPSNQVYLSYNNVSSLKMLVAKDNWVLSSEISQVRLYTLEDDKFLSFHMEMVVHVDAAQAFLLLSDLRQRPEWDKHYRSVELVQQVDEDDAIYHVTSPALGGHTKPQDFVILASRRKPCDNGDPYVIALRSVTLPTHRETPEYRRGETLCSGFCLWREGDQLTKCCWVRVSLTELVSASGFYSWGLESRSKGRRSDGWNGKLAGGHLSTLKAIPVAKINSRFGYLQDT

SEQ ID NO: 7182 - protein, 594 aa, Homo sapiens
MIQNVGNHLRRGLASVFSNRTSRKSALRAGNDSAMADGEGYRNPTEVQMSQLVLPCHTNQRGELSVGQLLKWIDTTACLSAERHAGCPCVTASMDDIYFEHTISVGQVVNIKAKVNRAFNSSMEVGIQVASEDLCSEKQWNVCKALATFVARREITKVKLKQITPRTEEEKMEHSVAAERRRMRLVYADTIKDLLANCAIQGDLESRDCSRMVPAEKTRVESVELVLPPHANHQGNTFGGQIMAWMENVATIAASRLCRAHPTLKAIEMFHFRGPSQVGDRLVLKAIVNNAFKHSMEVGVCVEAYRQEAETHRRHINSAFMTFVVLDADDQPQLLPWIRPQPGDGERRYREASARKKIRLDRKYIVSCKQTEVPLSVPWDPSNQVYLSYNNVSSLKMLVAKDNWVLSSEISQVRLYTLEDDKFLSFHMEMVVHVDAAQAFLLLSDLRQRPEWDKHYRSVELVQQVDEDDAIYHVTSPALGGHTKPQDFVILASRRKPCDNGDPYVIALRSVTLPTHRETPEYRRGETLCSGFCLWREGDQLTKVSYYNQATPGVLNYVTTNVAGLSSEFYTTFKACEQFLLDNRNDLAPSLQTL

SEQ ID NO: 7183 - protein, 651 aa, Homo sapiens
MIATVDLKVNEYEKNQKWLEILNKIENKTYTKLKNGHVFRKQALMSEERTLLYDGLVYWKTATGRFKDILALLLTDVLLFLQEKDQKYIFAAVDQKPSVISLQKLIAREVANEERGMFLISASSAGPEMYEIHTNSKEERNNWMRRIQQAVESCPEEKGGRTSESDEDKRKAEARVAKIQQCQEILTNQDQQICAYLEEKLHIYAELGELSGFEDVHLEPHLLIKPDPGEPPQAASLLAAALKEALVTGGREGRGCSDVDPGIQGVVTDLAVSDAGEKVECRNFPGSSQSEIIQAIQNLTRLLYSLQAALTIQDSHIEIHRLVLQQQEGLSLGHSILRGGPLQDQKSRDADRQHEELANVHQLQHQLQQGQRRWLRRCEQQQRAQATRESWLQERERECQSQEELLLRSRGELDLQLQEYQHSLERLREGQRLVEREQARMRAQQSLLGHWKHGRQRSLSAVLLPGGPEVMELNRSESLCHENSFFINEALVQMSFNTFNKLNPSVIHQDATYPTTQSHSDLVRTSEHQVDLKVDPSQPSNVSHKLWTAAGSGHQILPFHESSKDSCKNGSSMTKCSCTLTSPPGLWTGTTSTLKDLDTSHTESPTPHDSNSHRPQLQAFITEAKLNLPTRTMTRQDGETGDGAKENIVYL

SEQ ID NO: 7184 - protein, 669 aa, Homo sapiens [sequence omitted]

SEQ ID NO: 7185 - protein, 226 aa, Homo sapiens
MDPAVAWGYKLASRVLKQLASGVAALGVRSRTQNLSQPSTGIPSGEPGHSAGGAAGSRCTRSMFRKVPNNASALIGSELEHGCSRQGGGCSPQPGVQPSTHLSPPESCSIGSSVLWALWSHPQREGFGVTSVGQLHKGPACLCVYPGDCRMAHAEQKLMDDLLNKTRYNNLICPATSSSQLISIETELSLAQCISVLAQQVTLQAPYLLGEIRTKLGELTGTVAQV

SEQ ID NO: 7186 - protein, 548 aa, Homo sapiens
GSVSFSDVAVGFTQEEWQHLDSAQRTPYRDMMLENYSLLLSVGYCITKPEVVCKLEHGQVLWILEEESPSQSHLELIISNRSSFVRNPAECNVRGKFLLCMKRENPYARGKPLEYDGNGKAVSQNEDLFRHQYIQTLKQCFEYNQCGKAFHEEAACSTHKRCAHGRPCEYNEHVRAFSDRPIFIVHQRTHIRKSHHEFNECERRSGERPFECNECQKSFSVKSKLREHQRIHTGEKPYECNECEKMFYHKSSLTVHQRTHTGEKPYACSECGKTFYQKSSLTTHQRTHTREQPYEYNESFYQNPNFTKYFTYHQRTHTGERPCECNECGKSFSVKSKLIVHQRTHTGEKPYECNECGKTFSQKSSLTVHQRTHTGEKPYKCNACGKSFSQKKNSILLSHQRIHTGQKPYKCNDCGKAFAQNAALTRHERIHSGEKPFKCNKCGRAFRDNSTVLEHQKIHTGEKPYQCNECGKAFRKSSTLISHQRMHTGEKPYHCSKCGKSFRYSSSFAGHQKTHSGNKPYQCRDCGKAFTKSSTLTGHQRIHTGEKP

SEQ ID NO: 7187 - protein, 647 aa, Homo sapiens
SVSFSDVAVGFTQEEWQHLDSAQRTPYRDMMLENYSLLLSVGYCITKPEVVCKLEHGQVLWILEEESPSQSHLDCCIDDDLMEKRQENQDQHLQKVDFVNNKTLTMDRNGVLGKTFSLDTNPILSRKIRGNCDSSGMNLNNISELIISNRSSFVRNPAECNVRGKFLLCMKRENPYARGKPLEYDGNGKAVSQNEDLFRHQYIQTLKQCFEYNQCGKAFHEEAACSHALQYIKEHTRDKTYECNECGKNFCEKSNLHVHQRTHTGEKPYGCNECQKAFGDRSALKVHQRIHTGEKPYECKECGKTFSQKPNFINHQGRVLKPKPLCTHKRVCFWEKPCEYNEQLRAFSDNPNLLVHQNFTYHQRTHTGERPCECNECGKSFSVKSKLIVHQRTHTGEKPYECNECGKTFSQKSSLTVHQRTHTGEKPYKCNACGKSFSQKKNSILLSHQRIHTGQKPYKCNDCGKAFAQNAALTRHERIHSGEKPFKCNKCGRAFRDNSTVLEHQKIHTGEKPYQCNECGKAFRKSSTLISHQRMHTGEKPYHCSKCGKSFRYSSSFAGHQKTHSGNKPYQCRDCGKAFTKSSTLTGHQRIHTGEKPYHCKKCGKAFRHSSGLVEHQRLHTGEKPYKCNECGKAFPRSSALKQHKKI

SEQ ID NO: 7188 - protein, 527 aa, Homo sapiens
SVSFSDVAVGFTQEEWQHLDSAQRTPYRDMMLENYSLLLSVGYCITKPEVVCKLEHGQVLWILEEESPSQSHLVHFAVSQSILYIRKQIQKKNSMNVVNVGKPSAINPLLSYSRGYTEERNPMNALNVGKLLDIGHALQYIKEHTRDKTYECNECGKNFCEKSNLHVHQRTHTGEKPYGCNECQKAFGDRSALKVHQRIHTGEKPYEYFTYHQRTHTGERPCECNECGKSFSVKSKLIVHQRTHTGEKPYECNECGKTFSQKSSLTVHQRTHTGEKPYKCNACGKSFSQNSSLLNHHKVHAGKQPYRCIECGKFLKKHSTFINHQRIHSREKPHKCIECGKTFRKNSILLSHQRIHTGQKPYKCNDCGKAFAQNAALTRHERIHSGEKPFKCNKCGRAFRDNSTVLEHQKIHTGEKPYQCNECGKAFRKSSTLISHQRMHTGEKPYHCSKCGKSFRYSSSFAGHQKTHSGNKPYQCRDCGKAFTKSSTLTGHQRIHTGEKPYHCKKCGKAFRHSSGLVEHQRLHTGE

SEQ ID NO: 7189 - protein, 354 aa, Homo sapiens
SVSFSDVAVGFTQEEWQHLDSAQRTPYRDMMLENYSLLLSVGYCISKPKVVFKLQQGEEAWILEEESSSQSHFGEYEKPHKCKECGIAFMNSSSLLNHHKVHAGKQPYRCIECGKFLKKHSTFINHQRIHSREKPHKCIECGKTFRKNSILLSHQRIHTGQKPYKCNDCGKAFAQNAALTRHERIHSGEKPFKCNKCGRAFRDNSTVLEHQKIHTGEKPYQCNECGKAFRKSSTLISHQRMHTGEKPYHCSKCGKSFRYSSSFAGHQKTHSGNKPYQCRDCGKAFTKSSTLTGHQRIHTGEKPYHCKKCGKAFRHSSGLVEHQRLHTGEKPYKCNECGKAFPRSSALKQHKKIH

SEQ ID NO: 7190 - protein, 518 aa, Homo sapiens
GSVSFSDVAVGFTQEEWQHLDSAQRTPYRDMMLENYSLLLSVGYCITKPEVVCKLEHGQVLWILEEESPSQSHLDDDLMEKRQENQDQHLQKVDFVNNKTLTMDRNGVLGKTFSLDTNPILSRKIRGNCDSSGMNLNNISELIISNRSSFVRNPAECNVRGKFLLCMKRENPYARGKPLEYDGNGKAVSQNEDLFRHQYIQTLKQCFEYNQCGKAFHEEAACSTHKRRNHTSEKPHKCKECGIAFMNSSSLLNHHKVHAGKQPYRCIECGKFLKKHSTFINHQRIHSREKPHKCIECGKTFRKNSILLSHQRIHTGQKPYKCNDCGKAFAQNAALTRHERIHSGEKPFKCNKCGRAFRDNSTVLEHQKIHTGEKPYQCNECGKAFRKSSTLISHQRMHTGEKPYHCSKCGKSFRYSSSFAGHQKTHSGNKPYQCRDCGKAFTKSSTLTGHQRIHTGEKPYHCKKCGKAFRHSSGLVEHQRLHTGEKPYKCNECGKAFPRSSALKQHKKIHNKERAMKC

SEQ ID NO: 7191 - protein, 243 aa, Homo sapiens
MQEIIASVDHIKFDLEIAVEQQLGAQPLPFPGMDKSGAAVCEFFLKAACGKGGMCPFRHISGEKTVVCKHWLRGLCKKGDQCEFLHEYDMTKMPECYFYSKFGECSNKECPFLHIDPESKIKDCPWYDRGFCKHGPLCRHRHTRRVICVNYLVGFCPEGPSCKFMHPRFELPMGTTEQPPLPQQTQPPAKRTPQVIGVMQSQNSSAGNRGPRPLEQVTCYKCGEKGHYANRCTKGHLAFLSGQ

SEQ ID NO: 7192 - protein, 269 aa, Homo sapiens
MQEIIASVDHIKFDLEIAVEQQLGAQPLPFPGMDKSGAAVCEFFLKAACGKGGMCPFRHISGEKTVVCKHWLRGLCKKGDQCEFLHEYDMTKMPECYFYSKFGECSNKECPFLHIDPESKIKDCPWYDRGFCKHGPLCRHRHTRRVICVNYLVGFCPEGPSCKFMHPRFELPMGTTEQPPLPQQTQPPAKQSNNPPLQRSSSLIQLTSQNSSPNQQRTPQVIGVMQSQNSSAGNRGPRPLEQVTCYKCGEKGHYANRCTKGHLAFLSGQ

SEQ ID NO: 7193 - protein, 244 aa, Homo sapiens
MQEIIASVDHIKFDLEIAVEQQLGAQPLPFPGMDKSGAAVCEFFLKAACGKGGMCPFRHISGEKTVVCKHWLRGLCKKGDQCEFLHEYDMTKMPECYFYSKFGECSNKECPFLHIDPESKIKDCPWYDRGFCKHGPLCRHRHTRRVICVNYLVGFCPEGPSCKFMHPRFELPMGTTEQPPLPQQTQPPAKQRTPQVIGVMQSQNSSAGNRGPRPLEQVTCYKCGEKGHYANRCTKGHLAFLSGQ

SEQ ID NO: 7194 - protein, 689 aa, Homo sapiens
PQPGSTVPRSPRLPPGSCPRPRRLPGLGVPGQPPRRGPPAVAMACSLQKLFAVEEEFEDEDFLSAVEDAENRFTGSLPVNAGRLRPVSSRPQETVQAQSSRLLLLHPTAPSEALGLPDLDLCLPASSTPSADSRPSCIGAAPLRPVSTSSSWIGNQRRVTVTEVLRETARPQSSALHPLLTFESQQQQVGGFEGPEQDEFDKVLASMELEEPGMELECGVSSEAIPILPAQQREGSVLAKKARVVDLSGSCQKGPVPAIHKAGIMSAQDESLDPVIQCRTPRPPLRPGAVGHLPVPTALTVPTQQLHWEVCPQRSPVQALQPLQAARGTIQSSPQNRFPCQPFQSPSSWLSGKAHLPRPRTPNSSCSTPSRTSSGLFPRIPLQPQAPVSSIGSPVGTPKGPQGALQTPIVTNHLVQLVTAASRTPQQPTHPSTRAKTRRFPGPAGILPHQQSGRSLEDIMVSAPQTPTHGALAKFQTEIVASSQASVEEDFGRGPWLTMKSTLGLDERDPSCFLCTYSIVMVLRKQAALKQLPRNKVPNMAVMIKSLTRSTMDASVVFKDPTGEMQGTVHRLLLETCQNELKPGSVLLLKQIGVFSPSLRNHYLNVTPNNLVHIYSPDSGDGSFLKPSQPFPKDSGSFQHDVAAKPEEGFRTAQNLEAEASPEEELPEADDLDGLLSELPEDFFCGTSS

SEQ ID NO: 7195 - protein, 563 aa, Homo sapiens
PQPGSTVPRSPRLPPGSCPRPRRLPGLGVPGQPPRRGPPAVAMACSLQKLFAVEEEFEDEDFLSAVEDAENRFTGSLPVNAGRLRPVSSRPQETVQAQSSRLLLLHPTAPSEALGLPDLDLCLPASSTPSADSRPSCIGAAPLRPVSTSSSWIGNQRRVTVTEVLRETARPQSSALHPLLTFESQQQQVGGFEGPEQDEFDKVLASMELEEPGMELECGVSSEAIPILPAQQREGSVLAKKARVVDLSGSCQKGPVPAIHKAGIMSAQDESLDPVIQCRTPRPPLRPGAVGHLPVPTALTVPTQQLHWEVCPQRSPVQALQPLQAARGTIQSSPQNRFPCQPFQSPSSWLSGKAHLPRPRTPNSSCSTPSRTSSGLFPRIPLQPQAPVSSIGSPVGTPKGPQGALQTPIVTNHLVQLVTAASRTPQQPTHPSTRAKTRRFPGPAGILPHQAALKQLPRNKVPNMAVMIKSLTRSTMDASVVFKDPTGEMQGTVHRLLLETCQNELKPGSVLLLKQIGVFSPSLRNHYLNVTPNNLVHIYSPDSGDGSFLKPSQPFPKMTWMDS

SEQ ID NO: 7196 - protein, 1057 aa, Homo sapiens
MMGDYRLPDHPQPMEILNLYLGDSLEPHPGECPRETCSHEDPPEPFEEQTWATDPPEPTRQNVPPWGSGVELTHLGSWVHQDGLEPCQEQTRATDPPESTRQDAPPWGSGVELTHLGSPSAQREHRQNTASPGSPVNSHLPGSPKQNRSTSTQVVFWAGILQAQMCVLDLEEELEKTEGLKAGLKCCLPTPPVDLPGDTGLHSSPPENEDSGEDSSEPEGEGQAWLREGTPDSSPQWGAEEESMFFSNPLFLASPCSENSASGECFSWGASDSHAGVRTGPESPATLEPPLPEDTVLWELESEPDLGDGAAISGHCTPPFPVPIYKPHSICWASVAAAEGAPAAPPGHGESEGDRLGPAPSAAPCVDEALTWESGCVGSDLGPAAHPVQPWASSLSPEGWQRGGPFWPQVTLNSQDRDEREGGHPQESLPCTLAPCPWRSPASSPEPSSPESESRGPGPRPSPASSQEGSPQLQHHSSGILPKWTLDASQSSLLETDGEQPSSLKKKEAGEAPKPGEEVKSEGTARPAETGDVQPDIHLTSAEHENLRTPMNSSWLPGSPMPQAQSPEEGQRPPAGDKLANGVRNNKVAWNLASRLYRLEGFRKSEVAAYLQKNNDFSRAVAEEYLSFFQFGGQSLDRALRSFLQALVLSGETQERERILYQFSRRFHHCNPGIFPSVDSVHTLTCAIMLLNTDLHGQNIGKSMSCQEFITNLNGLRDGGNFPKELLKALYWSIRSEKLEWAVDEEDTARPEKAQPSLPAGKMSKPFLQLAQDPTVPTYKQGILARKMHQDADGKKTPWGKRGWKMFHTLLRGMVLYFLKQGEDHCLEGESLVGQMVDEPVGVHHSLATPATHYTKKPHVFQLRTADWRLYLFQAPTAKEMSSWIARINLAAATHSAPPFPAAVGSQRRFVRPILPVGPAQSSLEEQHRSHENCLDAAADDLLDLQRNLPERRGRGRELEEHRLRKEYLEYEKTRYETYVQLLVARLHCPSDALDLWEEQLGREAGGTREPKLSLKKSHSSPSLHQDEAPTTAKVKRNISERRTYRKIIPKRNRNQL

SEQ ID NO: 7197 - protein, 1426 aa, Homo sapiens
MHSSNPKVRSSPSGNTQSSPKSKQEVMVRPPTVMSPSGNPQLDSKFSNQGKQGGSASQSQPSPCDSKSGGHTPKALPGPGGSMGLKNGAGNGAKGKGKRERSISADSFDQRDPGTPNDDSDIKECNSADHIKSQDSQHTPHSMTPSNATAPRSSTPSHGQTTATEPTPAQKTPAKVVYVFSTEMANKAAEAVLKGQVETIVSFHIQNISNNKTERSTAPLNTQISALRNDPKPLPQQPPVPANQDQNSSQNTRLQPTPPIPAPAPKPAAPPRPLDRESPGVENKLIPSVGSPASSTPLPPDGTGPNSTPNNRAVTPVSQGSNSSSADPKAPPPPPVSSGEPPTLGENPDGLSQEQLEHRERSLQTLRDIQRMLFPDEKEFTGAQSGGPQQNPGVLDGPQKKPEGPIQAMMAQSQSLGKGPGPRTDVGAPFGPQGHRDVPFSPDEMVPPSMNSQSGTIGPDHLDHMTPEQIAWLKLQQEFYEEKRRKPEQVVVQQCSLQDMMVHQHGPRGVVRGPPPPYQMTPSEGWAPGGTEPFSDGINMPHSLPPRGMAPHPNMPGSQMRLPGFAGMINSEMEGPNVPNPASRPGLSGVSWPDDVPKIPDGRNFPPGRGIFSGPGRGERFPNPQGLSEEMFQQQLAEKQLGLPPGMAMEGIRPSMEMNRMIPGSQRHMEPGNNPIFPRIPVEGPLSPSRGDFPKGIPPQMGPGRELEFGMVPSGMKGDVNLNVNMGSNSQMIPQKMREAGAGPEEMLKLRPGGSDMLPAQQKMVPLPFGEHPQQEYGMGPRPFLPMSQGPGSNSGLRNLREPIGPDQRTNSRLSHMPPLPLNPSSNPTSLNTAPPVQRGLGRKPLDISVAGSQVHSPGINPLKSPTMHQVQSPMLGSPSGNLKSPQTPSQLAGMLAGPAAAASIKSPPVLGSAAASPVHLKSPSLPAPSPGWTSSPKPPLQSPGIPPNHKAPLTMASPAMLGNVESGGPPPPTASQPASVNIPGSLPSSTPYTMPPEPTLSQNPLSIMMSRMSKFAMPSSTPLYHDAIKTVASSDDDSPPARSPNLPSMNNMPGMGINTQNPRISGPNPVVPMPTLSPMGMTQPLSHSNQMPSPNAVGPNIPPHGVPMGPGLMSHNPIMGHGSQEPPMVPQGRMGFPQGFPPVQSPPQQVPFPHNGPSGGQGSFPGGMGFPGEGPLGRPSNLPQSSADAALCKPGGPGGPDSFTVLGNSMPSVFTDPDLQEVIRPGATGIPEFDLSRIIPSEKPSQTLQYFPRGEVPGRKQPQGPGPGFSHMQGMMGEQAPRMGLALPGMGGPGPVGTPDIPLGTAPSMPGHNPMRPPAFLQQGMMGPHHRMMSPAQSTMPGQPTLMSNPAAAVGMIPGKDRGPAGLYTHPGPVGSPGMMMSMQGMMGPQQNIMIPPQMRPRGMAADVGMGGFSQGPGNPGNMMF

SEQ ID NO: 7198 - protein, 388 aa, Homo sapiens
MDVKDRRHRSLTRGRCGKECRYTSSSLDSEDCRVPTQKSYSSSETLKAYDHDSRMHYGNRVTDLIHRESDEFPRQVFLFKTQDTDHKTNTLLTYNQVLQTQLDDSTDAQGGKELPASKSDGGPESDLVQLPQLAHSSIKCKNLPSPSRRNEPGKRFDCRDVYWAVSTDSMPSLMVITFLHKLSTWNTNKERCHYLNDIAQTLLVCRMEAVLLTPYRFAFDERPTLKMVSVFFPAATELTENIIMRDELGQNQSPIDEQRTNFTLAELGICEPSPHRSGYCSDMGILHQGYSLSTGSDADSDTEGGMSPEHAIRLWGRGIKSRRSSGLSSRENSALTLTDSDNENKSDDENESGLSINLALERFLSKHKLNMRVEFYFYSHSITLTCSN

SEQ ID NO: 7199 - protein, 534 aa, Homo sapiens
MKQPNRKRKLNMDSKERLDQDGRLEQAEEEKKPKDSTTPLSHVPSAAAQGAWSWEWYLKEQKAVAAPVELFSKDQSFPEHENGFQIGMRLEGIDPRHPSVFCVLSVAEVCGYRLRLHFDGYLSCYDFWTNAGSPDIHPVGWCEKTKHELHIPKGYRKDKFVWMDYLKACKLQNAPKKLFRNRSPNGPMSKEFQVGMKLEAVDRKNPSLVCVATIADIVEDRLLVHFDNWDDSYDYWCDVNSPYVQPVGWCQENGRTLIAPQGYPNPENFSWTEYLEATQTNAVPAKVFKMRLPHGFLPNMKLEVVDKRNPRLIRVATIVDVDDQRVKVHFDGWDHKYDYWVEADSPDIHPIGWCDVTGHPLEVPQRTNDLKILPGQAVCPTPGCRGIGHIRGPRYSGHHSAFGCPYSDMNLKKEATLHDRLREQTQANLESDSSHSKSKSLCSLNFNGKHEKVNSQPRLVQQAKCLKIKGKEDIDLDNLFRGRVRWLMPVIPALWEAEAGRSRDQEIKTILANAVKPRLYQKYKKLARRGGGCL

SEQ ID NO: 7200 - protein, 623 aa, Homo sapiens [sequence omitted]

SEQ ID NO: 7201 - protein, 782 aa, Homo sapiens
MTSIIKLTTLSGVQEESALCYLLQVDEFRFLLDCGWDEHFSMDIIDSLRKHVHQIDAVLLSHPDPLHLGALPYAVGKLGLNCAIYATIPVYKMGQMFMYDLYQSRHNTEDFTLFTLDDVDAAFDKIQQLKFSQIVNLKGKGHGLSITPLPAGHMIGGTIWKIVKDGEEEIVYAVDFNHKREIHLNGCSLEMLSRPSLLITDSFNATYVQPRRKQRDEQLLTNVLETLRGDGNVLIAVDTAGRVLELAQLLDQIWRTKDAGLGVYSLALLNNVSYNVVEFSKSQVEWMSDKLMRCFEDKRNNPFQFRHLSLCHGLSDLARVPSPKVVLASQPDLECGFSRDLFIQWCQDPKNSIILTYRTTPGTLARFLIDNPSEKITEIELRKRVKLEGKELEEYLEKEKLKKEAAKKLEQSKEADIDSSDESDIEEDIDQPSAHKTKHDLMMKGEGSRKGSFFKQAKKSYPMFPAPEERIKWDEYGEIIKPEDFLVPELQATEEEKSKLESGLTNGDEPMDQDLSDVPTKCISTTESIEIKARVTYIDYEGRSDGDSIKKIINQMKPRQLIIVHGPPEASQDLAECCRAFGGKDIKVYMPKLHETVDATSETHIYQVRLKDSLVSSLQFCKAKDAELAWIDGVLDMRVSKVDTGVILEEGELKDDGEDSEMQVEAPSDSSVIAQQKAMKSLFGDDEKETGEESEIIPTLEPLPPHEVPGHQSVFMNEPRLSDFKQVLLREGIQAEFVGGVLVCNNQVAVRRTETGRIGLEGCLCQDFYRIRDLLYEQYAIV

SEQ ID NO: 7202 - protein, 925 aa, Homo sapiens
ELGAGRSDREAMEAAVKEEISVEDEAVDKNIFRDCNKIAFYRRQKQWLSKKSTYRALLDSVTTDEDSTRFQIINEASKVPLLAEIYGIEGNIFRLKINEETPLKPRFEVPDVLTSKPSTVRLISCSGDTGSLILADGKGDLKCHITANPFKVDLVSEEEVVISINSLGQLYFEHLQILHKQRAAKENEEETSVDTSQENQEDLGLWEEKFGKFVDIKANGPSSIGLDFSLHGFEHLYGIPQHAESHQLKNTGDGDAYRLYNLDVYGYQIYDKMGIYGSVPYLLAHKLGRTIGIFWLNASETLVEINTEPAVEYTLTQMGPVAAKQKVRSRTHVHWMSESGIIDVFLLTGPTPSDVFKQYSHLTGTQAMPPLFSLGYHQCRWNYEDEQDVKAVDAGFDEHDIPYDAMWLDIEHTEGKRYFTWDKNRFPNPKRMQELLRSKKRKLVVISDPHIKIDPDYSVYVKAKDQGFFVKNQEGEDFEGVCWPGLSSYLDFTNPKVREWYSSLFAFPVYQGSTDILFLWNDMNEPSVFRGPEQTMQKNAIHHGNWEHRELHNIYGFYHQMATAEGLIKRSKGKERPFVLTRSFFAGSQKYGAVWTGDNTAEWSNLKISIPMLLTLSITGISFCGADIGGFIGNPETELLVRWYQAGAYQPFFRGHATMNTKRREPWLFGEEHTRLIREAIRERYGLLPYWYSLFYHAHVASQPVMRPLWVEFPDELKTFDMEDEYMLGSALLVHPVTEPKATTVDVFLPGSNEVWYDYKTFAHWEGGCTVKIPVALDTIPVFQRGGSVIPIKTTVGKSTGWMTESSYGLRVALSTKGSSVGELYLDDGHSFQYLHQKQFLHRKFSFCSSVLINSFADQRGHYPSKCVVEKILVLGFRKEPSSVTTHSSDGKDQPVAFTYCAKTSILSLEKLSLNIATDWEVRII

SEQ ID NO: 7203 - protein, 462 aa, Homo sapiens
MGPDRVTARELCENDDLATSLVLDPYLGFRTHKMNVSPVPPLRRQQHLRSALETFLRQRDLEAAYRALTLGGWTARYFQSRGPRQEAALKTHVYRYLRAFLPESGFTILPCTRYSMETNGAKIVSTRAWKKNEKLELLVGCIAELREADEGLLRAGENDFSIMYSTRKRSAQLWLGPAAFINHDCKPNCKFVPADGNAACVKVLRDIEPGDEVTCFYGEGFFGEKNEHCECHTCERKGEGAFRTRPREPALPPRPLDKYQLRETKRRLQQGLDSGSRQGLLGPRACVHPSPLRRDPFCAACQPLRLPACSARPDTSPLWLQWLPQPQPRVRPRKRRRPRPRRAPVLSTHHAARVSLHRWGGCGPHCRLRGEALVALGQPPHARWAPQQDWHWARRYGLPYVVRVDLRRLAPAPPATPAPAGTPGPILIPKQALAFAPFSPPKRLRLVVSHGSIDLDVGGEEL

SEQ ID NO: 7204 - protein, 409 aa, Homo sapiens
TGPNPGTGQNPTRTGPNPGTGQNPTRTGPNPGTGQNPTRTGPNPGAGQNPTRTGPNPGAGQNPTRTGPNPGAGQNPTRTGPNPGAGQNPTRTGTGPNPGTGQNPTRTGSNPGTGQNPTRTGPNPGAGQNPTRTGPNPGAGQNPTRTGPNPGAGQNPTRTGPNPGTGQNPTRTGSNPSTGQNPTRTGLNPGTGQHPTRTGSNPDTGQNPTRTGSNPSTGQNPTRTGLNPGTGQHPTRTGSNPDTGQNPTRTGPNPGAGQNPTRTGPNPGAGQNPTRTGPNPGTGQNPTRTGPNPGTGQNPTRTESNPGTGQNPTRTGPNPGTGQNPTRTGSNPGTGQNPTRTGPNPGTGQNPTRTGPNPGTGQNPTRTGPNPGTGQNPTRTGPNPGTGQNPTRTGSNPGTGQNPTRTGPN

SEQ ID NO: 7205 - protein, 760 aa, Homo sapiens
SSTGQNPTRTGLNPGTGQNPTRTGPNPGTGQNPTRTGLNPGTGQHPTRTGSNPGTGQNPTRTGLNPGTGQNPTRTGPNPGTGQNPTRTGLNPGTGQNPTRTGPNPGTGQNPTRTGPNPGTGQNPTRTGPNPGAGQNPTRTGPNPGAGQNPTRTGTGSNPGTGQNPTRTGLNPGTGQNPTRTGPNPGTGQNPTRTGSNPGTGQNPTRTGPNPGAGQNPTRTGPNPGAGQNPTRTGPNPGTGQNPTRTGSNPSTGQNPTRTGLNPGTGQHPTRTGSNPDTGQNPTRTGSNPSTGQNPTRTGLNPGTGQHPTRTGSNPDTGQNPTRTGPNPGAGQNPTRTGPNPGAGQNPTRTGLNPGTGQNPTRTGPNPGTGQNPTRTGSNPSTGQNPTRTGPNPGAGQNPTRTGPNPGAGQNPTRTGPNPGTGQNPTRTGTPPGLGSNPGTGQNPTRTGPNPGTGQNPTRTGSNPGTGQNPTRTGPNPGAGQNPTRTGPNPGAGQNPTRTGPNPGAGQNPTRTGPNPGTGQNPTRTGSNPSTGQNPTRTGLNPGTGQHPTRTGSNPDTGQNPTRTGSNPSTGQNPTRTGLNPGTGQHPTRTGSNPDTGQNPTRTGPNPGAGQNPTRTGPNPGAGQNPTRTGPNPGTGQNPTRTGPNPGTGQNPTRTESNPGTGQNPTRTGPNPGTGQNPTRTGSNPGTGQNPTRTGPNPGTGQNPTRTGPNPGTGQNPTRTGPNPGTGQNPTRTGPNPGTGQNPTRTGSNPGTGQNPTRTG

SEQ ID NO: 7206 - protein, 1131 aa, Homo sapiens
MFQIPVENLDNIRKVRKKVKGILVDIGLDSCKELLKDLKGFDPGEKYFHNTSWGDVSLWEPSGKKVRYRTKPYCCGLCKYSTKVLTSFKNHLHRYHEDEIDQELVIPCPNCVFASQPKVVGRHFRMFHAPVRKVQNYTVNILGETKSSRSDVISFTCLKCNFSNTLYYSMKKHVLVAHFHYLINSYFGLRTEEMGEQPKTNDTVSIEKIPPPDKYYCKKCNANASSQDALMYHILTSDIHRDLENKLRSVISEHIKRTGLLKQTHIAPKPAAHLAAPANGSAPSAPAQPPCFHLALPQNSPSPAAGQPVTVAQGAPGSLTHSPPAAGQSHMTLVSSPLPVGQNSLTLQPPAPQPVFLSHGVPLHQSVNPPVLPLSQPVGPVNKSVGTSVLPINQTVRPGVLPLTQPVGPINRPVGPGVLPVSPSVTPGVLQAVSPGVLSVSRAVPSGVLPAGQMTPAGQMTPAGVIPGQTATSGVLPTGQMVQSGVLPVGQTAPSRVLPPGQTAPLRVISAGQVVPSGLLSPNQTVSSSAVVPVNQGVNSGVLQLSQPVVSGVLPVGQPVRPGVLQLNQTVGTNILPVNQPVRPGASQNTTFLTSGSILRQLIPTGKQVNGIPTYTLAPVSVTLPVPPGGLATVAPPQMPIQLLPSGAAAPMAGSMPGMPSPPVLVNAAQSVFVQASSSAADTNQVLKQAKQWKTCPVCNELFPSNVYQVHMEVAHKHSESKSGEKLEPEKLAACAPFLKWMREKTVRCLSCKCLVSEEELIHHLLMHGLGCLFCPCTFHDIKGLSEHSRNRHLGKKKLPMDYSNRGFQLDVDANGNLLFPHLDFITILPKEKLGEREVYLAILAGIHSKSLVPVYVKVRPQAEGTPGSTGKRVSTCPFCFGPFVTTEAYELHLKERHHIMPTVHTVLKSPAFKCIHCCGVYTGNMTLAAIAVHLVRCRSAPKDSSSDLQAQPGFIHNSELLLVSGEVMHDSSFSVKRKLPDGHLGAEDQRHGEEQPPILNADAAPGPEKVTSVVPFKRQRNESRTEGPIVKDEALQILALDPKKYEGRSYEEKKQFLKDYFHKKPYPSKKEIELLSSLFWVWKIDVASFFGKRRYICMKAIKNHKPSVLLGFDMSELKNVKHRLNFEYEP

SEQ ID NO: 7207 - protein, 670 aa, Homo sapiens [sequence omitted]

SEQ ID NO: 7208 - protein, 451 aa, Homo sapiens
MAETKIIYHMDEEETPYLVKLPVAPERVTLADFKNVLSNRPVHAYKFFFKSMDQDFGVVKEEIFDDNAKLPCFNGRVVSWLVLAEGAHSDAGSQGTDSHTDLPPPLERTGGIGDSRPPSFHPNVASSRDGMDNETGTESMVSHRRERARRRNREEAARTNGHPRGDRRRDVGLPPDSASTALSSELESSSFVDSDEDGSTSRWADVVDWLYTHVEGFKERREARKYASSLLKHGFLRHTVNKITFSEQCYYVFGDLCSNLATLNLNSGSSGTSDQDTLAPLPHPAAPWPLGQGYPYQYPGPPPCFPPAYQDPGFSYGSGSTGSQQSEGSKSSGSTRSSRRAPGREKERRAAGAGGSGSESDHTAPSGVGSSWRERPAGQLSRGSSPRSQASATAPGLPPPHPTTKAYTVVGGPPGGPPVRELAAVPPELTGSRQSFQKAMGNPCEFFVDIM

SEQ ID NO: 7209 - protein, 475 aa, Homo sapiens
MAGRPHPYDGNSSDPENWDRKLHSRPRKLYKHSSTSSRIAKGGVDHTKMSLHGASGGHERSRDRRRSSDRSRDSSHERTESQLTPCIRNVTSPTRQHHVEREKDHSSSRPSSPRPQKASPNGSISSAGNSSRNSSQSSSDGSCKTAGEMVFVYENAKEGARNIRTSERVTLIVDNTRFVVDPSIFTAQPNTMLGRMFGSGREHNFTRPNEKGEYEVAEGIGSTVFRAILDYYKTGIIRCPDGISIPELREACDYLCISFEYSTIKCRDLSALMHELSNDGARRQFEFYLEEMILPLMVASAQSGERECHIVVLTDDDVVDWDEEYPPQMGEEYSQIIYSTKLYRFFKYIENRDVAKSVLKERGLKKIRLGIEGYPTYKEKVKKRPGGRPEVIYNYVQRPFIRMSWEKEEGKSRHVDFQCVKSKSITNLAAAAADIPQDQLVVMHPTPQVDELDILPIHPPSGNSDLDPDAQNPML

SEQ ID NO: 7210 - protein, 135 aa, Homo sapiens
MIIYWDLISHSEMFSDSYMSQEIADGLRLEVEGKIVSRTEGNIFDSLIGGNASAEGPEGKGTESTVITGVDSVMNHHLQETSFTKEAYNKCIKDYMKSIKGKLEEQRPKRVKPFMTGAAEQIKHILANFKNYQKT

(The sequence listing continues in the following parts.)

What is claimed is:

1. A diagnostic panel comprising:
a plurality of detection reagents wherein each detection reagent is specific for one tissue-derived serum glycoprotein; wherein the tissue-derived serum glycoproteins detected by the plurality of detection reagents are derived from the same tissue and selected from the tissue-derived serum glycoprotein sets provided in Table 1.

2. The diagnostic panel of claim 1 wherein the plurality of detection reagents is selected such that the level of at least two of the tissue-derived serum glycoproteins detected by the plurality of detection reagents in a blood sample from a subject afflicted with a disease affecting a tissue from which the tissue-derived serum glycoproteins are derived is above or below a predetermined normal range.

3. The diagnostic panel of claim 1 wherein the plurality of detection reagents is selected such that the level of at least three of the tissue-derived serum glycoproteins detected by the plurality of detection reagents in a blood sample from a subject afflicted with a disease affecting the organ from which the tissue-derived serum glycoproteins are derived is above or below a predetermined normal range.

4. The diagnostic panel of claim 1 wherein the plurality of detection reagents is selected such that the level of at least four of the tissue-derived serum glycoproteins detected by the plurality of detection reagents in a blood sample from a subject afflicted with a disease affecting the organ from which the tissue-derived serum glycoproteins are derived is above or below a predetermined normal range.

5. The diagnostic panel of claim 1 wherein the plurality of detection reagents is between two and 100 detection reagents.

6. The diagnostic panel of claim 2 wherein the disease affects the prostate and the tissue-derived serum glycoproteins detected by the plurality of detection reagents are selected from the prostate-derived serum glycoproteins listed in Table 1.

7. The diagnostic panel of claim 6 wherein the plurality of detection reagents detect two or more of the prostate-derived serum glycoproteins listed in Table 1.

8. The diagnostic panel of claim 6 wherein the plurality of detection reagents detect three or more of the prostate-derived serum glycoproteins listed in Table 1.

9. The diagnostic panel of claim 6 wherein the plurality of detection reagents detect four or more of the prostate-derived serum glycoproteins listed in Table 1.

10. The diagnostic panel of claim 6 wherein the plurality of detection reagents detect five or more of the prostate-derived serum glycoproteins listed in Table 1.

11. The diagnostic panel of claim 6 wherein the plurality of detection reagents detect two or more prostate-derived serum glycoproteins selected from the group consisting of CD13, CD14, CD26, CD44, CD45, CD56, CD90, CD91, CD107a, CD107b, CD109, CD166, CD143, CD224, PSMA-1, Glutamate carboxypeptidase II, MAC-2 binding protein, metalloproteinase inhibitor 1, and tumor endothelial marker 7-related precursor.

12. The diagnostic panel of claim 6 further comprising one or more detection reagents that are each specific for a prostate-derived glycoprotein listed in Table 1 that does not overlap with the plasma-derived glycoproteins listed in Table 1.

13. The diagnostic panel of claim 2 wherein the disease affects the bladder and the tissue-derived serum glycoproteins detected by the plurality of detection reagents are selected from the bladder-derived serum glycoproteins listed in Table 1.

14. The diagnostic panel of claim 13 wherein the plurality of detection reagents detect two or more of the bladder-derived serum glycoproteins listed in Table 1.

15. The diagnostic panel of claim 13 wherein the plurality of detection reagents detect three or more of the bladder-derived serum glycoproteins listed in Table 1.

16. The diagnostic panel of claim 13 wherein the plurality of detection reagents detect four or more of the bladder-derived serum glycoproteins listed in Table 1.

17. The diagnostic panel of claim 13 wherein the plurality of detection reagents detect five or more of the bladder-derived serum glycoproteins listed in Table 1.

18. The diagnostic panel of claim 13 further comprising one or more detection reagents that are each specific for a bladder-derived glycoprotein listed in Table 1 that does not overlap with the plasma-derived glycoproteins listed in Table 1.

19. The diagnostic panel of claim 1 wherein the disease affects the liver and the tissue-derived serum glycoproteins detected by the plurality of detection reagents are selected from the liver-derived serum glycoproteins listed in Table 1.

20. The diagnostic panel of claim 19 wherein the plurality of detection reagents detect two or more of the liver-derived serum glycoproteins listed in Table 1.

21. The diagnostic panel of claim 19 wherein the plurality of detection reagents detect three or more of the liver-derived serum glycoproteins listed in Table 1.

22. The diagnostic panel of claim 19 wherein the plurality of detection reagents detect four or more of the liver-derived serum glycoproteins listed in Table 1.

23. The diagnostic panel of claim 19 wherein the plurality of detection reagents detect five or more of the liver-derived serum glycoproteins listed in Table 1.

24. The diagnostic panel of claim 19 further comprising one or more detection reagents that are each specific for a liver-derived glycoprotein listed in Table 1 that does not overlap with the plasma-derived glycoproteins listed in Table 1.

25. The diagnostic panel of claim 2 wherein the disease affects the breast and the tissue-derived serum glycoproteins detected by the plurality of detection reagents are selected from the breast-derived serum glycoproteins listed in Table 1.

26. The diagnostic panel of claim 25 wherein the plurality of detection reagents detect two or more of the breast-derived serum glycoproteins listed in Table 1.

27. The diagnostic panel of claim 25 wherein the plurality of detection reagents detect three or more of the breast-derived serum glycoproteins listed in Table 1.

28. The diagnostic panel of claim 25 wherein the plurality of detection reagents detect four or more of the breast-derived serum glycoproteins listed in Table 1.

29. The diagnostic panel of claim 25 wherein the plurality of detection reagents detect five or more of the breast-derived serum glycoproteins listed in Table 1.

30. The diagnostic panel of claim 25 wherein the plurality of detection reagents detect two or more breast-derived serum glycoproteins selected from the group consisting of CD71, CD98, CD107b, CD155, CD224, MAC-2 binding protein, receptor protein-tyrosine kinase erbB-2, and tumor-associated calcium signal transducer 2.

31. The diagnostic panel of claim 25 further comprising one or more detection reagents that are each specific for a breast-derived glycoprotein listed in Table 1 that does not overlap with the plasma-derived glycoproteins listed in Table 1.

32. The diagnostic panel of claim 2 wherein the disease affects lymphocytes and the tissue-derived serum glycoproteins detected by the plurality of detection reagents are selected from the lymphocyte-derived serum glycoproteins listed in Table 1.

33. The diagnostic panel of claim 32 wherein the plurality of detection reagents detect two or more of the lymphocyte-derived serum glycoproteins listed in Table 1.

34. The diagnostic panel of claim 32 wherein the plurality of detection reagents detect three or more of the lymphocyte-derived serum glycoproteins listed in Table 1.

35. The diagnostic panel of claim 32 wherein the plurality of detection reagents detect four or more of the lymphocyte-derived serum glycoproteins listed in Table 1.

36. The diagnostic panel of claim 32 wherein the plurality of detection reagents detect five or more of the lymphocyte-derived serum glycoproteins listed in Table 1.

37. The diagnostic panel of claim 32 further comprising one or more detection reagents that are each specific for a lymphocyte-derived glycoprotein listed in Table 1 that does not overlap with the plasma-derived glycoproteins listed in Table 1.

38. The diagnostic panel of claim 2 wherein the disease affects the ovary and the tissue-derived serum glycoproteins detected by the plurality of detection reagents are selected from the ovary-derived serum glycoproteins listed in Table 1.

39. The diagnostic panel of claim 38 wherein the plurality of detection reagents detect two or more of the ovary-derived serum glycoproteins listed in Table 1.

40. The diagnostic panel of claim 38 wherein the plurality of detection reagents detect three or more of the ovary-derived serum glycoproteins listed in Table 1.

41. The diagnostic panel of claim 38 wherein the plurality of detection reagents detect four or more of the ovary-derived serum glycoproteins listed in Table 1.

42. The diagnostic panel of claim 38 wherein the plurality of detection reagents detect five or more of the ovary-derived serum glycoproteins listed in Table 1.

43. The diagnostic panel of claim 38 further comprising one or more detection reagents that are each specific for a ovary-derived glycoprotein listed in Table 1 that does not overlap with the plasma-derived glycoproteins listed in Table 1.

44. A diagnostic panel comprising:
a plurality of detection reagents wherein each detection reagent is specific for one tissue-derived serum glycoprotein; wherein the tissue-derived serum glycoproteins detected by the plurality of detection reagents are selected from two or more of the tissue-derived serum glycoprotein sets provided in Table 1.

45. The diagnostic panel of claim 44 wherein the plurality of detection reagents is selected such that the level of at least two of the tissue-derived serum glycoproteins detected by the plurality of detection reagents in a blood sample from a subject afflicted with a disease affecting the organs from which the tissue-derived serum glycoproteins are derived is above or below a predetermined normal range.

46. The diagnostic panel of claim 44 wherein the plurality of detection reagents is selected such that the level of at least three of the tissue-derived serum glycoproteins detected by the plurality of detection reagents in a blood sample from a subject afflicted with a disease affecting the organs from which the tissue-derived serum glycoproteins are derived is above or below a predetermined normal range.

47. The diagnostic panel of claim 44 wherein the plurality of detection reagents is selected such that the level of at least four of the tissue-derived serum glycoproteins detected by the plurality of detection reagents in a blood sample from a subject afflicted with a disease affecting the organs from which the tissue-derived serum glycoproteins are derived is above or below a predetermined normal range.

48. The diagnostic panel of claim 44 wherein the plurality of detection reagents is between two and 100 detection reagents.

49. The diagnostic panel of claim 1 or claim 44 wherein the detection reagent comprises an antibody or an antigen-binding fragment thereof.

50. The diagnostic panel of claim 1 or claim 44 wherein the detection reagent comprises a DNA or RNA aptamer.

51. The diagnostic panel of claim 1 or claim 44 wherein the detection reagent comprises an isotope labeled peptide.

52. A method for defining a biological state of a subject comprising;
a. measuring the level of at least two tissue-derived serum glycoproteins selected from any one of the tissue-derived serum glycoprotein sets provided in Table 1 in a blood sample from the subject;
b. comparing the level determined in (a) to a predetermined normal level of the at least two tissue-derived serum glycoproteins;
wherein the measured level of at least one of the two tissue-derived serum glycoproteins is above or below the predetermined normal level and wherein said measured level defines the biological state of the subject.

53. The method of claim 52, wherein the level of the at least two tissue-derived serum glycoproteins is measured using an immunoassay.

54. The method of claim 53 wherein the immunoassay comprises an ELISA.

55. The method of claim 52 wherein the level of the at least two tissue-derived serum glycoproteins is measured using mass spectrometry.

56. The method of claim 52 wherein the level of the at least two tissue-derived serum glycoproteins is measured using an aptamer capture assay.

57. A method for defining a biological state of a subject comprising;
a. measuring the level of at least two tissue-derived serum glycoproteins selected from any two or more of the tissue-derived serum glycoprotein sets provided in Table 1;
b. comparing the level determined in (a) to a predetermined normal level of the at least two tissue-derived serum glycoproteins;
wherein the measured level of at least one of the two tissue-derived serum glycoproteins is above or below the predetermined normal level and wherein said measured level defines the biological state of the subject.

58. The method of claim 57, wherein the level of the at least two tissue-derived serum glycoproteins is measured using an immunoassay.

59. The method of claim 58 wherein the immunoassay comprises an ELISA.

60. The method of claim 57 wherein the level of the at least two tissue-derived serum glycoproteins is measured using mass spectrometry.

61. The method of claim 57 wherein the level of the at least two tissue-derived serum glycoproteins is measured using an aptamer capture assay.

62. A method for defining a disease-associated tissue-derived blood fingerprint comprising;
a. measuring the level of at least two tissue-derived serum glycoproteins selected from any one of the tissue-derived serum glycoprotein sets provided in Table 1 in a blood sample from a subject determined to have a disease affecting the tissue from which the at least two tissue-derived serum glycoproteins are selected;
b. comparing the level of the at least two tissue-derived serum glycoproteins determined in (a) to a predetermined normal level of the at least two tissue-derived serum glycoproteins;
wherein the measured level of at least one of the at least two tissue-derived serum glycoproteins in the blood sample from the subject determined to have the disease is below or above the corresponding predetermined normal level and wherein said measured level defines the disease-associated tissue-derived blood fingerprint.

63. The method of claim 62 wherein step (a) comprises measuring the level of at least three tissue-derived serum glycoproteins selected from any one of the tissue-derived serum glycoprotein sets provided in Table 1 and wherein the measured level of at least two of the at least three tissue-derived serum glycoproteins in the blood sample from the subject determined to have the disease is below or above the corresponding predetermined normal level and wherein said measured level defines the disease-associated tissue-derived blood fingerprint.

64. The method of claim 62 wherein step (a) comprises measuring the level of four or more tissue-derived serum glycoproteins selected from any one of the tissue-derived serum glycoprotein sets provided in Table 1 and wherein a level of at least three of the four or more tissue-derived serum glycoproteins in the blood sample from the subject determined to have the disease that is below or above the corresponding predetermined normal level defines the disease-associated tissue-derived blood fingerprint.

65. The method of claim 62 wherein step (a) comprises measuring the level of four or more tissue-derived serum glycoproteins selected from any one of the tissue-derived serum glycoprotein sets provided in Table 1 and wherein a level of at least four of the four or more tissue-derived serum glycoproteins in the blood sample from the subject determined to have the disease that is below or above the corresponding predetermined normal level defines the disease-associated tissue-derived blood fingerprint.

66. The method of claim 62 wherein step (a) comprises measuring the level of five or more tissue-derived serum glycoproteins selected from any one of the tissue-derived serum glycoprotein sets provided in Table 1 and wherein a level of at least five of the five or more tissue-derived serum glycoproteins in the blood sample from the subject determined to have the disease that is below or above the corresponding predetermined normal level defines the disease-associated tissue-derived blood fingerprint.

67. The method of claim 62 wherein the level of the at least two tissue-derived serum glycoproteins is measured using antibodies or antigen-binding fragments thereof specific for each protein.

68. The method of claim 67 wherein the antibodies or antigen-binding fragments thereof are monoclonal antibodies.

69. The method of claim 62 wherein the level of the at least two tissue-derived serum glycoproteins is measured using mass spectrometry.

70. The method of claim 62 wherein the level of the at least two tissue-derived serum glycoproteins is measured using an aptamer capture assay.

71. The method of claim 62 wherein the disease is prostate cancer and the at least two tissue-derived serum glycoproteins are selected from the prostate-derived serum glycoproteins listed in Table 1.

72. The method of claim 62 wherein the disease is breast cancer and the at least two tissue-derived serum glycoproteins are selected from the breast-derived serum glycoproteins listed in Table 1.

73. The method of claim 62 wherein the disease is bladder cancer and the at least two tissue-derived serum glycoproteins are selected from the bladder-derived serum glycoproteins listed in Table 1.

74. The method of claim 62 wherein the disease is liver cancer and the at least two tissue-derived serum glycoproteins are selected from the liver-derived serum glycoproteins listed in Table 1.

75. A method for defining a disease-associated tissue-derived blood fingerprint comprising;
a. measuring the level of at least two tissue-derived serum glycoproteins selected from two or more of the tissue-derived serum glycoprotein sets provided in Table 1 in a blood sample from a subject determined to have a disease of interest;
b. comparing the level of the at least two tissue-derived serum glycoproteins determined in (a) to a predetermined normal level of the at least two tissue-derived serum glycoproteins;
wherein a level of at least one of the at least two tissue-derived serum glycoproteins in the blood sample from the subject determined to have the disease that is below or above the corresponding predetermined normal level defines the disease-associated tissue-derived blood fingerprint.

76. The method of claim 75 wherein step (a) comprises measuring the level of at least three tissue-derived serum glycoproteins selected from two or more of the tissue-derived serum glycoprotein sets provided in Table 1 and wherein a level of at least two of the at least three tissue-derived serum glycoproteins in the blood sample from the subject determined to have the disease that is below or above the corresponding predetermined normal level defining the disease-associated tissue-derived blood fingerprint.

77. The method of claim 75 wherein step (a) comprises measuring the level of four or more tissue-derived serum glycoproteins selected from two or more of the tissue-derived serum glycoprotein sets provided in Table 1 and wherein a level of at least three of the four or more tissue-derived serum glycoproteins in the blood sample from the subject determined to have the disease that is below or above the corresponding predetermined normal level defining the disease-associated tissue-derived blood fingerprint.

78. The method of claim 75 wherein step (a) comprises measuring the level of four or more tissue-derived serum glycoproteins selected from two or more of the tissue-derived serum glycoprotein sets provided in Table 1 and wherein a level of at least four of the four or more tissue-derived serum glycoproteins in the blood sample from the subject determined to have the disease that is below or above the corresponding predetermined normal level defining the disease-associated tissue-derived blood fingerprint.

79. The method of claim 75 wherein step (a) comprises measuring the level of five or more tissue-derived serum glycoproteins selected from two or more of the tissue-derived serum glycoprotein sets provided in Table 1 and wherein a level of at least five of the five or more tissue-derived serum glycoproteins in the blood sample from the subject determined to have the disease that is below or above the corresponding predetermined normal level defining the disease-associated tissue-derived blood fingerprint.

80. A method for detecting perturbation of a normal biological state in a subject comprising,
a) contacting a blood sample from the subject with a plurality of detection reagents wherein each detection reagent is specific for one tissue-derived serum glycoprotein; wherein the tissue-derived serum glycoproteins detected by the plurality of detection reagents are selected from any one of the tissue-derived serum glycoprotein sets provided in Table 1;
b) measuring the amount of the tissue-derived serum glycoprotein detected in the blood sample by each detection reagent; and
c) comparing the amount of the tissue-derived serum glycoprotein detected in the blood sample by each detection reagent to a predetermined normal amount for each respective tissue-derived serum glycoprotein;
wherein a statistically significant altered level in one or more of the tissue-derived serum glycoproteins indicates a perturbation in the normal biological state.

81. A method for detecting perturbation of a normal biological state in a subject comprising,
a) contacting a blood sample from the subject with a plurality of detection reagents wherein each detection reagent is specific for one tissue-derived serum glycoprotein; wherein the tissue-derived serum glycoproteins detected by the plurality of detection reagents are selected from two or more of the tissue-derived serum glycoprotein sets provided in Table 1;
b) measuring the amount of the tissue-derived serum glycoprotein detected in the blood sample by each detection reagent; and
c) comparing the amount of the tissue-derived serum glycoprotein detected in the blood sample by each detection reagent to a predetermined normal amount for each respective tissue-derived serum glycoprotein;
wherein a statistically significant altered level in one or more of the tissue-derived serum glycoproteins indicates a perturbation in the normal biological state.

82. A method for detecting prostate disease in a subject comprising,
a) contacting a blood sample from the subject with a plurality of detection reagents wherein each detection reagent is specific for one prostate-derived protein; wherein the prostate-derived proteins are selected from the prostate-derived serum glycoprotein set provided in Table 1;
b) measuring the amount of the tissue-derived serum glycoprotein detected in the blood sample by each detection reagent; and
c) comparing the amount of the tissue-derived serum glycoprotein detected in the blood sample by each detection reagent to a predetermined normal control amount for each respective tissue-derived serum glycoprotein;
wherein a statistically significant altered level in one or more of the tissue-derived serum glycoproteins indicates the presence of prostate disease in the subject.

83. The method of claim 82 wherein the prostate disease is selected from the group consisting of prostate cancer, prostatitis, and benign prostatic hyperplasia.

84. The method of claim 82 wherein the plurality of detection reagents comprises at least 2 detection reagents.

85. The method of claim 82 wherein the plurality of detection reagents comprises at least 3 detection reagents.

86. The method of claim 82 wherein the plurality of detection reagents comprises at least 4 detection reagents.

87. The method of claim 82 wherein the plurality of detection reagents comprises at least 5 detection reagents.

88. The method of claim 82 wherein the plurality of detection reagents comprises at least 6 detection reagents.

89. A method for monitoring a response to a therapy in a subject, comprising the steps of:
(a) measuring in a blood sample obtained from the subject the level of a plurality of tissue-derived serum glycoproteins, wherein the plurality of tissue-derived serum glycoproteins are selected from any one of the tissue-derived serum glycoprotein sets provided in Table 1;
(b) repeating step (a) using a blood sample obtained from the subject after undergoing therapy; and
(c) comparing the level of the plurality of tissue-derived serum glycoproteins detected in step (b) to the amount detected in step (a) and therefrom monitoring the response to the therapy in the patient.

90. A method for monitoring a response to a therapy in a subject, comprising the steps of:
(a) measuring in a blood sample obtained from the subject the level of a plurality of tissue-derived serum glycoproteins, wherein the plurality of tissue-derived serum glycoproteins are selected from two or more of the tissue-derived serum glycoprotein sets provided in Table 1;
(b) repeating step (a) using a blood sample obtained from the subject after undergoing therapy; and
(c) comparing the level of the plurality of tissue-derived serum glycoproteins detected in step (b) to the amount detected in step (a) and therefrom monitoring the response to the therapy in the patient.

91. A targeting agent comprising an tissue-derived probe that specifically recognizes a sequence of any one or more of the sequences set forth in Table 1, wherein said probe has attached thereto a therapeutic agent, said therapeutic agent comprising a radioisotope or cytotoxic agent.

92. An assay device comprising a panel of detection reagents wherein each detection reagent in the panel, with the exception of a negative and positive control, is capable of specific interaction with one of a plurality of tissue-derived serum glycoproteins present in blood, wherein the plurality of tissue-derived serum glycoproteins are derived from the same tissue and wherein the pattern of interaction between the detection reagents and the tissue-derived serum glycoproteins present in a blood sample is indicative of a biological condition.
